United States Patent Application Publication US 2018/0126003 A1 - sequence listing, part 151

SEQ ID NO: 265290 - DNA, 1930 bp, Artificial Sequence
  derived and/or modified sequence
cttaaaaaaaaaaaaaccaaaaaaacccaaagcataactacttttgcagctgaacgtgactgtggcgtgcaggaagtggagcattggcatgaagtggctcctagtggctgcttggcgcacgccagctgccctcctctgactccagtggcacctgggggcctggcctcactgacgggagaacattggcgtgaaggctgctggcgactgggccagcattcattgtgaagaccggagggacacaccctgctgctcatgtctgcagggctctgagaggaggaagcctggggcaggacctgcgccagtggccgctgggcacagcatggagcaccccagcaagatggaattcttccagaagctgggctatgaccgggaggatgtgctccgggtgttgggcaagctgggcgagggcgccctggtcaacgacgtgctgcaggagcttatccgcacgggcagccgcccgggtgccctggagcacccggctgcacccaggctagtgcctcggggctcctgtggggtcccggactctgcccagcgtggcccggggacagccctggaagaggacttcagaaccctggccagttctctgcgacccatagtgattgatggcagcaacgtggcgatgagccatggaaataaagaaaccttctcttgccggggaatcaagctggctgttgactggttcagggacagaggacacacctacatcaaagtttttgttccatcctggaggaaggacccaccaagagctgacacccctatcagagagcagcacgtgctggcggagctggagcggcaggcggtgctggtgtacacgccgtcccgcaaggtgcacggcaagcgcctggtctgctacgacgaccgctacatcgtgaaggtggcctacgagcaggacggcgtcatcgtctccaacgacaactaccgggacctgcagagcgagaaccccgagtggaagtggttcatcgagcagaggctgctcatgttctccttcgtcaacgaccggttcatgccgcctgatgaccccctgggccgccatggaccctccctgagcaacttcctgagcaggaagccgaagcccccagagccatcctggcagcattgtccttatggcaagaaatgcacctatggcatcaagtgcaagttctaccacccggagaggccgcaccacgcgcaactggcggtggccgacgagctccgcgccaagacaggggcccggcctggcgcgggcgccgaggagcagcggccaccgagagccccgggcggctccgcaggagcccgggcggccccccgggaaccatttgcgcacagcctcccgccggcgcgggggtccccggacctggccgccctgcgagggagcttctctcggctggccttcagcgacgacctggggcccctggggccgcctctcccggtccccgcctgcagcctcacgccccgactgggcgggcccgactgggtgtccgcgggcggccgggtgccaggcccgctcagcctccctagcccggagagccagttctccccgggcgacctcccgcctccgcccggcctgcagctccagccgcggggcgaacaccgccctagggacctgcacggcgacttgctttccccgcgcaggccacccgacgacccgtgggcccgtccaccccgctccgaccgcttccctgggcgctccgtctgggcggagccggcctggggcgacggcgccactgggggactttcagtgtacgcgaccgaggacgacgagggggacgcgcgcgcccgggctcgcatcgcgctctacagcgtcttcccgcgtgaccaggtggaccgcgtgatggccgcgttcccggagctctcagacctcgccaggctcatcctcctggtacagagatgccagagcgcgggggcgcccctgggcaagccctaagggaccaacacgcacttgcagggaatg

SEQ ID NO: 265291 - DNA, 2753 bp, Artificial Sequence
  derived and/or modified sequence
ggaagtggagcattggcatgaagtggctcctagtggctgcttggcgcacgccagctgccctcctctgactccagtggcacctgggggcctggcctcactgacgggagaacattggcgtgaaggctgctggcgactgggccagcattcattgtgaagaccggagggacacaccctgctgctcatgtctgcagggctctgagaggaggaagcctggggcaggacctgcgccagtggccgctgggcacagcatggagcaccccagcaagatggaattcttccagaagctgggctatgaccgggaggatgtgctccgggtgttgggcaagctgggcgagggcgccctggtcaacgacgtgctgcaggagcttatccgcacgggcagccgcccgggtgccctggagcacccggctgcacccaggctagtgcctcggggctcctgtggggtcccggactctgcccagcgtggcccggggacagccctggaagaggacttcagaaccctggccagttctctgcgacccatagtgattgatggcagcaacgtggcgatgagccatggaaataaagaaaccttctcttgccggggaatcaagctggctgttgactggttcagggacagaggacacacctacatcaaagtttttgttccatcctggaggaaggacccaccaagagctgacacccctatcagagagcagcacgtgctggcggagctggagcggcaggcggtgctggtgtacacgccgtcccgcaaggtgcacggcaagcgcctggtctgctacgacgaccgctacatcgtgaaggtggcctacgagcaggacggcgtcatcgtctccaacgacaactaccgggacctgcagagcgagaaccccgagtggaagtggttcatcgagcagaggctgctcatgttctccttcgtcaacgaccggttcatgccgcctgatgaccccctgggccgccatggaccctccctgagcaacttcctgagcaggaagccgaagcccccagagccatcctggcagcattgtccttatggcaagaaatgcacctatggcatcaagtgcaagttctaccacccggagaggccgcaccacgcgcaactggcggtggccgacgagctccgcgccaagacaggggcccgactgggtgtccgcgggcgacctcccgcctccgcccggcctgcagctccagccgcggggcgaacaccgccctagggacctgcacggcgacttgctttccccgcgcaggccacccgacgacccgtgggcccgtccaccccgctccgaccgcttccctgggcgctccgtctgggcggagccggcctggggcgacggcgccactgggggactttcagtgtacgcgaccgaggacgacgagggggacgcgcgcgcccgggctcgcatcgcgctctacagcgtcttcccgcgtgaccaggtggaccgcgtgatggccgcgttcccggagctctcagacctcgccaggctcatcctcctggtacagagatgccagagcgcgggggcgcccctgggcaagccctaagggaccaacacgcacttgcagggaatggcccagcctcgccttgcgtcttggacgggtggacctgtggttgccagcctggacctgagtgggcccatcatggtgcccccttttctttaaagatggtcagggaagcctgcttcctcctcctgagcggggttgtgggggcctggtggcacttggtgatcctcactgaggccggggcctgctgcggggaggtccacccacttccgtggagggaatgattttccatgtgcacggagactgcgggtccaagctgcagtagaacccacaagtgggtcacaaaatcaatttagtgggtcaccaccacaaacacagtggactgggacagggcaaagcgcaccctgtgccatcaggctgagtctgaactcttgttacctatcctgtgtccccacccccttggcagccatgtaactaacctcaatgtgggtcgtagtcagaagtttaaaaaagactatgaatgctcttgaatttcattgcttcaggtaatgtttgaaatatgtagtcaggtggccaggggaggtttgctatctggaagttttcatgttagctattgctaaccccacccgcaagggcagcccagcctccaggtgtgggctctcctgtgctctgaattgtgtggctgtcctatgctggggacaagtggtaggagcgctttgtcccagggccaccttctggggccttcacacacatacccccaccacacaaacacacacacacacacacacacacacacacagtctatcatacatgtacatactcacacacaccacacagacacatactgtttggctaagggttaagtatctccaatattttattagccatccatcatggcagtttccagaataggctttctactgtaccagctgagctgccttcttttacttcttcttcttcttctttttttaaacagacagagtctcggcccggcatggtggctcatgcctctcagcctcccaaagtgctgggattataggcgtgagccaccgcgcctggccccgggcctttatttttatttttaaccttttgacaagacacgctttctattagagctgctttttgtctccctggttcgatttcctgatgtagaatcattgtgttgctgatttttcagttgaaaatgtttaaactgcttcctttgagaacaagtttgagttttagtaagctgtaaagctgttttatttgattcactg

SEQ ID NO: 265292 - DNA, 1236 bp, Artificial Sequence
  derived and/or modified sequence
ctgaacgtgactgtggcgtgcaggaagtggagcattggcatgaagtggctcctagtggctgcttggcgcacgccagctgccctcctctgactccagtggcacctgggggcctggcctcactgacgggagaacattggcgtgaaggctgctggcgactgggccagcattcattgtgaagaccggagggacacaccctgctgctcatgtctgcagggctctgagaggaggaagcctggggcaggacctgcgccagtggccgctgggcacagcatggagcaccccagcaagatggaattcttccagaagctgggctatgaccgggaggatgtgctccgggtgttgggcaagctgggcgagggcgccctggtcaacgacgtgctgcaggagcttatccgcacgggcagccgcccgggtgccctggagcacccggctgcacccaggctagtgcctcggggctcctgtggggtcccggactctgcccagcgtggcccggggacagccctggaagaggacttcagaaccctggccagttctctgcgacccatagtgattgatggcagcaacgtggcgatgagccatggaaataaagaaaccttctcttgccggggaatcaagctggctgttgactggttcagggacagaggacacacctacatcaaagtttttgttccatcctggaggaaggacccaccaagagctgacacccctatcagagagcagcacgtgctggcggagctggagcggcaggcggtgctggtgtacacgccgtcccgcaaggtgcacggcaagcgcctggtctgctacgacgaccgctacatcgtgaaggtggcctacgagcaggacggcgtcatcgtctccaacgacaactaccgggacctgcagagcgagaaccccgagtggaagtggttcatcgagcagaggctgctcatgttctccttcgtcaacgaccggttcatgccgcctgatgaccccctgggccgccatggaccctccctgagcaacttcctgagcaggaagccgaagcccccagagccatcctggcagcattgtccttatggcaagaaatgcacctatggcatcaagtgcaagttctaccacccggagaggccgcaccacgcgcaactggcggtggccgacgagctccgcgccaagacaggggcccggcctgttctccccgggcgacctcccgcctccgcccggcctgcagctccagccgcggggcgaacaccgccctag

SEQ ID NO: 265293 - protein, 3169 aa, Artificial Sequence
  derived and/or modified sequence
MHSAGTPGLSSRRTGNSTSFQPGPPPPPRLLLLLLLLLSLVSRVPAQPAAFGRALLSPGLAGAAGVPAEEAIVLANRGLRVPFGREVWLDPLHDLVLQVQPGDRCAVSVLDNDALAQRPGRLSPKRFPCDFGPGEVRYSHLGARSPSRDRVRLQLRYDAPGGAVVLPLVLEVEVVFTQLEVVTRNLPLVVEELLGTSNALDARSLEFAFQPETEECRVGILSGLGALPRYGELLHYPQVPGGAREGGAPETLLMDCKAFQELGVRYRHTAASRSPNRDWIPMVVELRSRGAPVGSPALKREHFQVLVRIRGGAENTAPKPSFVAMMMMEVDQFVLTALTPDMLAAEDAESPSDLLIFNLTSPFQPGQGYLVSTDDRSLPLSSFTQRDLRLLKIAYQPPSEDSDQERLFELELEVVDLEGAASDPFAFMVVVKPMNTMAPVVTRNTGLILYEGQSRPLTGPAGSGPQNLVISDEDDLEAVRLEVVAGLRHGHLVILGASSGSSAPKSFTVAELAAGQVVYQHDDRDGSLSDNLVLRMVDGGGRHQVQFLFPITLVPVDDQPPVLNANTGLTLAEGETVPILPLSLSATDMDSDDSLLLFVLESPFLTTGHLLLRQTHPPHEKQELLRGLWRKEGAFYERTVTEWQQQDITEGRLFYRHSGPHSPGPVTDQFTFRVQDNHDPPNQSGLQRFVIRIHPVDRLPPELGSGCPLRMVVQESQLTPLRKKWLRYTDLDTDDRELRYTVTQSPTDTDENHLPAPLGTLVLTDNPSVVVTHFTQAQINHHKIAYRPPGQELGVATRVAQFQFQVEDRAGNVAPGTFTLYLHPVDNQPPEILNTGFTIQEKGHHILSETELHVNDVDTDVAHISFTLTQAPKHGHMRVSGQILHVGGLFHLEDIKQGRVSYAHNGDKSLTDSCSLEVSDRHHVVPITLRVNVRPVDDEVPILSHPTGTLESYLDVLENGATEITANVIKGTNEETDDLMLTFLLEDPPLYGEILVNGIPAEQFTQRDILEGSVVYTHTSGEIGLLPKADSFNLSLSDMSQEWRIGGNTIQGVTIWVTILPVDSQAPEIFVGEQLIVMEGDKSVITSVHISAEDVDSLNDDILCTIVIQPTSGYVENISPAPGSEKSRAGIAISAFNLKDLRQGHINYVQSVHKGVEPVEDRFVFRCSDGINFSERQFFPIVIIPTNDEQPEMFMREFMVMEGMSLVIDTPILNAADADVPLDDLTFTITQFPTHGHIMNQLINGTVLVESFTLDQIIESSSIIYEHDDSETQEDSFVIKLTDGKHSVEKTVLIIVIPVDDETPRMTINNGLEIEIGDTKIINNKILMATDLDSEDKSLVYIIRYGPGHGLLQRRKPTGAFENITLGMNFTQDEVDRNLIQYVHLGQEGIRDLIKFDVTDGINPLIDRYFYVSIGSIDIVFPDVISKGVSLKEGGKVTLTTDLLSTSDLNSPDENLVFTITRAPMRGHLECTDQPGVSITSFTQLQLAGNKIYYIHTADDEVKMDSFEFQVTDGRNPVFRTFRISISDVDNKKPVVTIHKLVVSESENKLITPFELTVEDRDTPDKLLKFTITQVPIHGHLLFNNTRPVMVFTKQDLNENLISYKHDGTESSEDSFSFTVTDGTHTDFYVFPDTVFETRRPQVMKIQVLAVDNSVPQIAVNKGASTLRTLATGHLGFMITSKILKVEDRDSLHISLRFIVTEAPQHGYLLNLDKGNHSITQFTQADIDDMKICYVLREGANATSDMFYFAVEDGGGNKLTYQNFRLNWAWISFEKEYYLVNEDSKFLDVVLKRRGYLGETSFISIGTRDRTAEKDKDFKGKAQKQVQFNPGQTRATWRVRILSDGEHEQSETFQVVLSEPVLAALEFPTVATVEIVDPGDEPTVFIPQSKYSVEEDVGELFIPIRRSGDVSQELMVVCYTQQGTATGTVPTSVLSYSDYISRPEDHTSVVRFDKDEREKLCRIVIIDDSLYEEEETFHVLLSMPMGGRIGSEFPGAQVTIVPDKDDEPIFYFGDVEYSVDESAGYVEVQVWRTGTDLSKSSSVTVRSRKTDPPSADAGTDYVGISRNLDFAPGVNMQPVRVVILDDLGQPALEGIEKFELVLRMPMNAALGEPSKATVSINDSVSDLPKMQFKERIYTGSESDGQIVTMIHRTGDVQYRSSVRCYTRQGSAQVMMDFEERPNTDTSIITFLPGETEKPCILELMDDVLYEEVEELRLVLGTPQSNSPFGAAVGEQNETLIRIRDDADKTVIKFGETKFSVTEPKEPGESVVIRIPVIRQGDTSKVSIVRVHTKDGSATSGEDYHPVSEEIEFKEGETQHVVEIEVTFDGVREMREAFTVHLKPDENMIAEMQLTKAIVYIEEMSSMADVTFPSVPQIVSLLMYDDTSKAKESAEPMSGYPVICITACNPKYSDYDKTGSICASENINDTLTRYRWLISAPAGPDGVTSPMREVDFDTFFTSSKMVTLDSIYFQPGSRVQCAARAVNTNGDEGLELMSPIVTISREEGLCQPRVPGVVGAEPFSAKLRYTGPEDADYTNLIKLTVTMPHIDGMLPVISTRELSNFELTLSPDGTRVGNHKCSNLLDYTEVKTHYGFLTDATKNPEIIGETYPYQYSLSIRGSTTLRFYRNLNLEACLWEFVSYYDMSELLADCGGTIGTDGQVLNLVQSYVTLRVPLYVSYVFHSPVGVGGWQHFDLKSELRLTFVYDTAILWNDGIGSPPEAELQGSLYPTSMRIGDEGRLAVHFKTEAQFHGLFVLSHPASFTSSVIMSADHPGLTFSLRLIRSEPTYNQPVQQWSFVSDFAVRDYSGTYTVKLVPCTAPSHQEYRLPVTCNPREPVTFDLDIRFQQVSDPVAAEFSLNTQMYLLSKKSLWLSDGSMGFGQESDVAFAEGDIIYGRVMVDPVQNLGDSFYCSIEKVFLCTGADGYVPKYSPMNAEYGCLADSPSLLYRFKIVDKAQPETQATSFGNVLFNAKLAVDDPEAILLVNQPGSDGFKVDSTPLFQVALGREWYIHTIYTVRSKDNANRGIGKRSVEYHSLVSQGKPQSTTKSRKKREIRSTPSLAWEIGAENSRGTNIQHIALDRTKRQIPHGRAPPDGILPWELNSPSSAVSLVTVVGGTTVGLLTICLTVIAVLMCRGKESFRGKDAPKGSSSSEPMVPPQSHHNDSSEV

SEQ ID NO: 265294 - DNA, 14876 bp, Artificial Sequence
  derived and/or modified sequence
ggacggcctgggaaggcttcggctcctcggctgcggctccagcccggacggcgccgcgcaactttgccatccttctggcccagccccggctacaggaggaccccgcgggcaacgcgcggagttcctggcacttcccggcggtgtctcttgttgtctgcccggggaccgacttcgcatgctctcaggctgacctgtccaagcccgaacaccgggaccatgcactcagccgggactcccgggttatcctcgcgccggacaggcaactccaccagctttcaaccaggaccgccaccgccgccccggctgctgctgctgctgctgcttctcctgtcactggtaagccgcgtcccggcacagcccgctgccttcggcagggcgttgctgtcccctggtctcgcgggggctgcaggggtccctgctgaggaggccatagtgctggcgaaccgcggactccgggtgcctttcggccgtgaagtctggctggatcccctgcatgacctggtgttgcaggtgcagcccggggaccgctgcgcggtttcggtactagacaacgacgcactggcccagcgaccgggccgcctgagtcccaagcgcttcccgtgcgactttggccctggcgaggtgcgctactctcacctgggcgcgcgcagcccgtctcgggaccgcgtccggctgcagctgcgctatgacgcgcccggaggggcagtagtgctaccactggtactggaggtggaggtggtcttcacccagctggaggttgtgactcggaacttgcctctggtcgtggaagagctgctggggaccagcaatgccctggacgcgcggagcctggagttcgccttccagcccgagacagaggagtgccgcgtgggcatcctgtccggcttgggcgcgctgcctcgctatggagaactcctccactacccgcaggtccctggaggagccagagagggaggcgccccggagactctcctgatggactgcaaagctttccaggaactaggcgtgcgctatcgccacacagccgccagtcgctcaccaaacagggactggatacccatggtggtggagctgcgttcacgaggggctcctgtgggcagccctgctttgaaacgcgagcacttccaggttctggtgaggatccgaggaggggccgagaacactgcacccaagcccagtttcgtggccatgatgatgatggaggtggaccagtttgtactgacggccctgaccccagacatgctggcagccgaggatgctgagtctccctctgacctgttgatcttcaaccttacttctccattccagcctggccagggctacttggtgagcaccgatgatcgcagcctgcccctttcctccttcactcagagggatctgcggctcctgaagattgcctaccagcccccttctgaagactctgaccaggagcgcctctttgaactggaattggaggtagtggatctagaaggagcagcttcagacccttttgccttcatggtagtggtgaagcccatgaacacaatggctccggtggtcacccggaataccggtcttattctctatgagggtcagtctcggcccctcacaggccctgcaggcagtggtccgcaaaacttggtcatcagcgatgaggatgacctagaagcagtgcggctagaggtggtggctgggctccggcatggtcaccttgtcattctgggtgcttccagtggcagctctgctcccaagagctttacagtggctgagctggcagccggccaggtggtctaccagcatgatgacagagacggctcgctgagcgacaacctggtgcttcgcatggtggatggaggaggcaggcaccaggtacagtttctgttccccatcaccttagtgcctgtggatgaccagccacctgttctcaatgccaacacggggctgacactggcagagggtgaaacagtgcccatcctgcccctttccctgagtgcaactgacatggattcagatgattctctgctgctttttgtgctggagtcacccttcttaactacggggcatctgcttctccgccaaactcaccctccccatgagaagcaggaacttctcagaggcctttggaggaaggagggggcattttatgagcgaacagtgacagagtggcagcagcaggacataacagagggcaggctgttctatagacactctgggccccatagtcctgggccagtcacagaccagttcacatttagagtccaggataaccatgaccctcctaatcagtccgggctacagcggtttgtgattcgtatccatcctgtggatcgcctccctccggagctgggcagtggctgtccccttcgtatggtggtacaggaatcccagctcacaccactgaggaagaagtggctgcgctacactgacctggacacagatgaccgagaactacgttacacagtgactcagtcccccacagacacagacgaaaatcacctgccagccccactgggtaccttggtcttgactgacaacccctcagtcgtggtgacccattttacccaagcccagatcaaccatcataaaattgcttacagacccccgggtcaagaactgggcgtggctactcgagtggcccagttccagttccaggtggaagaccgagctgggaatgtggctccaggtacctttaccctttacttgcatcccgtggacaaccagccacctgagatcctcaacaccggcttcactattcaggagaagggtcaccacatcctgagtgagacagagttgcacgtgaatgatgtagacactgatgttgcccatatctctttcactctcactcaggcacccaaacatggccacatgagagtgtctggacagatcctgcatgtagggggtctcttccacttggaggacataaaacagggccgagtttcctatgcccataatggggacaagtccctgactgatagctgctccttggaagtcagtgacagacatcatgtggtgcccatcactctcagagtaaatgtccggccagtggatgatgaagtgcccatactgagccatcctactggcactctggagtcctatctagatgtcttagaaaatggggctactgaaatcactgccaatgttattaaggggaccaatgaggaaactgatgacttgatgttgactttcctcttggaagatccacctttgtatggggaaatcttggtcaatggcattccagcagagcagtttactcaaagggacatcttggagggctctgttgtatatacccacaccagtggtgagataggcctattgcctaaagcggattcttttaacctgagtctgtcagatatgtctcaagaatggagaattggtggcaatactatccaaggagttactatatgggtgaccatcctgcctgttgatagccaggccccagaaatctttgtaggtgaacagttgatagtaatggaaggtgataaaagtgttataacatcagtgcatataagtgctgaagatgtcgactccctgaatgatgacatcttgtgcactatagttattcagcctacttcaggttatgttgaaaacatttctccagcaccaggctctgagaaatcaagagcagggattgccataagtgctttcaacttgaaagatctcaggcagggccacataaactatgtccagagtgtccataaaggggtggaacctgtggaggaccgatttgtatttcgttgttctgatggcattaacttttcagagagacagttcttccccattgtaatcattcccaccaatgatgaacagccagagatgtttatgagagaatttatggtgatggaaggcatgagtctggtaattgatacacccattctcaatgctgctgatgctgatgttcccctggatgatttaactttcactattacccaattccccactcatggtcacatcatgaatcagctgataaatggcacggttttggtcgaaagcttcaccttggatcagatcatagagagttccagcattatttatgagcatgatgactccgagacccaggaagacagttttgtgattaaactaacagatgggaagcactctgtggaaaagacggtcctcattatagttatccctgttgatgatgagacgcccagaatgactatcaataatggactagaaatagaaattggggataccaagattatcaacaacaaaatattaatggcaacagatttagattcagaagacaaatctttggtttatattattcgttatgggccaggacatggcttattacagagacgaaaacctactggtgcctttgaaaatatcacactgggcatgaattttacccaggatgaagtagacagaaacttaattcagtatgtccatttggggcaagagggcattcgggacctaattaaatttgatgtgactgatggaataaatcccctcatagatcgttacttttatgtgtccatcgggagcattgacattgtcttccctgatgtgataagtaagggagtgtccttgaaagaaggtggcaaagtcactcttacaacagacctactaagcactagtgacttgaacagtcctgatgaaaacttggtttttaccatcaccagggctcccatgcgaggtcacctggaatgcacggatcagcctggtgtgtccatcacgtctttcactcagctgcaactggctggaaacaaaatctactacatccacacagctgatgatgaagtgaaaatggacagttttgagtttcaagtcaccgatggacgtaaccctgtctttcggacattccgtatctccattagcgatgtggacaataaaaagccagtggtcaccatccacaagctggttgtcagtgaaagtgaaaacaagctgattactccttttgagctcactgtcgaagacagagatactcctgacaagctcctgaaattcactatcacccaggtgcctattcatggccatctcctattcaacaataccagacctgtcatggtttttaccaagcaagacttgaatgaaaacttaatcagctacaaacatgatggcactgagtcaagtgaagatagcttctccttcacagtgactgatggcacccatacagacttctatgtttttcctgatacggtgtttgaaacaaggagaccccaagtgatgaagatccaggtcttggctgttgacaacagtgtcccccaaatcgcagtgaataagggggcctctacacttcgcactctagccactggccacttggggttcatgatcacaagcaaaatattgaaagtggaggacagagacagcttacacatttctcttagatttatcgtgacagaggcccctcaacatggatatcttctcaacctggacaaaggcaaccacagcatcactcagttcacacaagctgacattgatgacatgaaaatatgctatgtcttaagagaaggggctaatgccacaagtgatatgttctattttgcagttgaagatggtggtggaaacaagttaacgtaccagaattttcgtctgaattgggcatggatctcctttgaaaaggaatattacctggtcaatgaggactccaaatttctagatgttgttcttaaacgtagaggttacttgggagaaacttcttttataagtattggcacaagagacagaactgcagaaaaagacaaagacttcaagggcaaagcacagaaacaagtgcagttcaacccaggccagaccagggccacatggcgagtgcggatcctgagtgatggggagcatgagcagtctgaaacctttcaggtggtactctcagagcccgtgctggctgccttggaattccccacagtcgccactgttgagatcgttgatccaggagatgagccaactgtgtttattccccagtccaaatactccgttgaagaagatgttggtgagctgttcattcccatcaggaggagcggagatgtgagccaggagttgatggtggtctgttatacccaacaaggaacagcaactggaactgtgccgacttccgtgttgtcttactctgattacatatccaggcctgaggaccacaccagtgttgtccgctttgacaaagatgaacgggagaaactgtgtcggatagtcataattgatgactctttgtacgaggaggaggaaaccttccatgtccttctgagcatgcccatggggggaagaatcggatcagagttcccaggggctcaagttacaatcgttcctgacaaagatgatgaacccatcttttacttcggtgatgtggaatactctgtggatgagagtgctggctatgtggaagtgcaggtgtggagaacgggcactgacctgtccaagtcttctagtgtcacagtgaggtctcggaaaacagatcctccctctgcagatgctggaacagactatgtgggcatcagccgtaatttagattttgcacctggagtcaacatgcagcctgttcgtgttgtcattctggatgaccttggacaaccagcgctggagggaattgagaaatttgaactggtgcttcgcatgcctatgaacgcagcccttggcgagcccagcaaagccacagtgtccataaatgactctgtctccgatttgcctaagatgcaattcaaagaacgaatatatactggcagcgaaagtgatgggcagatagttacaatgatccataggactggggatgtccagtacagatcttcagtgagatgctacacccggcaggggtctgcacaggtgatgatggactttgaagaacgcccaaacactgatacctccatcatcacattcctccctggtgagacagaaaagccctgcattcttgagctgatggacgatgtgctctatgaggaggtagaggagctccgcctggtactcggcactccacaaagcaactctccctttggggctgcagttggtgaacaaaatgaaactctcataaggatccgagatgatgctgataagactgttattaaatttggagaaaccaaatttagtgtcactgaacccaaagaacctggagagtcggtggttataagaattccagtgattcgccaaggagacacttcaaaggtttccattgtgagagtccacaccaaggatggctcggccacctctggagaagactaccaccctgtgtcagaagaaattgagtttaaggaaggggaaacccagcacgtggttgaaatcgaagttacctttgacggggtgagagagatgagagaggccttcactgttcacctaaaacctgatgaaaatatgatagcagagatgcagttgacgaaagccattgtgtacatagaagaaatgagcagcatggcagatgtcacttttccttctgtccctcaaattgtatccctgttgatgtatgacgacacttccaaagctaaggagagtgctgaacccatgtctggctatcctgtcatctgtatcacagcttgcaaccccaaatattcagactacgataaaacaggctctatctgtgcaagtgagaacatcaatgacactttgacgcggtaccggtggctgattagtgcacctgcgggccctgacggtgtgaccagccctatgagagaagtggacttcgacaccttttttacgtcatccaagatggtcacactggactccatatactttcagcctggctcccgggtacagtgcgcagctcgtgctgtgaacaccaatggggatgaaggcctggagctcatgagccctattgtaaccatcagcagagaagaaggtctttgtcagccccgtgtacctggggttgttggagcagagccgttctcagctaaattgcgctacacaggccctgaggatgcagactacacaaaccttatcaagctcactgtcacaatgccacacatagatggcatgctccccgtgatctccactagagagctttccaactttgagctcaccctcagccctgatggcacaagagttggaaaccacaagtgctccaacctcctggattatactgaagtgaagactcattatggtttcttgactgatgctaccaaaaatccagaaataattggagagacatatccttaccagtacagcttgtccatcagaggttccactaccttgcgcttctaccggaacctgaacctagaggcctgtttatgggagttcgttagctactatgacatgtcagaactccttgctgactgtggtggcaccattggaacagatggacaggtcctaaacctagtgcagtcctatgtgacccttcgagtccctctgtatgtttcctacgtgttccattcccccgtgggggtaggaggctggcagcattttgacttgaagtcagagcttcgtctaacttttgtgtacgacaccgccatcttgtggaatgatggaattggcagccccccagaggctgaacttcaaggttctctctatccaaccagcatgcgcatcggtgatgaggggcgcttggccgtgcacttcaagacagaggctcagttccatggcttatttgtgctgtcacatcccgcatcctttacaagctcagtgatcatgtcagctgatcatccaggcctgacattttccctccgcctcataaggagtgaaccaacctataaccagccagtacagcagtggagctttgtctctgactttgccgtacgtgactactcagggacctatactgtgaagctggtgccatgcactgccccatcacatcaggaataccgcctgccagtcacctgcaaccccagagaacctgtcacctttgaccttgacatccgattccaacaggtcagtgatccagtggctgctgagtttagcttgaacacccaaatgtacctgctctctaagaagagtctctggttgtctgatggatccatgggattcgggcaagagagtgatgttgcttttgcagaaggtgatataatttatggtcgtgtcatggtggatcctgtccagaatctgggtgactccttttactgcagcattgagaaggtgtttctatgcactggagctgatggctatgttcccaagtatagtccaatgaatgcagaatatggctgcttagccgactctccttcactcttatatagatttaaaattgtggacaaagctcagccagagacacaagcgaccagttttggaaatgtcctatttaatgccaaactagcagtggatgaccctgaagccattctcttagtgaatcagcctggatctgatggatttaaagtcgactcaacaccactctttcaggtcgctctaggccgagaatggtatatacatacgatctatacagtgagatcgaaagacaatgccaatcgaggtattggcaaaagaagtgtggagtaccattctctggtgagtcaaggaaagccccaatccaccaccaagagccggaagaagagagagatcaggagcacaccctcactggcatgggagattggtgctgaaaacagtcgaggaacaaacatccagcacattgccctggaccgcaccaagaggcagatcccccatgggagagcacctccagatggcatcctcccctgggagctcaacagccccagctctgcagtcagcctggtcactgtggtgggaggcaccacggtagggttactcaccatctgcctcactgtcattgcagtgctgatgtgcaggggcaaggaaagtttcagggggaaggatgccccgaaaggctccagcagcagtgagcccatggtgcccccacagagccatcacaatgacagctcagaagtttgatgactgcaggtagaattcaaccttttccgtaagtgcctcggaaaagatcacaatggaaccttaaatacttctggtaaaccatagagaatggaggatggctgtgatgaagctgcttagagaatatgactgtactaatggagtttgatttgaattctccatactcttttttgcatcaaaggacaaattaaggcatctttcctcttgccccaaaggcagcaacaacgtactcatatgtacacagagccatgatgtgaggaatgtactcctcattttagacatattctctatgcagtggagataaatctattaaaaggtgctaacagactctcttacaagtgtaagaggaatctactgttgctatgttagtgtgaatgttgaaggtgcaattatcacattgtttattaattgtataacagattattactagaaaggtttttgttgctagtctggaaaactggtgaacacactgtttattatgacaagttttcaaataggtgaagacagcatagaattatgaccagggtggctcaacccacaaatcaactgatctactacttgggagacagtggaaggaaagatagagggaaggaagttcactcacttgaatttgaattgcttctcattctcatcagactctccttgttttgtttgcatatttaattttaaattaaaccaaagaatatgttaattctgaaagagatttttaagagatgctgctctgttttggcatatagtgagtaatggtagagctcttgcatggtaatataccttattggtgctcaacatttgtgggaaattagagggttggtgagattttggtgatgaataaatgccatagagttagagtcactacaagacaatgttctctaagaactgagcctagatgtttgcagtattgaacccataaatgataataagaaacattgttacagatggtgaagggagaaagtggtatttattaatataatgtgtataatcagagtgcctcttatacatactttatagaataaaggaacattttgacagatgaggttatccctcggagtagcgtaatcacacaataacatttagaacttaaattggctacaggacattttattagctttctatccagcatctggtccaaacgatgggactctctgcaactatcattccagaaatggtcttggaggtggccagaatcattgaccatatttttatttggttcaagaagacatcgctctggcatccccagttcagtgaactggtacaatgtggtccctctcaatatttaaaaatataatttgtaacagtgcttaccattcacctcccaaagccaaggaacttgagtgagcttccttggcaagcctcccattgcctttctgcatcaatgtgtttgttaccaaatagcagaaatttcgcttagaaggggaaaacttcagctttccaaaagctagtaaacatgtttcaaagaaaaataaggtcaggagaaaaagaataatgcctacagattatccttcagatgctggctagaatcccctttgacttctagccataagctggccacattggacatcttggtcactgcagaattttaaaaggcaaacttctcagaacagatgtgcacatcttaatttggtgtctgtaagtatcaaccatttcttgatcaagataaggaagcaacactgatactgagagagaggtcatatgtccaatagttgcctttcttctcttaggcagctctgcacttcatgttcagttttttaaaaatagactgtagtatcctttcattggagaatttacaaaaatatcatctacagctcaaaagtcccactaacggcttatatgaacagaaagtactgtgtagcccaggagtttatttagcaagataaatagtggtaatttcttaatcattcccctttcctttgctttaccttctggcagatgcttagctacttctttggctacctcataatttgtatgggaatgaacatgaattagggaacttcaaatagtgcgtagacttttccctacttaccattgggttcaattgatgtagactgttagagcaagtatactcaatcaacttgctgatattttagtagttaacagcttccgagcctatcatgcaatttggagtctgtcaatgaatatagcaatcggtgaagcattactgtacgaagtctgttttcaggctttgggtcaagctggttttataccaaatttcactctacaatgcatattctaatgaagctactttatataaattggagagcttataaaatgcagaacatttctatcctatcctaccaaatatttatccttctctgtcctctattctcttactctcctctctccctttttccttccctttattcccttgaaaaaagagaatctgtgggaaataggcagatatagctttttaaaatataaagtacttgggattttgcattatttttcttaatatctatttactaagtatgtaatttaatatacattaattattttttgaaactcttgttagtgggaagaatatggtaaattttttgttaaataaaatagacccttatgtttagcattttgtttttagagaactattctggtactatcagaacaaatacataaaataacttcccatagagaacaggatatagcaataatagctccttagatactcagtggcttctgactccaatcaaggtcttgttgatattatatagtaaaaataaaaccaaaaataaatattattcaagtggctcttctaagcatgtgaatcatgaagcactgaaatatgtattttaatgatgatcttatttattcccatttttgcccttagttaacatttactggtgctcacctaggattggctattctgagggattgcatagaaaccaagctccacttgctgtccttgggaaggttataactgaatgcagctctttatttggactaaagtgtcaggatatgcattagattctctcctgaaccaaaaacacaacagtcattatctgtgaaccataatttaaaaatctttctagaataacaacagcagactccactcttgtttgtctaaaagagccctactgggtatggatcattctgatgacagatttatacaaaatgattcaaaccagtaacttagtaaaattgaccttcgcaaaacctcactgggggagtgccttgtagagctgtgggtgggactgcacattcttttcctcttagtaaaagataggcccactttattccaagaataacacttagcacataaactcttcttccagctcgttagcagcattagcaccttctgaattccaccctctcagaagaatccacagtgtttgaacaatttgcataaaggtcagctagcatcctgctgccaagccactgcatagcatttgtgataagaaggaccaactctaggctcaatatgaagggatttagttctgtaagcagcaaaaaagcttctttatcaagtcatcttacctctaattcttttccagtgtgccaactccaaagtcaacattaaaaatgtaaatggacctgtgtaaatatcacagagagcttttccttatacatctcaatgctgagagttaaaatattcccaggttaaaatttttttaaagtaccaataatagagctaaatacaatgacatttgcttttaaaaggtggatattttatttctgctttttgaaaatacttatttagtattgacttggaagccaatttggtcctttaataagtaaagaaaataatatgtttaaaaatgtaaatgttttacaaatttgaaactttcataattgtattaatcagaaaacaagcacattgccattctttgaaactcatgtttctagacatgacagcagtaataaaaggatgaaaacaagtgtcttcactaagcgtatggccaataaatgggacccaaacgttcaatctgttcagtttaccaaggttcagaaatacgtaatttagcaggaaactataaataccagtgctatcacagccacacatacacacacacagacataaaataaccaaacatctcatttctaggaaagagataacactaaaggcatcataggtttaactgaaatacgttatatgaagttttacaaaaaggtcaacagaaagctcatttgtgaaaacatactctcatgggagcttctttaacattagttcagaggttaatatatttcctggaggtgttttcctagaattgattgcactattgcatggtaataacatttaattgttaaggaaacattatatataggttcaaattatcccttaatgttgatttctccccttttccatggattttgatactaagaaacaaaatgctttgagattttggtaactattttgattttgataaaacatgttaaaatagaaggacatgatatttttctatagtttccatcaggaagagtacatcagaaacttctccataaggaaagaaaactgactctctcttgaactagtgttgacaaaatacactaatgtctttcttaattttattttattaggagaaaaatcagaatattaaatttgcaaacttttgaacagcagtaatagctccttagacactcagtatctttcttccctatctttcaagcacatttaatttctttcccctggtatttgtttgctttgtgttttttcaatattttgtttgctaaagaacaataacaacaacaaagctggtccagccctgacacctacttttgctttttttctttctttcttttaatttgttgaactataggtttctttctgagatgtatttttcattcttccaataatgctctctttttcatttcaaaaccattaccactttcaatatgtaattaacatcctcattcatcagaaagctggtaagtccacacagcatttgtgcagtatcccttctgtgtaaaatgttaaggctttcagatgaaagaaaaaagaacttcctgcaaaagatcaaaagcatcatactaaataaaatgatgacaatatgtgccttgatttttctctcaatggaggttcaacattgacatttaagatgtaaaaaaaattactttgatggtttaattaagaataataagtcaaatatcacatgtatgtagttcttttggatgaccgaataccttaaaatgaactaaataactgaaataaagtgttaaaatgttaa

SEQ ID NO: 265295 - DNA, 9510 bp, Artificial Sequence
  derived and/or modified sequence
atgcattcagccggcaccccaggcctgagcagccgcaggactggcaactccacctctttccagccgggtccaccccccccacccaggcttctgttacttctattgctactgcttagcctggtatcccgggtgccagctcagcccgcggcttttggcagggccctcctgagccctggcttggctggtgccgccggggtcccagcggaagaggctatagtgctggctaaccggggactgcgcgttccattcggcagggaagtgtggctagacccgctgcatgacttggtactgcaggtccagcccggcgatcgttgcgcagtttcggtgttagacaatgacgctcttgcccagagaccagggaggctgagtccgaaacggttcccctgtgattttgggcccggggaggttcggtacagtcatttaggcgcccgcagcccgtctcgcgacagagttcgcctgcagctccgctacgacgcccccggaggggccgtggtcctgccactagttctggaagtagaagtggtgtttactcagctggaggtagtgacgcggaatctgccattggtcgtggaagagttgttaggtacctcgaatgctctggacgctagatctcttgagttcgcatttcagcccgagaccgaggagtgcagagtgggaatcctttctggcctaggtgccctgccgcggtatggtgaactgcttcattacccacaagtgcccggcggcgcccgagagggcggcgcccccgaaactctcttaatggactgtaaggcgtttcaggagcttggtgtgcggtaccgacacactgcagcctcccgttctcctaaccgagactggattcctatggtggtcgagctgagaagcagaggagcacccgtggggtcccctgcactgaagcgggagcatttccaagtccttgtgaggatccgaggcggggccgaaaacacagcacccaaaccttcgttcgtcgcaatgatgatgatggaagtggatcagtttgtcctgaccgctctgaccccggatatgctggccgctgaggacgccgagagtcccagcgatctgctgattttcaatctcacgtctccattccagccaggccagggttaccttgtttctacagacgatcgctccctgcccctttctagttttacacagcgagacctccgtctgttgaagattgcctatcagccgcctagtgaggactccgaccaggaacgcctgtttgagctggagctagaggtcgtggatctggaaggcgctgcctctgaccctttcgcctttatggttgttgttaagccaatgaatacaatggcacctgtcgtcacccggaacaccgggctgattttatacgagggccagtctagaccattgactgggcccgcgggatccggaccccaaaatctggtcattagcgatgaggatgatcttgaggcagtgagactggaggtggtagctgggcttaggcacggccacctggtgatcctaggcgccagttccggatcatctgccccaaaaagctttacagtagcagaactggccgcaggccaggtggtctaccaacatgacgacagagacggcagtctcagcgacaacctggtcctgagaatggttgatggcggaggtaggcaccaggtgcagtttcttttccctattacattggtgcccgtggacgatcaaccgcctgtgctgaatgcaaacaccggcctgacgctggcagaaggcgagactgtacctattctgccactgtccctcagtgcaacagacatggacagcgacgactccctactacttttcgttttagaatcccctttcctgactactggccatcttctgcttcgccaaactcaccccccccatgagaaacaggaacttttgcgtggactgtggcgcaaggagggggccttctacgagaggactgtaacagaatggcaacagcaagatatcaccgaaggcaggttgttttaccggcattctggtccccattctcctggtcccgtgaccgaccagttcactttcagagtacaggacaatcacgatcccccaaatcaatccggcctccagcggttcgtaatccggatacatccggttgatcgcctgcctcccgaactcggcagcggttgtcctttgaggatggtggtacaagaaagtcagctcactcctctgaggaagaagtggctgaggtacacggacttggatacagacgacagggagctgcgttacactgtcacgcaatcgccaacggatacagacgagaaccatttacctgctccattggggacactggtgttaacagataatccttctgttgtggtgactcacttcacacaggcccagattaaccatcataaaatcgcatacaggccacctggacaggaattgggcgtggcaaccagggtagcccagtttcagtttcaggtggaggatcgtgccggcaatgtcgcaccgggcacgtttacactgtaccttcaccccgtcgataaccaaccccccgaaattttaaataccggcttcacaatccaagagaagggccaccatatcctttcagagaccgaactgcacgttaacgatgtagacacagacgtcgcccacatttcctttaccctaacacaggcgcctaaacatggccacatgagggtatcaggccagatcctccacgtaggtggactctttcatctggaagatatcaagcagggccgtgtatcgtacgcccacaacggggataaatctctcacagatagttgcagtttggaggtgtccgatcggcatcatgtggttcctatcaccctgcgagtgaatgttcgccctgtggacgacgaagtgccaatcctgtcgcacccgactggtacactcgagagctacctggacgtcttggagaacggggccacagagattactgcgaacgtgataaaaggtactaacgaggaaacggatgatctgatgcttacattcctcctggaggatccacctctttacggcgagatcctcgtcaacggcatccccgctgagcaattcactcagcgggatatactggagggcagtgtggtttacacccatacaagcggcgagattggattattacctaaagcagattcgtttaatctctctttgtccgacatgtcgcaggagtggaggataggcgggaacaccattcagggcgttactatttgggtaactattctgccagtggatagccaggcacccgagatttttgttggcgaacagcttattgtgatggagggcgataaaagcgttatcacctctgtccacatttctgctgaggatgtggatagcctgaatgacgatatcctgtgcaccatcgtgatccagcctacgtctggctacgtcgagaacatatcaccagcacctggttcagagaagagccgtgcgggtatagccatcagcgcttttaaccttaaggacctgcggcagggacatatcaattatgttcaaagtgtgcataaaggagtcgagcccgttgaggaccgcttcgtatttcgatgtagcgatggcattaatttcagtgaacgacagttctttcctatagtgatcatcccaaccaacgacgaacagccagagatgttcatgagggagttcatggtgatggagggcatgtctctcgtcatcgacactcctattttgaatgctgcagacgctgacgttcccttggacgacctcacttttaccattacacagttccctacccatggacacataatgaaccagctcattaacggcaccgtattggtagagagcttcaccctggatcagatcatagagagtagctccattatttacgaacacgacgactcagagactcaagaggacagttttgtaatcaagctgaccgacggaaaacatagcgtcgaaaagaccgtgctgatcatcgtgatcccagtcgatgatgaaaccccacgcatgactattaacaatgggctggagattgaaatcggcgacactaagataattaacaataagattctaatggctaccgacctcgactcagaggacaagtcactggtctatataatcaggtatggtcccgggcacggactgctgcagcgccgaaagcccacaggtgcctttgagaacatcacactcggcatgaacttcacgcaggatgaagtggaccgcaacctcatccagtatgtgcatcttggtcaggaagggatccgagacttgatcaagttcgacgtcaccgacggcatcaatcccctcatcgacagatacttttacgtgagcattggatctattgacatcgtattcccggacgtcatttcaaagggggttagcctaaaggagggcggtaaagtcactttgactactgatcttctgtctacgagcgatctgaactctcctgatgagaatcttgtctttaccatcacccgagctccaatgcgcggccacctcgaatgcacagatcaacctggggtctccatcacctccttcacacagcttcagctagccggcaataaaatatactatattcacacggcggatgacgaggttaagatggatagcttcgagttccaagtcaccgatggccgcaatccagtatttagaacattcagaatctcaataagcgatgtggataataaaaaacctgtggttacgattcataaattggtagtatctgagtcagagaacaaactgattacgccattcgagttgaccgtggaggatagggataccccagataagctactgaaatttactataacccaggtgccgatacacggccatctgctgtttaataacacgcgccctgtgatggtcttcaccaaacaagatctgaatgaaaacctgatttcatacaagcacgatgggaccgaaagttccgaagattctttctcatttactgttacagatggaacccatacagacttttacgtgttccctgacaccgtcttcgagaccagacgcccgcaggtgatgaagatccaagttctcgccgtagataacagcgtccctcaaatagccgtgaacaagggcgcctctactctgcggaccctggccaccgggcatctgggattcatgatcacaagtaagattctaaaggtcgaggatagggatagtctgcacatttcgctgcgatttatcgtcacagaagcaccccagcatggatatctgctcaatcttgataaaggaaatcattccatcacacagttcactcaggctgacattgacgatatgaaaatttgctatgtactgcgcgaaggcgctaatgcgacgtccgacatgttctattttgcagttgaagatggcggcggtaacaaactcacctatcagaactttaggctgaattgggcctggatatccttcgaaaaggagtattatctggtgaacgaggattccaagttcctcgacgtggtgttaaaacgacgcgggtacttgggggagacttcatttatatccatcggcactcgagaccgcaccgctgaaaaagacaaagactttaaggggaaggcccagaagcaagtgcagttcaatcccgggcagacgcgcgctacatggcgtgttaggatcctctcagatggagagcatgagcagagcgagactttccaggttgtgttatccgagccagtgctggctgccctagagttcccaactgtggcaacagtcgaaatcgtcgacccgggcgacgagccaactgtattcataccacagagcaaatatagtgttgaggaagacgtcggtgaattgtttatcccgatccggcgctccggtgacgtgtctcaggagctgatggtagtgtgttacacccagcaaggtacggctacgggtactgtgcccacctcagtgcttagttattcagactatatttcacgacctgaagatcatacttccgttgtacgcttcgacaaggatgagcgagagaaattgtgcagaatagtgatcatcgacgactcgctctatgaggaagaggaaacctttcacgtactgctttctatgccaatgggaggacgcattggatccgaatttccgggtgcccaggtaaccatagtgccggacaaggacgatgaacctattttctatttcggggatgttgagtacagcgtggacgagagtgctggttatgtcgaggttcaggtgtggaggaccggaaccgatctctcaaaaagctctagcgttaccgtgcggagccggaagacagaccctcctagcgccgatgcgggcacagattacgtaggtatctcaaggaacctcgacttcgcacccggtgtcaacatgcagcccgtgagagtagtgatattggatgatctgggtcaacccgcacttgaaggaattgaaaaatttgaattggtgctaaggatgcctatgaacgccgcactgggtgaacccagcaaagccacagtcagtatcaatgattccgtcagcgacctgccaaaaatgcagtttaaggaacgaatttacacaggctcagagagcgacggtcagatcgtgactatgatccatagaaccggcgacgtgcaatacagatctagcgtacgctgctataccaggcaagggtccgcccaggtgatgatggatttcgaggagaggcccaatacggacacatctatcatcacgtttttaccaggcgagactgaaaagccttgtatcttggaactaatggacgatgtgctgtatgaagaagttgaggagctccgcttggtacttggaactccgcagagtaattcaccatttggcgcggcagtgggtgaacagaacgagacattaatacggatacgagatgacgccgataaaactgtgatcaaattcggggaaacaaaattctcagtaacagaacccaaggagccgggcgaatcagttgtgattcggattcccgtaattcgccagggagacacatcgaaggtgtccatcgtgagggtacatacaaaggacggttctgccacgtccggtgaagattatcacccagtttccgaggaaatcgaatttaaagaaggtgagacccaacatgtcgtggaaatcgaggtgaccttcgatggcgtgagggaaatgcgagaggctttcaccgtgcacctaaagcccgatgagaatatgatcgcagaaatgcagctcaccaaagccatcgtttacatcgaggagatgagttccatggcggatgtcacctttcctagcgtccctcagatcgtgagcctcttaatgtatgatgatacttctaaggccaaagagtccgcggagccaatgtctggctacccagtgatctgcatcacagcgtgtaatccaaagtacagtgactatgacaagactggctccatctgcgccagtgagaatatcaacgacacactgaccaggtatcgctggctcatctcagcgcccgcaggtcctgacggggtcacctctcctatgcgcgaagttgacttcgacaccttttttacctcttcaaagatggtgacgctggatagcatttactttcagcctggatctcgggtccaatgtgccgcccgcgcggtgaacacaaacggtgacgaggggttagaattgatgagtcctatcgtaactatctcacgtgaagagggcctgtgccaacctcgagtacccggcgtagtcggggcagagcctttttccgctaagctgaggtatacaggccccgaggacgctgattacacaaacctgatcaaactcaccgttaccatgccccacatcgacggcatgctgcctgtaatctccacgcgcgagctctcaaatttcgagctcacactttcgcctgacggcacccgcgtcggaaatcataagtgttctaatcttttggactacaccgaagtgaaaacccactacggtttcctgaccgacgcaaccaagaatcctgagatcatcggcgaaacatacccctatcagtattccctatccattcgtggaagcacaacactgaggttctatcgcaatctgaatcttgaggcttgtctctgggagttcgtctcttactacgatatgtcagaacttctggcagactgtggaggcactataggcaccgacggtcaagtcctgaacctcgtacagtcttacgtgactttacgggttcccctatacgtatcttacgtctttcattcgccagtgggagtcggcggatggcagcacttcgatttaaagtccgaactgagactgacctttgtttacgacaccgctatcctgtggaacgatgggattgggagtccccccgaggctgagctccagggctcactctacccaacatccatgcggattggcgatgaagggcgcttagccgttcattttaaaacggaagcacaattccatggcttgttcgtcctcagtcacccagcgtctttcacaagctccgtcattatgagcgccgaccacccgggtttgacattcagcctaagactgatccgaagcgagcccacttataaccagcccgttcagcagtggagctttgtgtccgactttgcagttagggactactccggaacgtataccgtcaagctggtgccttgcacagctccatctcatcaagaatataggctcccagtgacttgtaatcctcgcgaacccgtgaccttcgatctggacattcgcttccagcaagtttccgatcccgtggccgccgagtttagcttgaacacgcaaatgtacctgctctctaaaaagagcctgtggttgagcgatggaagcatggggtttggccaagaatctgacgtagcgtttgcagaaggagacattatatacggacgggttatggtcgacccggtgcagaaccttggcgactctttctactgcagcattgaaaaggtctttctatgtaccggcgccgacggctatgtccccaagtacagcccgatgaacgccgagtatgggtgcttggctgacagtccgtctctgctgtacagattcaaaatcgtggacaaagcgcagcctgagactcaggccactagctttgggaacgtgctctttaacgctaaactagctgtggacgatccggaggcgattctgctggtcaaccagcccggttctgatgggttcaaagtcgactccacccctctgttccaagtggccctaggccgggaatggtatatacatacgatctacacagtacggtctaaagataatgcaaatagaggaatcgggaaaaggagtgtcgagtaccacagcctcgtttcacaaggcaagccacagtccacaactaagagcagaaaaaaacgggagattaggtccacgccgtcattggcctgggaaatcggcgcggagaatagcagaggaaccaatatccaacacatcgctctcgaccggacaaagcggcagatcccgcacggcagagcccccccagatggaatcctaccttgggagttgaacagcccgtctagcgcagtttctctagtcacagttgttggtgggaccactgtaggcctgctgaccatctgcctcactgtgattgccgtgctgatgtgtagaggcaaagagtcctttcgcggcaaggacgctccgaaagggtcttcctcctcagaaccgatggtgccccctcaatctcaccacaatgacagcagcgaggtttag

SEQ ID NO: 265296 - DNA, 9510 bp, Artificial Sequence
  derived and/or modified sequence
atgcacagcgctggcaccccaggcctgagcagcagaagaacaggcaacagcaccagcttccagcccggccccccacctccaccccggctgctgctgctgctgctgctgctgctgagcctggtgtcccgggtgcctgcccagcctgctgccttcggccgggccctgctgagccctggcctggccggggccgccggcgtgcctgctgaggaggccatcgtgctggccaacagaggcctgcgggtgcccttcggccgggaggtgtggctggaccccctgcatgacctggtgctgcaggtgcagcccggggacagatgtgctgtgtctgtgctggacaatgatgccctggcccagaggcctggccgcctgagccccaagcgcttcccctgtgactttggacctggagaggtgcgctacagccacctgggcgcccggagccccagccgggacagagtgcggctgcagctgcgctatgatgcccctgggggcgctgtggtgctgcccctggtgctggaggtggaggtggtgttcacccagctggaggtggtgaccaggaacctgcccctggtggtggaggagctgctgggcaccagcaatgccctggatgcccggagcctggagtttgccttccagcctgagacagaagaatgtcgggtgggcatcctgagcggcctgggcgccctgccccgctacggggagctgctgcactacccccaggtgcctgggggcgcccgggagggcggggcccctgagaccctgctgatggactgcaaggccttccaggagctgggcgtgcgctaccgccacacagctgccagccgcagccccaacagagactggatccccatggtggtggagctgcggagcagaggagcccctgtgggcagccctgccctgaagcgggagcacttccaggtgctggtgcgcatccggggcggcgctgagaacacagcccccaagcccagctttgtggccatgatgatgatggaggtggaccagtttgtgctgacagccctgaccccagacatgctggccgcagaagatgctgagagccccagcgacctgctgatcttcaacctgaccagccccttccagcccggccagggctacctggtgtccacagatgacaggagcctgcccctgagcagcttcacccagagggacctgcggctgctgaagatcgcctaccagcccccatctgaggacagcgaccaggagcggctgtttgagctggagctggaggtggtggacctggagggcgccgccagtgacccctttgccttcatggtggtggtgaagcccatgaacaccatggcccctgtggtgaccaggaacacaggcctcatcctgtatgagggccagagccggcccctgaccggccctgctggcagcggcccccagaacctggtgatcagtgatgaagatgacctggaggccgtgcggctggaggtggtggccggcctgcggcacggccacctggtgatcctgggcgccagcagcggcagcagcgcccccaagagcttcaccgtggccgagctggccgccggccaggtggtgtaccagcatgatgacagagatggcagcctgagtgacaacctggtgctgaggatggtggatggcggcggccgccaccaggtgcagttcctgttccccatcaccctggtgcctgtggatgaccagccccctgtgctgaatgccaacacaggcctgaccctggccgagggggagaccgtgcccatcctgcccctgagcctgagcgccacagacatggacagtgatgacagcctgctgctgtttgtgctggagagccccttcctgaccaccggccacctgctgctgcggcagacccacccccctcatgagaagcaggagctgctgcggggcctgtggaggaaggagggcgccttctatgaaagaacagtgacagagtggcagcagcaggacatcacagagggccgcctcttctaccgccacagcggcccccacagccctggccctgtgacagaccagttcaccttccgggtgcaggacaaccacgacccccccaaccagagcggcctgcagagatttgtgatccgcatccaccctgtggaccggctgcccccagagctgggcagcggctgccccctgaggatggtggtgcaggagagccagctgacccccctgaggaagaagtggctgcgctacacagacctggacacagatgaccgggagctgcgctacacagtgacccagagccccacagacacagatgagaaccacctgcctgcccccctgggcaccctggtgctgacagacaaccccagcgtggtggtgacccacttcacccaggcccagatcaaccaccacaagatcgcctaccggcccccaggccaggagctgggcgtggccaccagggtggcccagttccagttccaggtggaggacagagctggaaatgtggcccctggcaccttcaccctgtacctgcaccctgtggacaaccagcccccagagatcctgaacacaggcttcaccatccaggagaagggccaccacatcctgtctgaaacagagctgcacgtgaatgatgtggacacagatgtggcccacatctccttcaccctgacccaggcccccaagcacggccacatgagggtgtctggccagatcctgcacgtgggcggcctcttccacctggaggacatcaagcagggccgggtgtcctatgcccacaatggagacaagagcctgacagacagctgcagcctggaggtgtctgacagacaccacgtggtgcccatcaccctgcgggtgaatgtgcggcctgtggatgatgaggtgcccatcctgagccaccccaccggcaccctggagagctacctggatgtgctggagaatggagccacagagatcacagccaacgtcatcaagggcaccaatgaggagacagatgacctgatgctgaccttcctgctggaggacccccccctgtatggagagatcctggtgaatggcatcccagctgagcagttcacccagagggacatcctggagggctctgtggtgtacacccacaccagcggggagatcggcctgctgcccaaggctgacagcttcaacctgagcctgagtgacatgagccaggagtggagaattggaggcaacaccatccagggcgtgaccatctgggtgaccatcctgcctgtggacagccaggcccctgagatctttgtgggggagcagctgattgtgatggagggggacaagagcgtcatcacctctgtgcacatctctgcagaagatgtggacagcctgaatgatgacatcctgtgcaccatcgtcatccagcccaccagcggctacgtggagaacatcagccctgcccctggcagcgagaagagcagagctggcatcgccatcagcgccttcaacctgaaggacctgcggcagggccacatcaactacgtgcagagcgtgcacaagggcgtggagcctgtggaggacagatttgtgttccgctgcagtgatggcatcaacttcagcgagcggcagttcttccccatcgtcatcatccccaccaatgatgagcagcctgagatgttcatgagggagttcatggtgatggagggcatgagcctggtgattgacacccccatcctgaatgctgctgatgctgatgtgcccctggatgacctgaccttcaccatcacccagttccccacccacggccacatcatgaaccagctgatcaatggcaccgtgctggtggagagcttcaccctggaccagatcatcgagagcagcagcatcatctatgaacatgatgacagcgagacccaggaggacagctttgtgatcaagctgacagatggcaagcacagcgtggagaagacagtgctgatcatcgtcatccctgtggatgatgagacccccaggatgaccatcaacaacggcctggagattgagatcggggacaccaagatcatcaacaacaagatcctgatggccacagacctggacagcgaggacaagagcctggtgtacatcatccgctatggccctggccacggcctgctgcagaggaggaagcccaccggggcctttgagaacatcaccctgggcatgaacttcacccaggatgaggtggacaggaacctgatccagtatgtgcacctgggccaggagggcatccgggacctgatcaagtttgatgtgacagatggcatcaaccccctgattgaccgctacttctacgtgtccatcggcagcattgatattgtgtttcctgatgtgatcagcaaaggagtgtccctgaaggagggcggcaaggtgaccctgaccacagacctgctgagcaccagtgacctgaacagcccagatgagaacctggtgttcaccatcacccgggcccccatgaggggccacctggagtgcacagaccagcccggggtgtccatcaccagcttcacccagctgcagctggccggcaacaagatctactacatccacacagcagatgatgaggtgaagatggacagctttgagttccaggtgacagatggaagaaatcctgtgttccgcaccttccgcatcagcatcagtgatgtggacaacaagaagcctgtggtgaccatccacaagctggtggtgtctgagagcgagaacaagctgatcaccccatttgagctgactgtggaggaccgggacaccccagacaagctgctgaagttcaccatcacccaggtgcccatccacggccacctgctcttcaacaacaccaggcctgtgatggtgttcaccaagcaggacctgaatgaaaatctcatctcctacaagcatgatggaacagagagcagtgaagattccttctccttcaccgtgacagatggcacccacacagacttctacgtgtttcctgacacagtgtttgagacccggcggccccaggtgatgaagatccaggtgctggccgtggacaacagcgtgccccagattgctgtgaacaagggggccagcaccctgcggaccctggccaccggccacctgggcttcatgatcaccagcaagatcctgaaggtggaggaccgggacagcctgcacatcagcctgcgcttcatcgtgacagaggccccccagcacggctacctgctgaacctggacaagggcaaccacagcatcacccagttcacccaggccgacattgatgacatgaagatctgctacgtgctgcgggagggcgccaatgccaccagtgacatgttctactttgctgtggaggatggcggcggcaacaagctgacctaccagaacttccggctgaactgggcctggatcagctttgagaaggagtactacctggtgaatgaagacagcaagttcctggatgtggtgctgaagagaagaggctacctgggggagaccagcttcatcagcatcggcacccgggacagaacagctgagaaggacaaggacttcaagggcaaggcccagaagcaggtgcagttcaaccctggccagacccgggccacctggagggtgcgcatcctgagtgatggagaacatgagcagagcgagaccttccaggtggtgctgtctgagcctgtgctggccgccctggagttccccaccgtggccaccgtggagatcgtggaccctggagatgagcccaccgtcttcatcccccagagcaagtacagcgtggaggaggatgtgggggagctgttcatccccatcagaagaagtggagatgtgtcccaggagctgatggtggtgtgctacacccagcagggcacagccaccggcaccgtgcccacctctgtgctgagctacagcgactacatcagcaggcctgaggaccacacctctgtggtgcgctttgacaaggatgagcgggagaagctgtgcagaattgtcatcattgatgacagcctgtatgaggaggaggagaccttccacgtgctgctgtccatgcccatgggcggcagaattggcagcgagttccctggggcccaggtgaccatcgtgcctgacaaggatgatgagcccatcttctactttggagatgtggagtacagcgtggatgagagcgctggctacgtggaggtgcaggtgtggaggactggaacagacctgagcaagagcagctctgtgacagtgcgcagcaggaagacagacccccccagcgcagatgctggaacagattatgtgggcatcagcaggaacctggactttgcccctggggtgaacatgcagcctgtgcgggtggtgatcctggatgacctgggccagcctgccctggagggcatcgagaagtttgagctggtgctgaggatgcccatgaatgctgccctgggggagcccagcaaggccaccgtgtccatcaatgattctgtgtctgacctgcccaagatgcagttcaaggagcgcatctacacaggcagcgagagtgatggccagatcgtgaccatgatccacaggactggagatgtgcagtaccgcagctctgtgcgctgctacacccggcagggcagcgcccaggtgatgatggactttgaggagcggcccaacacagacaccagcatcatcaccttcctgcccggggagacagagaagccctgcatcctggagctgatggatgatgtgctgtatgaggaggtggaggagctgcggctggtgctgggcaccccccagagcaacagcccctttggagctgctgtgggggagcagaatgagaccctcatccgcatcagagatgatgctgacaagacagtcatcaagtttggagagaccaagttctctgtgacagagcccaaggagcccggggagagcgtggtgatccgcatccctgtgatccggcagggcgacaccagcaaggtgtccatcgtgcgggtgcacaccaaggatggcagcgccaccagcggggaggactaccaccctgtgtctgaggagattgagttcaaggagggggagacccagcacgtggtggagattgaggtgacctttgatggagtgcgggagatgagggaggccttcaccgtgcacctgaagccagatgagaacatgattgctgagatgcagctgaccaaggccatcgtgtacatcgaggagatgagctccatggctgatgtgaccttccccagcgtgccccagatcgtgtccctgctgatgtatgatgacaccagcaaggccaaggagagcgctgagcccatgagcggctaccctgtgatctgcatcacagcctgcaaccccaagtacagcgactatgacaagacaggcagcatctgtgccagcgagaacatcaatgacaccctgacccgctaccgctggctgatcagcgccccagctggcccagatggagtgaccagccccatgagggaggtggactttgacaccttcttcaccagcagcaagatggtgaccctggacagcatctacttccagcccggcagccgggtgcagtgtgccgcccgggctgtgaacaccaatggagatgagggcctggagctgatgagccccatcgtgaccatcagccgggaggagggcctgtgccagccccgggtgcctggggtggtgggcgctgagcccttcagcgccaagctgcgctacacaggcccagaagatgctgactacaccaacctgatcaagctgactgtgaccatgccccacattgatggcatgctgcccgtcatcagcacccgggagctgagcaactttgagctgaccctgagcccagatggcaccagggtgggcaaccacaagtgcagcaacctgctggactacacagaggtgaagacccactacggcttcctgacagatgccaccaagaaccctgagatcatcggggagacctacccctaccagtacagcctgagcatccggggcagcaccaccctgcgcttctacagaaacctgaacctggaggcctgcctgtgggagtttgtgtcctactatgacatgtctgagctgctggccgactgtggcggcaccatcggcacagatggccaggtgctgaacctggtgcagagctatgtgaccctgcgggtgcccctgtatgtgtcctatgtgttccacagccctgtgggcgtgggcggctggcagcactttgacctgaagtctgagctgcggctgacctttgtgtatgacacagccatcctgtggaatgatggcatcggcagccccccagaggccgagctgcagggcagcctgtaccccacctccatgagaattggagatgagggccgcctggccgtgcacttcaagacagaggcccagttccacggcctgtttgtgctgagccacccagccagcttcaccagcagcgtcatcatgtctgctgaccaccctggcctgaccttcagcctgcggctcatccgctctgagcccacctacaaccagcctgtgcagcagtggagctttgtgtctgactttgctgtgcgggactacagcggcacctacacagtgaagctggtgccctgcacagcccccagccaccaggagtaccgcctgcctgtgacctgcaacccccgggagcctgtgacctttgacctggacatccgcttccagcaggtgtctgaccctgtggccgctgagttcagcctgaacacccagatgtacctgctgagcaagaagagcctgtggctgagtgatggctccatgggcttcggccaggagagtgatgtggcctttgctgagggggacatcatctacggccgggtgatggtggaccctgtgcagaacctgggggacagcttctactgcagcattgagaaggtgttcctgtgcacaggagcagatggctacgtgcccaagtacagccccatgaatgcagaatatggctgcctggccgacagccccagcctgctgtaccgcttcaagatcgtggacaaggcccagcctgagacccaggccaccagctttggaaatgtgctcttcaatgccaagctggccgtggatgatcctgaggccatcctgctggtgaaccagcccggcagtgatggcttcaaggtggacagcacccccctcttccaggtggccctgggccgggagtggtacatccacaccatctacacagtgcgcagcaaggacaatgccaacagaggaattggcaagaggtctgtggagtaccacagcctggtgtcccagggcaagccccagagcaccaccaagagcaggaagaagcgggagatccgcagcacccccagcctggcctgggagattggagctgagaacagccggggcaccaacatccagcacatcgccctggacaggaccaagaggcagatcccccacggccgggcccccccagatggcatcctgccctgggagctgaacagccccagcagcgctgtgtccctggtgacagtggtgggcggcaccaccgtgggcctgctgaccatctgcctgactgtgattgctgtgctgatgtgccggggcaaggagagcttccggggcaaggatgcccccaagggcagcagcagcagcgagcccatggtgcccccccagagccaccacaatgacagcagcgaggtgtag

SEQ ID NO: 265297 - DNA, 9510 bp, Artificial Sequence
  derived and/or modified sequence
atgcacagcgccggcacccccggcctgagcagccggcggaccggcaatagcacttctttccagcccgggcctccgcccccccccaggttgcttctgctcctcttactcctgctgtccctggtgagccgtgttcccgctcagccagccgcattcggccgggcactcctcagcccaggccttgcaggggctgctggggtacctgcggaggaagccattgtgcttgccaaccgcggcctgcgggtgccatttggacgggaagtgtggctagacccgcttcacgatctggtactgcaagttcaacccggagatcgctgcgccgtgtccgtgctcgataatgatgcccttgcccagagaccggggagactctcaccgaagcgcttcccctgtgactttggaccaggtgaggtgcggtacagccatctcggcgctcggagcccgagtcgtgatcgggtgcgacttcagcttcgatacgatgcccccggaggagccgttgtcctgccgctggtcctcgaggtagaggtggtctttacgcagctagaggtagtcactcgcaacctgcctctggtggtggaggagctactgggcacctccaacgccctagatgctaggtccctggagttcgcttttcagccagaaactgaggaatgtagggtggggattctatcagggctcggagcattaccgagatacggggagctcctccactacccacaggtacctggaggggcccgggaaggtggggcgcctgaaaccctgctaatggattgcaaggccttccaggagcttggcgttcgctatcgccacacagctgcatcacgctctccgaacagggactggattcctatggtggtggaattgaggtcacggggagcaccggtcggaagtcccgccctgaaacgggaacactttcaggtacttgttaggatacggggaggggcagagaacaccgccccaaaaccttcattcgtggcaatgatgatgatggaggttgatcaatttgtgttaaccgcactaactcccgatatgctggccgcagaggatgctgagagtccttctgacctgctgattttcaaccttacgtccccgttccagccaggtcagggatatctggtctcgacagacgatcgctctttacctctttcctccttcacccagagagatctccgattactcaagatcgcttaccaaccaccctccgaagatagtgaccaggaacggcttttcgagctggaattggaggtggtcgaccttgagggggctgcctccgacccctttgcctttatggtcgtagtcaagcctatgaatacaatggccccagtggtaacccggaacacgggccttatattatatgagggccagtcacggccactgactggcccagctgggagcgggccccagaatctggtcatttccgatgaagacgatctggaggctgtgcggctcgaggtggtggccggcttacggcacgggcatcttgtcattctgggagcatccagcggcagctcggcaccgaaaagttttactgtggccgaactcgccgccgggcaagtggtgtatcaacatgatgatcgcgacggatccttgtcagataacctagttctacggatggttgatggaggagggagacatcaagttcagttcctgtttcctatcacgttggtgccggtggacgaccaaccacctgtactgaatgccaatactggactcaccctggcagaaggggagacagtgccgatcctgcccctgtccctctctgccacagacatggactccgatgacagcctgcttctctttgtgctcgagtctccattccttaccacgggccacctactgctccggcagacacaccccccgcacgaaaagcaagaactgttgcgtggcctctggaggaaagagggggcgttttatgaaagaacggtgactgaatggcagcagcaggatattactgagggcagattattctaccgccattcgggcccacacagcccaggccctgtaacagaccaattcacctttcgcgtgcaagacaatcacgatcccccgaatcagagcggattacagaggtttgtgattcgcatacaccctgtcgatagactgcctcccgaattgggttccgggtgcccactccggatggtggtgcaggagtcacagctcacgccactgcggaaaaagtggctgcgctataccgacctggatactgacgacagggagctcagatatacagtgacacaaagcccgactgacaccgatgaaaatcacctcccagcgcccctcggaacattagttctcacagataatcctagcgtcgttgttacccactttacgcaggcccagattaaccaccacaagatcgcatatagaccccccgggcaggaactcggcgtcgccaccagagtagcccagttccaattccaggttgaagatagagcgggtaacgtagcgcccggcacctttaccctatacctgcatcccgttgacaatcaacctccagaaatcctgaacaccgggtttactatccaggaaaagggccaccatatattatcagaaacagaactgcacgttaacgacgtggacacagatgtcgcccacatcagctttaccctgacacaggccccaaaacacggacatatgagagtgtctgggcagatcctacatgtgggcggtcttttccatctggaagatatcaagcaaggacgagtgagttacgctcataacggggataaaagcctgactgactcctgctccctcgaggtttccgatcggcaccatgtcgtccccataacactccgcgtgaacgtccgtcccgtcgatgacgaagtgccaatactttcccatccgaccggcaccctagaaagctacctggacgtgttagagaatggagctactgagatcaccgcaaacgtcatcaaaggtacgaacgaggaaaccgacgacctgatgcttaccttcctcctggaggatcccccgctgtatggggaaattctggtcaacgggattcccgcagaacagtttacgcaacgagacatcttggagggctccgtcgtctacacacacaccagtggggagatcggtctcttgcccaaggcggatagctttaatctaagtctctcagacatgagccaggagtggcgtataggaggaaatacaattcagggagtaacgatttgggtgactattctgccagtagacagccaagccccagagatttttgtgggcgagcagctgatcgtgatggagggggacaaaagtgtcatcacaagcgtgcacatttccgcagaagacgtggattctctgaatgacgacattctgtgtaccattgtgatccagcctacatctggctatgtcgaaaacatctctccagcccccggatccgagaagtcccgggctggtattgccatcagtgcctttaacctgaaggatctgaggcagggccatattaactacgttcagagtgtgcataaaggcgtggagccggtggaggacaggtttgtattcagatgttcagacggcattaattttagcgaaagacagtttttccctatagtgatcattcccacgaacgacgagcagcccgaaatgttcatgcgcgaattcatggtgatggagggcatgagtctcgtcatcgacactcctatcctgaacgcagccgatgctgacgtgccgttagacgacctgactttcacaataactcaatttcctacccatggacacattatgaaccagcttatcaacggaaccgtcctagtggagtcattcacattggaccagatcatcgaaagcagcagtatcatctatgaacacgacgactcagagacacaggaggactctttcgttatcaaactaacagatggcaagcactccgtcgagaaaacagtattgatcatcgtcatacctgtggacgatgaaactcctagaatgactataaacaacggactcgagatcgagatcggtgataccaagataattaataacaagatactgatggcaacggacctagactctgaggataagtctttagtctatatcataagatacggccccggacacggacttctccaaaggcggaaacctactggagcgtttgaaaatataaccttaggaatgaactttactcaggacgaagtggatcgtaatctgatacagtatgtgcatctggggcaggagggaatacgcgacttgattaagtttgacgttacggatggaatcaacccgctgattgacagatacttttacgtgagcataggatctattgacattgttttccctgatgtgatctctaaaggcgtgagccttaaggagggcggaaaagtcaccctgacaaccgatttgctgtccacttcggatctgaatagtccagacgagaacctcgtgttcaccatcacacgggctcccatgcgggggcacttggagtgtactgaccagcctggtgtgagcatcacaagcttcactcagctgcaactcgccgggaataagatctactacatccatacagccgacgatgaggtgaagatggactcatttgaatttcaggtcacggatggtaggaatcctgtcttccggactttcagaatctcaatcagcgacgtcgataacaaaaagccggtggtgaccatacacaagctcgtggtgtcagagtccgagaacaagttgattaccccatttgagcttaccgttgaagaccgcgacaccccagataaactgctgaaattcacaataactcaggtgcccatacatggccatctgctttttaataatactagacctgttatggtgttcaccaagcaggatctgaatgagaatctcatatcgtacaagcatgatggaacagagtccagcgaggacagcttcagtttcaccgtcactgatggaactcataccgatttttacgtcttcccggatactgtgtttgaaacccggcggcctcaagttatgaagattcaggtgttggccgttgacaattctgtgccccagattgctgtgaacaaaggcgcctccacgcttcggacactcgctaccggccacctgggcttcatgataactagtaagattctcaaggtggaagacagggattctctgcacattagtcttcgcttcatcgtgaccgaggccccgcagcatgggtacctgctgaatcttgataagggtaaccactcgattacacaatttacccaggccgacattgacgatatgaaaatttgctacgtcttgagggagggtgcaaatgctacatccgatatgttctactttgctgtcgaggatggggggggcaacaaacttacctaccaaaattttcgcctgaactgggcttggatttcttttgagaaggagtattatcttgtgaacgaggactcaaaattcctcgacgtcgtcttaaagcgacgtggctacctcggcgagaccagctttattagtattggcactagagatagaacagcggaaaaggataaggattttaaagggaaagcccagaagcaagtccaattcaacccggggcaaactagggcaacatggagggttcgaatcctgtctgacggtgagcatgaacaaagcgaaacctttcaggtggttctgtccgagcccgttctcgccgctttggagttcccaactgtcgctacagtagagatagtcgatccaggtgacgagccgacagtgttcattcctcagtccaaatactctgtggaagaggacgtgggggaacttttcattccaatacggcgctcaggcgacgtgagccaagagctgatggtcgtgtgttatacgcagcagggcaccgccaccgggacagtgccaacgtctgttctcagctattctgactatatttcccggccagaggaccatactagcgtagtgcgcttcgacaaggacgaacgggagaagctgtgccgcatcgtcatcattgacgactcgctgtatgaagaggaagaaacgtttcacgtgttgctgtcgatgcccatggggggccgaataggcagcgagttccctggcgcccaagtgacaatagtgccggacaaagacgacgagccaatcttttacttcggtgacgtggaatatagcgtcgatgagagcgctggttatgtggaggtccaggtgtggcgcactgggactgatctctcaaagtcaagttcggtgactgttagaagccgcaaaacagatcccccgagcgctgacgcaggtaccgactatgtcgggatcagtcggaacctggacttcgctcccggcgttaacatgcagcctgtacgggtggtgattctggacgacttggggcaacctgccctggaaggcatagaaaagttcgaactggtgctcagaatgccaatgaacgccgccctgggcgaaccatccaaggccacagtgtcgattaatgattccgtctccgacctcccaaagatgcagttcaaggaaagaatctataccggtagtgagagtgacggacagatcgtgaccatgattcacaggactggggacgtgcagtacagatcttccgtgagatgctacactagacagggatctgctcaggtaatgatggacttcgaagagcgcccaaacactgatacaagcataatcaccttcttgcccggagaaacagagaagccatgcatcctggagctgatggatgacgtgctatacgaagaggtcgaagaacttcgcctggtgctagggaccccacagtctaactctccttttggggccgccgtgggcgagcagaatgagacactgataagaatccgcgacgacgctgacaagaccgttataaagtttggagagactaaattcagtgtgactgagcccaaggaacccggcgagagtgtggttattcgaattccggtgattaggcagggcgatacatccaaagtcagtatcgtgcgggtgcataccaaggacggctctgccacctctggagaagattatcatcccgtctctgaagagatcgagtttaaagagggcgagactcaacacgtggtggagattgaagtgactttcgatggggtgagggaaatgcgggaggcatttactgtgcatctgaaaccagacgagaatatgattgcagagatgcagctcactaaggctatcgtatacatcgaggagatgagttccatggcagacgtcacatttccttcagtgccccagatagtctcactgctgatgtacgacgataccagtaaggccaaagagtccgctgaacccatgtccggctacccagtcatttgcatcaccgcatgtaatcctaagtatagcgattatgacaagacgggttcaatttgcgcatctgagaatatcaacgataccctgaccaggtatagatggctgatctccgcgccggcaggccctgacggggtgacttcaccgatgcgcgaggtggattttgatacattctttaccagctctaagatggtgacactggactccatatactttcagcccgggagtcgcgtacaatgtgccgcacgtgcggtgaatacaaatggagatgaaggcctggagttgatgtcacccatagtgacaatcagccgcgaggagggcctgtgtcaaccaagagtgcctggagtggttggagccgagcctttttctgcaaagctgagatataccggccccgaggacgcggattatactaatcttatcaagctcaccgtcacgatgccccacattgatggcatgctccccgtgatctctactcgtgagttgtcaaatttcgagctgactctcagtcccgatgggacgagagtcgggaatcataagtgctccaacctgctggactacactgaggtgaaaactcactatggcttcctcacggacgctacaaagaaccctgagattatcggggaaacttacccataccagtattccctcagcataagagggagcaccacgctgcgattttatcggaacctcaacctagaagcttgcctgtgggaattcgtaagctactatgacatgagcgaacttctggccgactgcggtggaaccatagggacggacgggcaagtcctgaacttggttcagagttacgttaccctgcgagtcccgctttacgtaagttacgtattccattcccctgttggggtagggggctggcaacatttcgatctcaaatcggagctgagactgactttcgtttatgacacagcgatcctttggaacgatgggattggatcacccccagaggctgaactccagggcagcttgtacccaactagcatgagaatcggcgatgaaggccgcctggccgtccactttaagactgaggctcagttccacggactgttcgtactgagccaccccgcttcctttacgtcaagtgtgatcatgtcagcggatcatcccggcttaaccttttctctgaggctcatcaggtcagaacccacatacaatcagcctgtacaacaatggtccttcgtaagcgacttcgcggtacgggactatagcggtacatacacagtcaaactcgtgccatgtacagcgccatctcaccaggaatacaggttacccgtgacgtgtaatcctagggaacccgtcacatttgacctggacataagattccagcaggtctctgatcctgttgccgcagaatttagcttaaacacccagatgtacctgctgagcaagaagtccctctggctatccgacggctcaatgggcttcggccaagagtcagacgtagcgttcgccgaaggggatatcatctatggacgcgtcatggtagacccagtacagaatctgggagattctttctactgctcaatcgagaaagtcttcctgtgtacaggggcggatggatacgtaccgaagtattctcccatgaacgctgagtatggctgcctggccgactcaccctcgttactctatagattcaaaattgtcgataaagcacaacccgaaacccaggccaccagctttggaaacgtgctgtttaatgctaaactagctgtcgacgaccccgaggctatcctattagtaaatcaacctggcagcgatgggtttaaggtcgattccactcctcttttccaggttgctctgggccgagaatggtatatccatacaatttacacagttcgcagcaaggataatgccaaccggggcataggtaagcggtccgtcgagtatcattccctggtgtcccagggaaaacctcagagcaccactaaaagccgcaaaaagcgcgagatacgcagtacgccatcactggcttgggagatcggcgcagagaattcaagggggaccaacattcagcatatcgctcttgatagaaccaaaaggcagatccctcatggtcgcgcaccacctgatggtatccttccttgggagcttaactctccttctagcgctgtatccctggtcaccgtcgttggcggcacgactgtcgggctgcttacaatctgcctcaccgtcatcgcagtgctcatgtgccgcggcaaggaatccttccgcgggaaggacgcccccaagggatcctcgtcaagcgagccaatggtgcccccacagagccaccataatgacagttctgaagtgtag

SEQ ID NO: 265298 - DNA, 9510 bp, Artificial Sequence
  derived and/or modified sequence
atgcattcagcagggacgcccggactgagttctcggcgaacaggcaatagcactagtttccagcctggcccacctccaccgccaagacttctcctgctccttctactgctgctgtcattagtctcaagagtccctgcccaacccgcagccttcggcagagcccttttgagcccaggtttagccggtgccgcaggcgtccccgctgaggaagccattgtcttggctaatcgcggtttaagggtaccctttggtcgcgaggtttggttagaccctctccatgacctggtactccaggtgcagccaggcgacagatgtgcggtgtcggtccttgataacgacgcattggcccaacgccctgggaggttgtctccgaaacggtttccatgtgatttcggccctggcgaagtcaggtactctcacctcggagctcgttctccatcaagagatagagtgcgtttgcagctcagatatgacgcacctggtggcgcagtagtcctgccattagtgcttgaagtggaagtggtgttcactcagcttgaggtcgttactcgcaatctgcctctcgtggtagaagagctgctgggaaccagtaatgctttagacgccagatcccttgagttcgccttccaacccgagactgaggagtgccgcgtgggaatcttaagcggattaggagccctgcctagatacggagagttgcttcactacccccaagtgcctgggggagccagagaggggggagccccagagaccctgcttatggattgtaaagcattccaggaattaggtgtgagataccggcatacagcagctagtcgctcgccaaacagggactggataccaatggtggtcgagctgcggagcaggggcgcacccgtgggaagccctgcattaaaacgggagcatttccaggtgttggttcgcattagggggggagccgaaaataccgcgccaaagccgtcattcgtggccatgatgatgatggaagtggaccaatttgttctaaccgcactgacacctgacatgctggcggcagaggatgccgagagcccgtctgatctgctcatctttaatctcacaagcccgtttcagcccggacagggctatttggtgagtaccgatgatcggagtctccccttgtcgtctttcacccaacgggaccttagactgctcaagatcgcgtatcagcctccttccgaggattccgaccaggaacggctgttcgagctggaactggaggtcgtagaccttgagggcgcagcctccgatccgttcgcttttatggtggtagtgaagcccatgaacacaatggccccagtggtcactcggaatactggtctaatcttgtacgagggccagagcaggcccctcacaggcccagccggttcaggacctcagaatctggtcatcagcgatgaggatgacctggaagccgtccgattggaagtcgttgctggtctgcgccacggtcatttggtcatattaggcgcatccagtggatcaagcgctccaaagtcttttactgtcgccgagctcgcagccggacaggtcgtgtaccagcacgatgaccgagacggctcactgtcagataatctcgtcttgcgaatggtggacggtggagggcgtcatcaggttcaatttttgttcccaatcacattggtgccagtggacgatcagcctccagtcctgaatgcaaacaccgggcttaccctggcagaaggggagaccgtgcccatcctgcccttgtcgctttcagcgacagatatggattcagatgacagcctccttctttttgtgctggagtcacccttcctgaccaccggacatctgctcctcagacagactcacccaccacatgagaagcaggagctgctacggggtttatggaggaaggaaggtgcattctatgagaggacggtcaccgagtggcagcagcaggacatcacagaaggccgtctgttttacagacactccgggcctcactctccgggacctgtgacagaccagtttacatttagagtgcaagacaatcacgatccacccaaccagagtgggctgcagcgatttgtgatccgtatacatcccgtagaccggctccctcctgagttaggatccggatgccccctgagaatggtggttcaggaaagtcaattgacacctctccgcaagaagtggttacgttatacagatctggacacagacgacagggaattacgctatactgtaacacaatcacctaccgacactgacgagaaccacctgcctgctcccctgggaactttggtgctcacagataacccttccgtagtcgtgacccactttacacaggctcagatcaaccatcacaagatcgcttatcggccaccaggacaggagctcggagttgctactagagtggcccaattccagttccaggtggaagaccgagcaggaaacgtggcaccagggactttcaccctgtatctgcatcctgtggacaaccagccacccgagatactcaacactggattcaccattcaggagaagggtcaccacatcctaagcgaaacagagctacacgttaatgacgtggataccgatgttgcccacatctcattcactctcactcaggctcccaaacatgggcatatgcgcgtgagcggccagatcctccacgtgggcggactcttccacctggaagatatcaagcagggtcgggtgagctacgcacataatggagataagtcactgacagattcctgctctttggaagtttcagatcggcaccacgtcgttcctatcactctgcgcgttaacgtgcgaccggtagatgatgaggtaccgatactgtctcacccaactggaacactggaatcatacctggacgtcctggagaatggggcaacagaaatcaccgccaacgtcatcaaaggtacaaatgaagaaacagatgacctgatgctgactttcctactagaggacccccctctgtacggtgagatcctggtcaacggcatccccgctgagcagttcactcagcgggacatcctagaggggtcggtggtgtacacccataccagtggtgaaatcggcctgctccccaaggctgattcgtttaatctctctctgtccgatatgtcccaagagtggcgcattggtggtaatactatccagggagtaacaatttgggtcacgatattaccagtggatagtcaggcacccgagatattcgtgggggaacagttaattgttatggagggcgacaagagcgttatcacatcagttcacatcagcgccgaagacgtcgacagcctgaacgacgatattctctgcactattgtcattcagcccacctcaggctatgtcgagaacataagcccagcccctgggtcggagaaatctagggcgggtatcgctatttctgctttcaacttgaaagatttgagacagggacatataaattacgtccaatccgtgcacaaaggagtggaacctgtggaggaccggtttgtgttcaggtgtagcgacggtattaatttttctgaaagacagtttttcccaattgtcataattccaactaatgacgagcaacctgagatgtttatgcgcgagttcatggtgatggaggggatgtcactggtcatcgacacacctatcttaaatgctgccgacgcggacgtccctctcgatgatctcacgtttaccattacacaatttccaacacacgggcatatcatgaatcagctaatcaatgggactgttctggtggagagttttaccctagatcaaataattgagagctcttccatcatttacgaacacgacgattccgaaactcaggaggacagctttgttattaagctgacggacggtaaacattctgtggagaagaccgtgcttataatcgttatccctgtggatgatgagacacccagaatgaccattaacaatggtttggaaatcgagatcggggacaccaagataattaacaataaaatcttgatggcgaccgatttggattctgaagacaaatcgctggtgtacattataaggtacgggccaggtcacggattacttcagcggagaaaacccacgggcgcttttgagaacatcacccttggtatgaacttcacacaagacgaagtcgatcgaaacctcattcagtacgtgcatttggggcaggaaggcatacgggatctcatcaagtttgacgtcactgatggcataaatccccttatcgacagatacttctacgtctcgatcggttccattgatatcgtatttccggatgtcatttcaaagggagtcagccttaaggagggcggaaaggttacgctgacaacagacctcctctcaacttcagacctgaactcgcccgatgaaaacttggtcttcactatcactcgagcgccaatgcgcggacatctggagtgtacggaccagccaggcgtctcaattacctccttcacacagctacagcttgcgggaaacaaaatctattatatccatacagctgacgatgaagtgaagatggactctttcgagttccaggttaccgacggacgcaacccggtgttccgaacattcagaataagcatcagtgatgtggacaacaagaaaccagtagtgacgattcataagttagtggtgtcggagagcgaaaataagttgataacaccgtttgaattaaccgtcgaggatagggatacgccagacaaacttctaaagttcacaattactcaggtccccattcatggacacctactgttcaataacactcggcctgtgatggtgtttacgaagcaggacctgaacgagaacttgatctcatataagcatgatggcaccgagagctctgaggattcattttcttttactgtgaccgatggcacacatacggatttctacgttttcccggatactgtttttgaaacacgtaggccacaggtgatgaaaattcaagtgctggctgtagacaacagtgtaccacaaattgccgtaaataagggggctagcactctgcgaacccttgccacaggccacctgggtttcatgattacctccaaaatcttaaaagttgaggatagagactctctgcatatttctcttagatttattgttaccgaggcccctcagcatgggtatttacttaacctggataagggtaatcattccattacacaattcacgcaggctgacattgatgacatgaaaatctgctatgtgttgcgggagggagccaacgctacgtccgacatgttctacttcgctgttgaggatggcggagggaataaactaacttaccagaatttcaggctgaactgggcctggatttcattcgagaaggaatactatctggtgaatgaagacagtaagttcctagatgtcgtcttgaaacgacggggttatcttggcgaaacttcattcatttccataggcactcgggaccggacagccgagaaggataaggatttcaaaggaaaagcgcagaagcaggttcaatttaaccctgggcagactcgcgcaacttggcgggtgagaattttgtcagatggtgagcatgagcagagcgagacattccaggtcgtactttccgaacctgttctggccgcactggaattccctaccgtcgcgaccgtcgagattgtggaccccggtgatgaacctactgtgtttataccacaaagcaaatatagtgtggaagaggacgtcggcgaactcttcataccaattagaaggtcaggggatgtctctcaggaattgatggtggtgtgttacacgcagcaggggaccgctacgggaacggtgcctacatctgtcttatcctactctgattatatctctagacccgaggaccatacctccgttgtgaggtttgataaagacgagagggagaagctctgcaggatcgttattatcgacgactctctgtatgaagaagaggagaccttccatgtgctactgagtatgccgatgggcggaaggatcggcagcgagtttcccggagcccaggtgactatcgtgccagataaggacgatgagccaattttttatttcggggatgtggaatactctgtggatgagtctgccggatatgtggaagttcaagtctggaggaccggaacggatctgtcaaaaagctcctctgttactgtcaggagcaggaaaaccgatccaccatccgctgacgcagggactgactacgtcggaatctccaggaacttggactttgccccaggcgtaaatatgcagcctgtacgcgttgtaattcttgatgacttgggccagcctgcccttgagggcattgaaaaattcgagcttgtactgcggatgcccatgaacgccgcattgggtgagccctctaaagccactgtttcaattaatgattccgtgagcgatctgcccaaaatgcagtttaaggagcggatctacaccggatccgaatccgatggacagattgtgaccatgatccatcgaacgggcgacgtacaatacagatcttccgtcaggtgctacacacgccaaggctccgcccaggtgatgatggacttcgaggagcgtccaaatacagatacctccatcataactttcttgcccggtgaaaccgagaagccctgtattctcgaacttatggacgacgtgctgtacgaggaggtggaggaattgcggctcgtactcggaactcctcagtccaactctcccttcggcgctgcagtgggcgagcagaacgaaactctcatccgcatacgcgatgacgcagacaagacagttatcaaattcggggagaccaagttttctgtcaccgagccgaaagaacccggagagtcagttgtgattcgtatcccagtgatcaggcagggggacacatcaaaagttagcattgtgagagtccacacaaaggacgggtcagcaacatcaggtgaggattatcaccccgtttccgaagagatcgagttcaaggagggggagacacaacacgttgtggagatcgaggtaaccttcgatggagtgcgcgagatgagggaggcgtttacagttcatcttaagcctgatgaaaacatgatcgcagagatgcaactgacgaaagcgatcgtctacatagaggagatgagctcgatggccgacgttaccttcccatcggtaccacaaatcgtgagtctgctcatgtacgatgatacctcaaaggccaaggagagcgctgagccaatgtccggctatccggtcatatgcatcactgcttgcaatcccaagtactccgactatgataaaacaggatccatatgcgcctctgaaaatatcaacgatacactgacccgatatcgctggttgatctccgctccagctgggcctgatggagtgacgtcacctatgagagaggttgactttgataccttcttcacatctagtaaaatggtaacactcgattctatttattttcagcccggatcccgtgtacagtgcgccgcaagggcagtgaatactaacggagacgaaggattagagttaatgagccctatcgtgacaattagcagagaagagggactatgccagcctagagtgcctggagtggtcggcgcagaacccttctctgctaaactgcggtataccggaccagaggatgctgattacactaacttaattaaactgaccgtcaccatgccccacattgatggtatgctgcccgtgattagcacaagagagctcagcaacttcgaactcaccctgagcccagacggcacgagagttgggaatcacaagtgctcaaacctcctggattataccgaggtgaaaactcactatggctttctcaccgacgcaacaaaaaaccccgaaataatcggcgaaacatacccttaccagtacagtctgagtattcgcggatctacaacacttcgcttttatcgcaatctgaatctggaagcctgtctatgggagtttgtgagttactacgacatgagcgaacttttggccgactgtggtggaacaattggtacagacggtcaggttctgaatctcgtacagagctacgttaccctcagagtacccctgtacgtcagttatgtctttcatagcccagtcggtgtgggaggctggcagcattttgatctgaaaagtgaacttagacttaccttcgtgtacgatacggcaatactctggaacgatggaataggctccccacccgaggccgagcttcaaggtagtttgtaccccacttctatgcggataggggatgaggggagactggcagttcacttcaagactgaggcacagtttcatggactcttcgtactcagtcatcctgcttcatttacaagttccgtgatcatgtcagctgatcatcctggcttgaccttttcattacggctgattcgcagcgagccgacctacaatcagccagtgcagcagtggagcttcgtgtctgattttgctgtgagagactactcaggaacttacaccgtaaagctggtgccgtgcacagccccaagccatcaggagtatcggctgcccgtaacatgcaaccctcgtgagcctgtgaccttcgacctcgatattaggttccagcaggtgtcagatcctgtcgctgccgaattctctctgaatacccagatgtacctgctgtccaaaaagtccctctggctctctgatggatcaatgggatttggccaggagtccgacgtggcattcgcagagggcgatataatttacggcagggtgatggtcgatcccgtgcaaaacctcggcgattccttttattgctctatcgagaaagtgttcctatgtacaggggctgatgggtatgtacccaaatattctcccatgaatgccgaatatggctgcctggctgattcgccttccctgctgtaccgcttcaaaatcgtcgacaaggcgcagcctgaaactcaagcaacatcgttcggcaatgttttgttcaacgccaagctggccgtggatgatcctgaagcaatcctcctagtgaaccaaccaggaagtgatggatttaaagttgattcgactccactctttcaagtcgcactgggcagggaatggtatatccatactatatataccgtgcggagcaaggacaatgcaaatagggggatcggtaagcggagtgttgaataccacagtctcgtgagccaagggaaaccacaatcaaccaccaagagccgtaagaagcgtgagatccgatccacaccctcccttgcatgggaaatcggggctgaaaatagtagaggtaccaacatccagcacatcgccctggatcgtaccaagcgacagattcctcacggtcgggcaccccctgacggaatactgccttgggagctgaatagcccctcatctgccgtgtcgctggtcacggtggtgggtggcaccacagttggcctgctcacaatttgtctcactgtaatcgcggtgctcatgtgcagaggaaaagagagctttagaggcaaggacgcgccaaaaggatcctcatccagcgagccaatggtgccacctcagagtcatcataatgacagtagcgaagtttag

SEQ ID NO: 265299 - DNA, 9510 bp, Artificial Sequence
  derived and/or modified sequence
atgcacagcgccggcacccccggcctgagcagcagaagaaccggcaacagcaccagcttccagcccggccccccccccccccccagactgctgctgctgctgctgctgctgctgagcctggtgagcagagtgcccgcccagcccgccgccttcggcagagccctgctgagccccggcctggccggcgccgccggcgtgcccgccgaggaggccatcgtgctggccaacagaggcctgagagtgcccttcggcagagaggtgtggctggaccccctgcacgacctggtgctgcaggtgcagcccggcgacagatgcgccgtgagcgtgctggacaacgacgccctggcccagagacccggcagactgagccccaagagattcccctgcgacttcggccccggcgaggtgagatacagccacctgggcgccagaagccccagcagagacagagtgagactgcagctgagatacgacgcccccggcggcgccgtggtgctgcccctggtgctggaggtggaggtggtgttcacccagctggaggtggtgaccagaaacctgcccctggtggtggaggagctgctgggcaccagcaacgccctggacgccagaagcctggagttcgccttccagcccgagaccgaggagtgcagagtgggcatcctgagcggcctgggcgccctgcccagatacggcgagctgctgcactacccccaggtgcccggcggcgccagagagggcggcgcccccgagaccctgctgatggactgcaaggccttccaggagctgggcgtgagatacagacacaccgccgccagcagaagccccaacagagactggatccccatggtggtggagctgagaagcagaggcgcccccgtgggcagccccgccctgaagagagagcacttccaggtgctggtgagaatcagaggcggcgccgagaacaccgcccccaagcccagcttcgtggccatgatgatgatggaggtggaccagttcgtgctgaccgccctgacccccgacatgctggccgccgaggacgccgagagccccagcgacctgctgatcttcaacctgaccagccccttccagcccggccagggctacctggtgagcaccgacgacagaagcctgcccctgagcagcttcacccagagagacctgagactgctgaagatcgcctaccagccccccagcgaggacagcgaccaggagagactgttcgagctggagctggaggtggtggacctggagggcgccgccagcgaccccttcgccttcatggtggtggtgaagcccatgaacaccatggcccccgtggtgaccagaaacaccggcctgatcctgtacgagggccagagcagacccctgaccggccccgccggcagcggcccccagaacctggtgatcagcgacgaggacgacctggaggccgtgagactggaggtggtggccggcctgagacacggccacctggtgatcctgggcgccagcagcggcagcagcgcccccaagagcttcaccgtggccgagctggccgccggccaggtggtgtaccagcacgacgacagagacggcagcctgagcgacaacctggtgctgagaatggtggacggcggcggcagacaccaggtgcagttcctgttccccatcaccctggtgcccgtggacgaccagccccccgtgctgaacgccaacaccggcctgaccctggccgagggcgagaccgtgcccatcctgcccctgagcctgagcgccaccgacatggacagcgacgacagcctgctgctgttcgtgctggagagccccttcctgaccaccggccacctgctgctgagacagacccaccccccccacgagaagcaggagctgctgagaggcctgtggagaaaggagggcgccttctacgagagaaccgtgaccgagtggcagcagcaggacatcaccgagggcagactgttctacagacacagcggcccccacagccccggccccgtgaccgaccagttcaccttcagagtgcaggacaaccacgacccccccaaccagagcggcctgcagagattcgtgatcagaatccaccccgtggacagactgccccccgagctgggcagcggctgccccctgagaatggtggtgcaggagagccagctgacccccctgagaaagaagtggctgagatacaccgacctggacaccgacgacagagagctgagatacaccgtgacccagagccccaccgacaccgacgagaaccacctgcccgcccccctgggcaccctggtgctgaccgacaaccccagcgtggtggtgacccacttcacccaggcccagatcaaccaccacaagatcgcctacagaccccccggccaggagctgggcgtggccaccagagtggcccagttccagttccaggtggaggacagagccggcaacgtggcccccggcaccttcaccctgtacctgcaccccgtggacaaccagccccccgagatcctgaacaccggcttcaccatccaggagaagggccaccacatcctgagcgagaccgagctgcacgtgaacgacgtggacaccgacgtggcccacatcagcttcaccctgacccaggcccccaagcacggccacatgagagtgagcggccagatcctgcacgtgggcggcctgttccacctggaggacatcaagcagggcagagtgagctacgcccacaacggcgacaagagcctgaccgacagctgcagcctggaggtgagcgacagacaccacgtggtgcccatcaccctgagagtgaacgtgagacccgtggacgacgaggtgcccatcctgagccaccccaccggcaccctggagagctacctggacgtgctggagaacggcgccaccgagatcaccgccaacgtgatcaagggcaccaacgaggagaccgacgacctgatgctgaccttcctgctggaggacccccccctgtacggcgagatcctggtgaacggcatccccgccgagcagttcacccagagagacatcctggagggcagcgtggtgtacacccacaccagcggcgagatcggcctgctgcccaaggccgacagcttcaacctgagcctgagcgacatgagccaggagtggagaatcggcggcaacaccatccagggcgtgaccatctgggtgaccatcctgcccgtggacagccaggcccccgagatcttcgtgggcgagcagctgatcgtgatggagggcgacaagagcgtgatcaccagcgtgcacatcagcgccgaggacgtggacagcctgaacgacgacatcctgtgcaccatcgtgatccagcccaccagcggctacgtggagaacatcagccccgcccccggcagcgagaagagcagagccggcatcgccatcagcgccttcaacctgaaggacctgagacagggccacatcaactacgtgcagagcgtgcacaagggcgtggagcccgtggaggacagattcgtgttcagatgcagcgacggcatcaacttcagcgagagacagttcttccccatcgtgatcatccccaccaacgacgagcagcccgagatgttcatgagagagttcatggtgatggagggcatgagcctggtgatcgacacccccatcctgaacgccgccgacgccgacgtgcccctggacgacctgaccttcaccatcacccagttccccacccacggccacatcatgaaccagctgatcaacggcaccgtgctggtggagagcttcaccctggaccagatcatcgagagcagcagcatcatctacgagcacgacgacagcgagacccaggaggacagcttcgtgatcaagctgaccgacggcaagcacagcgtggagaagaccgtgctgatcatcgtgatccccgtggacgacgagacccccagaatgaccatcaacaacggcctggagatcgagatcggcgacaccaagatcatcaacaacaagatcctgatggccaccgacctggacagcgaggacaagagcctggtgtacatcatcagatacggccccggccacggcctgctgcagagaagaaagcccaccggcgccttcgagaacatcaccctgggcatgaacttcacccaggacgaggtggacagaaacctgatccagtacgtgcacctgggccaggagggcatcagagacctgatcaagttcgacgtgaccgacggcatcaaccccctgatcgacagatacttctacgtgagcatcggcagcatcgacatcgtgttccccgacgtgatcagcaagggcgtgagcctgaaggagggcggcaaggtgaccctgaccaccgacctgctgagcaccagcgacctgaacagccccgacgagaacctggtgttcaccatcaccagagcccccatgagaggccacctggagtgcaccgaccagcccggcgtgagcatcaccagcttcacccagctgcagctggccggcaacaagatctactacatccacaccgccgacgacgaggtgaagatggacagcttcgagttccaggtgaccgacggcagaaaccccgtgttcagaaccttcagaatcagcatcagcgacgtggacaacaagaagcccgtggtgaccatccacaagctggtggtgagcgagagcgagaacaagctgatcacccccttcgagctgaccgtggaggacagagacacccccgacaagctgctgaagttcaccatcacccaggtgcccatccacggccacctgctgttcaacaacaccagacccgtgatggtgttcaccaagcaggacctgaacgagaacctgatcagctacaagcacgacggcaccgagagcagcgaggacagcttcagcttcaccgtgaccgacggcacccacaccgacttctacgtgttccccgacaccgtgttcgagaccagaagaccccaggtgatgaagatccaggtgctggccgtggacaacagcgtgccccagatcgccgtgaacaagggcgccagcaccctgagaaccctggccaccggccacctgggcttcatgatcaccagcaagatcctgaaggtggaggacagagacagcctgcacatcagcctgagattcatcgtgaccgaggccccccagcacggctacctgctgaacctggacaagggcaaccacagcatcacccagttcacccaggccgacatcgacgacatgaagatctgctacgtgctgagagagggcgccaacgccaccagcgacatgttctacttcgccgtggaggacggcggcggcaacaagctgacctaccagaacttcagactgaactgggcctggatcagcttcgagaaggagtactacctggtgaacgaggacagcaagttcctggacgtggtgctgaagagaagaggctacctgggcgagaccagcttcatcagcatcggcaccagagacagaaccgccgagaaggacaaggacttcaagggcaaggcccagaagcaggtgcagttcaaccccggccagaccagagccacctggagagtgagaatcctgagcgacggcgagcacgagcagagcgagaccttccaggtggtgctgagcgagcccgtgctggccgccctggagttccccaccgtggccaccgtggagatcgtggaccccggcgacgagcccaccgtgttcatcccccagagcaagtacagcgtggaggaggacgtgggcgagctgttcatccccatcagaagaagcggcgacgtgagccaggagctgatggtggtgtgctacacccagcagggcaccgccaccggcaccgtgcccaccagcgtgctgagctacagcgactacatcagcagacccgaggaccacaccagcgtggtgagattcgacaaggacgagagagagaagctgtgcagaatcgtgatcatcgacgacagcctgtacgaggaggaggagaccttccacgtgctgctgagcatgcccatgggcggcagaatcggcagcgagttccccggcgcccaggtgaccatcgtgcccgacaaggacgacgagcccatcttctacttcggcgacgtggagtacagcgtggacgagagcgccggctacgtggaggtgcaggtgtggagaaccggcaccgacctgagcaagagcagcagcgtgaccgtgagaagcagaaagaccgacccccccagcgccgacgccggcaccgactacgtgggcatcagcagaaacctggacttcgcccccggcgtgaacatgcagcccgtgagagtggtgatcctggacgacctgggccagcccgccctggagggcatcgagaagttcgagctggtgctgagaatgcccatgaacgccgccctgggcgagcccagcaaggccaccgtgagcatcaacgacagcgtgagcgacctgcccaagatgcagttcaaggagagaatctacaccggcagcgagagcgacggccagatcgtgaccatgatccacagaaccggcgacgtgcagtacagaagcagcgtgagatgctacaccagacagggcagcgcccaggtgatgatggacttcgaggagagacccaacaccgacaccagcatcatcaccttcctgcccggcgagaccgagaagccctgcatcctggagctgatggacgacgtgctgtacgaggaggtggaggagctgagactggtgctgggcaccccccagagcaacagccccttcggcgccgccgtgggcgagcagaacgagaccctgatcagaatcagagacgacgccgacaagaccgtgatcaagttcggcgagaccaagttcagcgtgaccgagcccaaggagcccggcgagagcgtggtgatcagaatccccgtgatcagacagggcgacaccagcaaggtgagcatcgtgagagtgcacaccaaggacggcagcgccaccagcggcgaggactaccaccccgtgagcgaggagatcgagttcaaggagggcgagacccagcacgtggtggagatcgaggtgaccttcgacggcgtgagagagatgagagaggccttcaccgtgcacctgaagcccgacgagaacatgatcgccgagatgcagctgaccaaggccatcgtgtacatcgaggagatgagcagcatggccgacgtgaccttccccagcgtgccccagatcgtgagcctgctgatgtacgacgacaccagcaaggccaaggagagcgccgagcccatgagcggctaccccgtgatctgcatcaccgcctgcaaccccaagtacagcgactacgacaagaccggcagcatctgcgccagcgagaacatcaacgacaccctgaccagatacagatggctgatcagcgcccccgccggccccgacggcgtgaccagccccatgagagaggtggacttcgacaccttcttcaccagcagcaagatggtgaccctggacagcatctacttccagcccggcagcagagtgcagtgcgccgccagagccgtgaacaccaacggcgacgagggcctggagctgatgagccccatcgtgaccatcagcagagaggagggcctgtgccagcccagagtgcccggcgtggtgggcgccgagcccttcagcgccaagctgagatacaccggccccgaggacgccgactacaccaacctgatcaagctgaccgtgaccatgccccacatcgacggcatgctgcccgtgatcagcaccagagagctgagcaacttcgagctgaccctgagccccgacggcaccagagtgggcaaccacaagtgcagcaacctgctggactacaccgaggtgaagacccactacggcttcctgaccgacgccaccaagaaccccgagatcatcggcgagacctacccctaccagtacagcctgagcatcagaggcagcaccaccctgagattctacagaaacctgaacctggaggcctgcctgtgggagttcgtgagctactacgacatgagcgagctgctggccgactgcggcggcaccatcggcaccgacggccaggtgctgaacctggtgcagagctacgtgaccctgagagtgcccctgtacgtgagctacgtgttccacagccccgtgggcgtgggcggctggcagcacttcgacctgaagagcgagctgagactgaccttcgtgtacgacaccgccatcctgtggaacgacggcatcggcagcccccccgaggccgagctgcagggcagcctgtaccccaccagcatgagaatcggcgacgagggcagactggccgtgcacttcaagaccgaggcccagttccacggcctgttcgtgctgagccaccccgccagcttcaccagcagcgtgatcatgagcgccgaccaccccggcctgaccttcagcctgagactgatcagaagcgagcccacctacaaccagcccgtgcagcagtggagcttcgtgagcgacttcgccgtgagagactacagcggcacctacaccgtgaagctggtgccctgcaccgcccccagccaccaggagtacagactgcccgtgacctgcaaccccagagagcccgtgaccttcgacctggacatcagattccagcaggtgagcgaccccgtggccgccgagttcagcctgaacacccagatgtacctgctgagcaagaagagcctgtggctgagcgacggcagcatgggcttcggccaggagagcgacgtggccttcgccgagggcgacatcatctacggcagagtgatggtggaccccgtgcagaacctgggcgacagcttctactgcagcatcgagaaggtgttcctgtgcaccggcgccgacggctacgtgcccaagtacagccccatgaacgccgagtacggctgcctggccgacagccccagcctgctgtacagattcaagatcgtggacaaggcccagcccgagacccaggccaccagcttcggcaacgtgctgttcaacgccaagctggccgtggacgaccccgaggccatcctgctggtgaaccagcccggcagcgacggcttcaaggtggacagcacccccctgttccaggtggccctgggcagagagtggtacatccacaccatctacaccgtgagaagcaaggacaacgccaacagaggcatcggcaagagaagcgtggagtaccacagcctggtgagccagggcaagccccagagcaccaccaagagcagaaagaagagagagatcagaagcacccccagcctggcctgggagatcggcgccgagaacagcagaggcaccaacatccagcacatcgccctggacagaaccaagagacagatcccccacggcagagccccccccgacggcatcctgccctgggagctgaacagccccagcagcgccgtgagcctggtgaccgtggtgggcggcaccaccgtgggcctgctgaccatctgcctgaccgtgatcgccgtgctgatgtgcagaggcaaggagagcttcagaggcaaggacgcccccaagggcagcagcagcagcgagcccatggtgcccccccagagccaccacaacgacagcagcgaggtgtag

SEQ ID NO: 265300 - protein, 1909 aa, Artificial Sequence
  derived and/or modified sequence
MEGKRQLEKRDFGKRLSLDSSLVEYMDSNKYIEHLLTQLEEQHRSLWREKLAVARLQREVAQRTSEGAMHEKLIHELEEERHLRLQSEKRLQEVTLESERNRIQMRSLQQQFSRMEETVRNLLQSQGSPEQKKEETVNIMVYQEKLSEEERKHKEALEDLHMVVDEDSRSESSSTDEGKEKTKLLLERLKALEAENSALALENENQREQYERCLDEVANQVVQALLTQKDLREECVKLKTRVFDLEQQNRTLSILFQQRVRPTSDLLLQKLHSRLLDLSSGDLLSEVERNRSLTQSRTDAEVHEHQLNTKSALKCPGLGAVIPGHLCPRNSYSSSSELSLSSTCSEYSSGSSYTWHDGKNLRKRQSSQNWDKRLSIDSSLPSGFASPTNELPPTRIKESHILEGLRKLQKRKVLLEPPSVITKWGYKDCMNSNEGIYSPGIKSSSLKEYPPCKTADLGSPCKEPHKTFVYDLDSHVDADDDPSTLALLQAVPNQSCRPHGSKLTHSVSDSLFGWETNRKHFLEGTSSVYPKERPEKLTSCASSCPLEMKLCPSVQTPQVQRERGPQGQGHGRMALNLQLSDTDDNETFDELHIESSDEKSPSDVSLAADTDKSVENLDVLVGFGKSLCGSPEEEEKQVPIPSETRPKTFSFIKQQRVVKRTSSEECVTVIFDAEDGEPIEFSSHQTGVVTVTRNEISINSTPAGPKAEHTELLPQGIACLQPRAAARDYTFFKRSEEDTEKNIPKDNVDNVPRVSTESFSSRTVTQNPQQQKLVKPTHNISCQSNSRSSAPMGIYQKQNLTKIPPRGKSSPQKSKLMEPEATTLLPSSGLVTLEKSPALAPGKLSRFMKTESSGPLFELRSDPHIPKHSAQLPHSSRMPSRRDWVQCPKSQTPGSRSRPAIESSDSGEPPTRDEHCGSGPEAGVKSPSPPPPPGRSVSLLARPSYDYSPAPSSTKSETRVPSETARTPFKSPLLKGISAPVISSNPATTEVQRKKPSVAFKKPIFTHPMPSPEAVIQTRCPAHAPSSSFTVMALGPPKVSPKRGVPKTSPRQTLGTPQRDIGLQTPRISPSTHEPLEMTSSKSVSPGRKGQLNDSASTPPKPSFLGVNESPSSQVSSSSSSSSPAKSHNSPHGCQSAHEKGLKTRLPVGLKVLMKSPQLLRKSSTVPGKHEKDSLNEASKSSVAVNKSKPEDSKNPASMEITAGERNVTLPDSQAQGSLADGLPLETALQEPLESSIPGSDGRDGVDNRSMRRSLSSSKPHLKPALGMNGAKARSHSFSTHSGDKPSTPPIEGSGKVRTQIITNTAERGNSLTRQNSSTESSPNKAPSAPMLESLPSVGRPSGHPSSGKGSLGSSGSFSSQHGSPSKLPLRIPPKSEGLLIPPGKEDQQAFTQGECPSANVAVLGEPGSDRRSCPPTPTDCPEALQSPGRTQHPSTFETSSTSKLETSGRHPDASATATDAVSSEAPLSPTIEEKVMLCIQENVEKGQVQTKPTSVEAKQKPGPSFASWFGFRKSRLPALSSRKMDISKTKVEKKDAKVLGFGNRQLKSERKKEKKKPELQCETENELIKDTKSADNPDGGLQSKNNRRTPQDIYNQLKIEPRNRHSPVACSTKDTFMTELLNRVDKKAAPQTESGSSNASCRNVLKGSSQGSCLIGSSISTQGNHKKNMKIKADMEVPKDSLVKEANENLQEDEDDAVADSVFQSHIIESNCQMRTLDSGIGTFPLPDSGNRSTGRYLCQPDSPEDAEPLLPLQSALSAVSSMRAQTLEREVPSSTDGQRPADSAIVHSTSDPIMTARGMRPLQSRLPKPASSGKVSSQKQNEAEPRPQTCSSFGYAEDPMASQPLPDWGSEVAATGTQDKAPRMCTYSASGGSNSDSDLDYGDNGFGAGRGQLVKALKSAAPEIETT

SEQ ID NO: 265301 - DNA, 5730 bp, Artificial Sequence
  derived and/or modified sequence
atggagggcaagagacagctggagaagagagacttcggcaagagactgagcctggacagcagcctggtggagtacatggacagcaacaagtacatcgagcacctgctgacccagctggaggagcagcacagaagcctgtggagagagaagctggccgtggccagactgcagagagaggtggcccagagaaccagcgagggcgccatgcacgagaagctgatccacgagctggaggaggagagacacctgagactgcagagcgagaagagactgcaggaggtgaccctggagagcgagagaaacagaatccagatgagaagcctgcagcagcagttcagcagaatggaggagaccgtgagaaacctgctgcagagccagggcagccccgagcagaagaaggaggagaccgtgaacatcatggtgtaccaggagaagctgagcgaggaggagagaaagcacaaggaggccctggaggacctgcacatggtggtggacgaggacagcagaagcgagagcagcagcaccgacgagggcaaggagaagaccaagctgctgctggagagactgaaggccctggaggccgagaacagcgccctggccctggagaacgagaaccagagagagcagtacgagagatgcctggacgaggtggccaaccaggtggtgcaggccctgctgacccagaaggacctgagagaggagtgcgtgaagctgaagaccagagtgttcgacctggagcagcagaacagaaccctgagcatcctgttccagcagagagtgagacccaccagcgacctgctgctgcagaagctgcacagcagactgctggacctgagcagcggcgacctgctgagcgaggtggagagaaacagaagcctgacccagagcagaaccgacgccgaggtgcacgagcaccagctgaacaccaagagcgccctgaagtgccccggcctgggcgccgtgatccccggccacctgtgccccagaaacagctacagcagcagcagcgagctgagcctgagcagcacctgcagcgagtacagcagcggcagcagctacacctggcacgacggcaagaacctgagaaagagacagagcagccagaactgggacaagagactgagcatcgacagcagcctgcccagcggcttcgccagccccaccaacgagctgccccccaccagaatcaaggagagccacatcctggagggcctgagaaagctgcagaagagaaaggtgctgctggagccccccagcgtgatcaccaagtggggctacaaggactgcatgaacagcaacgagggcatctacagccccggcatcaagagcagcagcctgaaggagtaccccccctgcaagaccgccgacctgggcagcccctgcaaggagccccacaagaccttcgtgtacgacctggacagccacgtggacgccgacgacgaccccagcaccctggccctgctgcaggccgtgcccaaccagagctgcagaccccacggcagcaagctgacccacagcgtgagcgacagcctgttcggctgggagaccaacagaaagcacttcctggagggcaccagcagcgtgtaccccaaggagagacccgagaagctgaccagctgcgccagcagctgccccctggagatgaagctgtgccccagcgtgcagaccccccaggtgcagagagagagaggcccccagggccagggccacggcagaatggccctgaacctgcagctgagcgacaccgacgacaacgagaccttcgacgagctgcacatcgagagcagcgacgagaagagccccagcgacgtgagcctggccgccgacaccgacaagagcgtggagaacctggacgtgctggtgggcttcggcaagagcctgtgcggcagccccgaggaggaggagaagcaggtgcccatccccagcgagaccagacccaagaccttcagcttcatcaagcagcagagagtggtgaagagaaccagcagcgaggagtgcgtgaccgtgatcttcgacgccgaggacggcgagcccatcgagttcagcagccaccagaccggcgtggtgaccgtgaccagaaacgagatcagcatcaacagcacccccgccggccccaaggccgagcacaccgagctgctgccccagggcatcgcctgcctgcagcccagagccgccgccagagactacaccttcttcaagagaagcgaggaggacaccgagaagaacatccccaaggacaacgtggacaacgtgcccagagtgagcaccgagagcttcagcagcagaaccgtgacccagaacccccagcagcagaagctggtgaagcccacccacaacatcagctgccagagcaacagcagaagcagcgcccccatgggcatctaccagaagcagaacctgaccaagatcccccccagaggcaagagcagcccccagaagagcaagctgatggagcccgaggccaccaccctgctgcccagcagcggcctggtgaccctggagaagagccccgccctggcccccggcaagctgagcagattcatgaagaccgagagcagcggccccctgttcgagctgagaagcgacccccacatccccaagcacagcgcccagctgccccacagcagcagaatgcccagcagaagagactgggtgcagtgccccaagagccagacccccggcagcagaagcagacccgccatcgagagcagcgacagcggcgagccccccaccagagacgagcactgcggcagcggccccgaggccggcgtgaagagccccagccccccccccccccccggcagaagcgtgagcctgctggccagacccagctacgactacagccccgcccccagcagcaccaagagcgagaccagagtgcccagcgagaccgccagaacccccttcaagagccccctgctgaagggcatcagcgcccccgtgatcagcagcaaccccgccaccaccgaggtgcagagaaagaagcccagcgtggccttcaagaagcccatcttcacccaccccatgcccagccccgaggccgtgatccagaccagatgccccgcccacgcccccagcagcagcttcaccgtgatggccctgggcccccccaaggtgagccccaagagaggcgtgcccaagaccagccccagacagaccctgggcaccccccagagagacatcggcctgcagacccccagaatcagccccagcacccacgagcccctggagatgaccagcagcaagagcgtgagccccggcagaaagggccagctgaacgacagcgccagcaccccccccaagcccagcttcctgggcgtgaacgagagccccagcagccaggtgagcagcagcagcagcagcagcagccccgccaagagccacaacagcccccacggctgccagagcgcccacgagaagggcctgaagaccagactgcccgtgggcctgaaggtgctgatgaagagcccccagctgctgagaaagagcagcaccgtgcccggcaagcacgagaaggacagcctgaacgaggccagcaagagcagcgtggccgtgaacaagagcaagcccgaggacagcaagaaccccgccagcatggagatcaccgccggcgagagaaacgtgaccctgcccgacagccaggcccagggcagcctggccgacggcctgcccctggagaccgccctgcaggagcccctggagagcagcatccccggcagcgacggcagagacggcgtggacaacagaagcatgagaagaagcctgagcagcagcaagccccacctgaagcccgccctgggcatgaacggcgccaaggccagaagccacagcttcagcacccacagcggcgacaagcccagcaccccccccatcgagggcagcggcaaggtgagaacccagatcatcaccaacaccgccgagagaggcaacagcctgaccagacagaacagcagcaccgagagcagccccaacaaggcccccagcgcccccatgctggagagcctgcccagcgtgggcagacccagcggccaccccagcagcggcaagggcagcctgggcagcagcggcagcttcagcagccagcacggcagccccagcaagctgcccctgagaatcccccccaagagcgagggcctgctgatcccccccggcaaggaggaccagcaggccttcacccagggcgagtgccccagcgccaacgtggccgtgctgggcgagcccggcagcgacagaagaagctgcccccccacccccaccgactgccccgaggccctgcagagccccggcagaacccagcaccccagcaccttcgagaccagcagcaccagcaagctggagaccagcggcagacaccccgacgccagcgccaccgccaccgacgccgtgagcagcgaggcccccctgagccccaccatcgaggagaaggtgatgctgtgcatccaggagaacgtggagaagggccaggtgcagaccaagcccaccagcgtggaggccaagcagaagcccggccccagcttcgccagctggttcggcttcagaaagagcagactgcccgccctgagcagcagaaagatggacatcagcaagaccaaggtggagaagaaggacgccaaggtgctgggcttcggcaacagacagctgaagagcgagagaaagaaggagaagaagaagcccgagctgcagtgcgagaccgagaacgagctgatcaaggacaccaagagcgccgacaaccccgacggcggcctgcagagcaagaacaacagaagaaccccccaggacatctacaaccagctgaagatcgagcccagaaacagacacagccccgtggcctgcagcaccaaggacaccttcatgaccgagctgctgaacagagtggacaagaaggccgccccccagaccgagagcggcagcagcaacgccagctgcagaaacgtgctgaagggcagcagccagggcagctgcctgatcggcagcagcatcagcacccagggcaaccacaagaagaacatgaagatcaaggccgacatggaggtgcccaaggacagcctggtgaaggaggccaacgagaacctgcaggaggacgaggacgacgccgtggccgacagcgtgttccagagccacatcatcgagagcaactgccagatgagaaccctggacagcggcatcggcaccttccccctgcccgacagcggcaacagaagcaccggcagatacctgtgccagcccgacagccccgaggacgccgagcccctgctgcccctgcagagcgccctgagcgccgtgagcagcatgagagcccagaccctggagagagaggtgcccagcagcaccgacggccagagacccgccgacagcgccatcgtgcacagcaccagcgaccccatcatgaccgccagaggcatgagacccctgcagagcagactgcccaagcccgccagcagcggcaaggtgagcagccagaagcagaacgaggccgagcccagaccccagacctgcagcagcttcggctacgccgaggaccccatggccagccagcccctgcccgactggggcagcgaggtggccgccaccggcacccaggacaaggcccccagaatgtgcacctacagcgccagcggcggcagcaacagcgacagcgacctggactacggcgacaacggcttcggcgccggcagaggccagctggtgaaggccctgaagagcgccgcccccgagatcgagaccacctag

SEQ ID NO: 265302 - DNA, 5730 bp, Artificial Sequence
  derived and/or modified sequence
atggaagggaagcgtcagctggagaaacgcgattttgggaagcgactatcactcgacagcagcttggtcgagtacatggattctaataagtacatcgagcacctgctgacccagcttgaggaacagcatcgctctctctggcgcgaaaagctggccgtggccagactgcagcgagaagtagcacagcgaactagcgaaggagctatgcacgaaaaactgattcatgaactggaggaagaacgacatttgcgcctgcaatccgagaagagactgcaggaggtcacactggaaagcgagaggaatcgcatccaaatgcggtcactccagcagcaattcagccgcatggaggagaccgtcaggaacctgcttcaaagccagggatctccagaacagaagaaagaggagacagtcaacattatggtctaccaagaaaagctgtctgaggaggagagaaagcacaaggaagcactggaagatctacatatggtcgtcgatgaagattctcggtctgaatcttctagtactgatgaggggaaagaaaaaaccaaactgctgttagagcgactcaaagcactagaggccgaaaacagcgccctagcgctggagaatgagaaccagagagaacagtatgaacggtgcctggatgaagtggctaatcaggtcgtacaagccctactcacacagaaagacctgagggaggagtgtgtcaagctgaagacccgggtgtttgaccttgagcagcaaaaccggacattgagcatcctgttccaacaacgggtccgcccgaccagtgacctgctcctgcagaaattgcatagccgactgctagacctcagcagcggagatcttttgagtgaggtggagcgcaatcgttcactgacacagagccgaacagacgccgaagtacacgaacatcaacttaatactaagtctgcccttaagtgcccggggctgggagctgtcatacccggccacctgtgccccagaaatagctactcctcaagttcagaattatcactgagctctacttgctccgagtacagctcgggatcatcatatacctggcatgacggcaagaatctaaggaagcggcaaagttcccagaattgggacaagagattgagcatcgacagctccctgccatctggctttgccagcccaaccaacgaactgcctccaactagaattaaggagagccacatcctggaagggctgaggaagctgcagaaacgaaaggttcttttagaaccgccctcagtgataaccaaatggggttacaaggactgtatgaattccaatgagggcatctacagccctgggattaaaagctcctctctaaaggaatatcctccttgtaagacggctgacctcggatccccctgtaaggagccccacaagactttcgtgtatgacttggacagccatgtggatgctgatgacgatcctagcacactggccctgctgcaggcagttcctaaccagagctgccgcccgcatggctccaagttgacccacagtgtgtccgatagcctatttggctgggaaaccaaccgcaagcatttccttgaaggcacaagctctgtataccctaaggagaggcctgagaaactcacgtcctgcgcctcaagctgcccattggaaatgaaactgtgcccttcagtgcagacaccacaagttcaaagggagagaggcccacagggccagggacatggccggatggctctcaatctacagctgagcgacaccgatgacaacgagacttttgatgagttacatatcgagagctcagacgagaaatctcccagcgacgtgtcattggcagctgacaccgataaaagtgtggagaacctcgacgtcctggttgggttcggcaaaagcctttgcgggagtccggaagaggaggaaaaacaggtcccaattccgagcgagacacgccccaaaacctttagttttattaagcaacagcgcgtagtaaaacgtacatcttcggaagagtgtgtgacggtgatctttgatgccgaagatggagagccgatagagttcagtagtcaccagacaggtgtcgtaacagtcacccgaaacgaaatctctatcaactctacacctgccggccctaaggccgaacacacggagcttctgccccagggaattgcctgcctgcagccacgagctgcagcccgggactacaccttctttaagcgatctgaagaagacactgaaaaaaatatcccgaaagataatgttgacaatgtgccacgagtgtcaacagaaagtttctcatcacgcacagtcacacagaatccacagcaacagaaattggtgaagcccactcataatattagctgtcaaagtaatagtcgctcatccgcccccatgggaatctaccagaaacagaatctcacaaaaattcctccgcgaggtaagtcgagtccccaaaagtcaaaacttatggagcctgaagctactactctgcttccgagtagtgggctggtcacactggaaaagagccccgcactcgcacctggtaagctctcgcggtttatgaagaccgaatccagtggaccattgtttgagctgagatctgatcctcacattcccaagcactccgctcagttaccacattctagccgcatgccaagtcggcgcgactgggtccaatgcccaaagtcacaaactccaggttccaggtcccggcccgcgatcgagagtagcgactcaggggagcctccgacccgtgatgaacactgcggtagcgggcccgaggccggagtgaagtctccctccccaccaccacctcctgggaggtctgtctctctgctcgcccggccatcctacgattactcaccagcaccttcatctaccaagtctgaaacacgagtccctagtgaaacagctcgtactccatttaagtcgcctcttctgaagggtatttcggctcccgtgattagctccaatcctgccacaacagaagttcagaggaagaagcccagtgtggctttcaagaaacctatcttcacacacccaatgccatcacccgaggccgtgatccagacccgctgccctgcacacgctccaagcagttcttttacagtcatggccctcggtcccccgaaagtgagccctaagagaggtgtccccaagacctcgcctcgccaaactttaggaacaccccagagggacattggacttcaaacccctcggatatccccctctactcacgagccacttgagatgacgtctagcaaatccgtatcccctgggcggaagggtcagctcaacgattcagcctccactccccccaagccgtcctttctgggtgtcaatgagagtccgtctagtcaggttagcagctccagctcctcttcgagcccagccaaaagccataattcacctcatggctgtcagtccgcccatgagaaggggctgaaaacccgattacccgtcggattgaaagtgcttatgaaatccccccaacttctccgcaagtcttcaaccgtgccgggcaagcacgagaaggattcactgaacgaagcttccaagtcgtccgtggcggtcaataaatcaaaacctgaggactccaagaaccctgcatcaatggagataacggcaggcgaaaggaacgtgacactgcctgatagtcaggcccaggggagcttggctgatggtctcccgctggagaccgcattgcaggaacccttggaaagcagcatccccggaagtgacggcagagatggcgtcgacaataggtcaatgagacgctctttgtctagcagtaaaccacacctgaagcctgcgctcggtatgaacggggccaaggcccgctcacacagtttctcgacccatagcggggacaagccttccacccctccaattgagggcagtggcaaagtccgcactcagattatcactaacactgctgagagggggaactctctgaccagacaaaactcctcaaccgagagttcccccaataaggctccctctgccccaatgcttgaatcgctccctagcgtgggaagaccgtcaggccaccccagcagcgggaaaggctcgctggggtcttctggatctttttcctcacagcacggcagtccaagtaagctaccgcttcgtataccccctaagagtgaaggactgctcatacctcccggaaaggaggatcagcaagcctttacccagggtgagtgtcctagcgccaatgtggcggtgctgggagaaccaggttctgacaggagatcatgtccccccaccccaacggattgtcctgaagcgttgcagtcgccggggcggacccaacatcctagtacctttgagaccagcagcactagcaaattggagacttcggggaggcatcccgatgcgagtgctacagcaaccgatgctgttagctctgaggctcccctgagccctactatcgaagagaaggttatgctgtgtatccaagagaatgtcgagaaggggcaggttcagaccaagcctacatctgtggaagcgaaacagaagcctggcccatctttcgcttcttggtttggcttcaggaagagcagactccccgctctgtcctcccggaagatggatattagcaaaacgaaagtggaaaaaaaagacgctaaagtgctcggcttcggtaataggcagctcaaatcggaacgcaagaaggaaaagaagaaaccagaactgcaatgtgaaacagagaatgaacttataaaagatactaagagtgccgacaatcctgacggagggctccagagtaagaacaatcgtaggaccccacaggatatatacaatcagcttaaaatcgagcctcgaaaccgacactcgcctgtcgcttgctcgaccaaagacactttcatgacagagttgctgaaccgagtggataagaaagccgccccacagactgaatctggatcttccaatgcttcctgccggaacgtgctgaaaggcagcagccaggggagctgcctgatcgggagttcaatttctacgcagggcaaccacaagaaaaacatgaaaatcaaggccgacatggaggtcccaaaggactcacttgtgaaagaggcaaacgagaatctgcaggaagatgaagatgacgccgttgcggactcagtgttccagtcacacatcattgaatccaactgtcagatgagaaccctcgactcaggaatcggtacttttcccctgcccgacagcggcaatagaagtaccgggcgatatctgtgccagcctgattcacccgaggacgctgaacccctgctgcccttgcagagtgccttgtctgctgtctcctccatgagagcccagacgctggagcgcgaggtgccaagtagtaccgacgggcagcggccagctgatagcgcaattgtgcatagcacctcggatccaatcatgaccgctcggggcatgaggcctttgcagtccagattgcccaagcctgcttcctcagggaaggtttcgtcacagaaacaaaatgaggccgaaccacgtccccagacatgttcgtcattcggctacgcggaagaccccatggctagccagccactgcctgattggggatccgaggtggccgctacagggactcaggacaaggccccccgcatgtgcacctactctgcatccgggggctcgaacagcgacagtgatctggattacggagacaacggttttggcgctggaaggggacagctggtcaaggccctgaagagcgcggccccagaaatagaaaccacctag

SEQ ID NO: 265303 - DNA, 5730 bp, Artificial Sequence
  derived and/or modified sequence
atggagggtaaaaggcagctcgagaagagggatttcggcaagcgcctctcactggactccagcctggtggaatacatggactcaaacaaatacatcgaacacctgctgacccagttggaggagcaacacagatccctgtggcgtgagaagcttgctgtggcccggctccagcgggaggtagctcagaggacgtctgaaggcgcgatgcatgaaaagctgatccatgagctggaagaggaacggcacctgcgactgcaaagtgagaagaggctacaggaggtaacactcgagtctgagaggaaccgaatccagatgaggtcattgcagcaacagttctcccgcatggaagagaccgtgcgcaacctactgcagtcccagggtagccccgagcaaaagaaggaggagaccgtgaatatcatggtctatcaagaaaagctatctgaagaggaacggaagcacaaggaggctctggaagatctccatatggtagtggacgaagatagtagatcagagtcctcctcaacagacgagggcaaagaaaagactaaattgttgctcgagcgcctcaaggcactcgaagcagaaaactccgcactcgccctggagaatgagaaccagagagagcaatacgagcgctgtctcgatgaggtggcgaaccaggtcgtgcaggccctgttgacacagaaggaccttcgggaggaatgtgtgaagctgaaaactcgcgtcttcgatctggagcagcagaacagaaccctgtctattctgtttcagcaaagagtcaggcctacaagcgatctacttctccaaaagcttcactctcggctcttagatctgtcatctggcgacctgttatctgaggtagagcgcaatcgtagcctgacccagtcacggacagatgccgaggttcacgaacatcaactgaacacgaagtcagcactcaagtgccccgggctgggcgccgtaattcccggccacttgtgcccacggaactcatactcctcatcctcagagctctccctcagctcgacctgttctgagtatagtagcggttcaagttatacatggcacgatggtaaaaacctgcgtaagcggcagtcaagccagaattgggataagcgcctgtcaatcgattcgtccctccctagcggatttgcttcacccacaaatgagcttcccccaactaggataaaggagagccatatcctggagggactgcgtaagctgcagaaacggaaagtcctgcttgaaccccctagcgtcataacaaaatggggctacaaggattgtatgaacagcaacgaagggatctactccccagggattaagtccagctccctgaaagaatatcccccttgcaaaacggcagacctgggatctccttgcaaggagccccataaaacattcgtctacgacctcgactctcatgtcgacgccgacgacgatccaagtaccctggcactccttcaggccgtaccaaatcagagctgtcgtcctcatggatccaaactgacccacagcgtgagcgactccctgttcggttgggagaccaataggaagcactttttggaagggacgtccagcgtatatccaaaggagcgccccgaaaagctcaccagctgtgcaagctcttgtcccttagagatgaaactgtgtcctagcgtgcaaacaccacaagttcagcgcgaaaggggacctcaaggccagggccacggtagaatggcactgaatttgcagctttcagataccgacgataatgaaacttttgacgagcttcacatagagagctctgatgaaaagtcacccagcgacgtatcgctggccgcggatactgacaagtctgtggagaatttggatgtgctggttggcttcggcaagtctctctgtggatctccagaagaggaggagaagcaggtccccattcctagcgagacccgtcctaagaccttttcctttattaaacagcagcgtgtggtgaaaagaacctcctccgaagagtgcgtcactgtgatttttgacgccgaggatggggaaccaatcgagttctcgagccaccagacaggggtggttactgtcaccagaaacgagatctccataaattcaactcccgctggccctaaggcagaacacactgagctcctgccccaagggatcgcctgtctccaaccgagggccgccgcccgcgactacactttctttaaaaggtccgaggaagataccgagaaaaacattcccaaggataatgtggacaatgttcctcgcgtcagtaccgaaagtttctccagtcggacagtgactcagaatccacaacagcagaagttggtcaaacctacccataacatttcctgtcagagcaactcgaggagcagtgcccctatgggtatttatcagaagcaaaacctgaccaaaattcctccccggggaaagagcagccctcaaaagagcaaattgatggaaccagaggcaactaccctgctcccctcaagtggcctcgttacactggagaaatcgcccgccctggctccgggtaagctgtctagattcatgaagacagaatcctcaggtccactctttgagctacggagtgaccctcacattcctaagcactctgctcagctgccacattcttctcgcatgccatccagacgggattgggtccagtgtcccaaatcccaaactcccggttctcgcagtagacctgcgatcgaaagttcggactcaggtgaacctcccacacgcgatgaacactgtggatccgggccggaggcaggggtcaagtctcccagccctccacctccgcccggcaggtccgttagcttgctagcaagaccctcgtacgattacagccccgcaccgagtagcaccaagagcgaaacccgcgtgccctccgaaaccgcccgaacccccttcaaatctcctctacttaagggaatttcggcccctgtgatatccagcaatccagcaacaaccgaagtccagcggaagaagccatccgtcgccttcaagaagcctatcttcacgcatcccatgccttctcccgaagccgtgatccaaacacgttgcccggctcatgctccatcttcttccttcaccgtgatggctctcggcccccccaaggtgtctcctaaacggggagtcccaaagaccagtcccaggcagactctggggacccctcagagagatatcggactgcagacaccacggatttccccttccacccacgaaccattagagatgacatcttctaagtccgtaagcccgggcagaaaagggcaactgaacgatagcgccagcacaccccccaaaccaagcttcctgggggttaatgaatctccctcatcgcaagtgagcagcagctcttctagctcatcacccgcaaaatcccacaacagcccccatggatgccaatccgcacacgaaaaaggactcaagacccggcttccagtggggttaaaagtgttgatgaagtctccccaactgcttcgcaagagctccactgtacccggaaaacacgagaaggacagcctcaatgaggcatcaaagtcttctgtggctgtgaacaaaagcaaacctgaggattccaagaaccctgcgtctatggaaataaccgccggcgagcgcaatgtaacccttcctgattcacaggcccaggggagtttagccgacggacttcccctggaaactgccctgcaggagccgctggaatcttcaataccaggttctgatggccgggatggagtggacaaccgcagcatgaggcgcagtctgtcttcctctaagccacacctgaaaccggctttgggaatgaatggagctaaggcccgctcccactcgttctctacccacagcggcgataagccgtccactccacccatcgaggggtcaggcaaagtgaggacccagatcattactaacactgcagaaagggggaattccctgacgcgccaaaactctagtacagaatccagtcccaataaggccccttcagccccaatgctagagtcactcccttccgtgggtaggccatccggacatccgtcctctggcaaaggttccctcggcagttcaggttcttttagttcacaacacggctcaccctctaaactccccctccgtattccaccaaagtccgaaggcctgctcattcctcccgggaaggaggaccagcaggcatttacccagggtgaatgcccctccgcgaacgtggctgtccttggggaaccaggctccgaccgacgctcttgcccccccaccccaaccgattgtcctgaagcgttgcagtcaccaggcaggacacagcatccctcaacctttgaaacctcatccacaagtaaactggagacttccggccgtcacccggatgcgtctgctactgccacggacgccgtcagtagtgaggctccactgtcccctaccatcgaagaaaaggttatgctttgcatccaggagaatgtagagaaagggcaggttcaaaccaaaccaacctctgtcgaagccaaacaaaagcctggtcccagcttcgcctcatggttcggtttcagaaaatcaaggctgcctgcactctcgagccgaaagatggacataagtaaaacaaaggtggaaaaaaaagacgctaaagtgttgggattcggtaataggcaactgaagtccgaacgaaaaaaagaaaagaaaaagcccgagctacagtgcgaaaccgaaaacgagctcattaaagatactaaaagcgcagacaatcctgacggaggactgcagtcaaaaaataatcgccggaccccccaagacatctataatcagctcaaaatagagccacgcaaccggcactctcccgtcgcatgcagcaccaaagacacctttatgacagaactgctgaaccgcgtcgataagaaagccgccccacagactgaatcaggatcgagtaatgcaagctgcaggaatgtcctgaagggttcaagtcagggcagttgcctgatcggcagtagtatcagtacacaaggcaaccataaaaagaatatgaaaattaaggcagatatggaagtacctaaagattccctcgtgaaggaggctaacgagaatttgcaggaggacgaggatgacgccgtggcagatagtgtattccaatctcacattatcgaatcgaactgccagatgcgcaccctggactctggcatcggcactttccccttaccggacagcggcaatcgatctaccgggagatacctctgccagcccgattccccagaggatgctgagccattgctacctctgcagtctgccctgtccgctgtgtcgtcaatgcgagctcagacactcgaaagggaggtaccatcaagcactgatggacaaaggccagcagatagcgccatcgtacactccacctccgaccctataatgacggccagaggcatgaggccgctgcagtcgcggctgccaaagcccgcctcctcggggaaagtgtctagtcagaaacaaaacgaggcggagccgcggcctcagacttgcagttcttttgggtatgccgaggaccccatggcatctcagcccttacctgattggggttcggaagtggcggctacaggtacccaggataaggctccacgcatgtgcacatacagcgcctctggtggcagcaactccgatagtgatcttgactatggcgacaatggttttggagccggacgcggccagcttgttaaggctctgaagagcgcggccccagagatcgaaaccacatag

SEQ ID NO: 265304 - DNA, 5730 bp, Artificial Sequence
  derived and/or modified sequence
atggagggcaagaggcagctggagaagagggactttgggaagaggctgagcctggacagcagcctggtggagtacatggacagcaacaagtacatcgagcacctgctgacccagctggaggagcagcacaggagcctgtggagggagaagctggccgtggcccggctgcagcgggaggtggcccagaggaccagcgagggcgccatgcatgagaagctgattcatgagctggaggaggagcggcacctgcggctgcagagcgagaagaggctgcaggaggtgaccctggagagcgagaggaaccgcatccagatgaggagcctgcagcagcagttcagcaggatggaggagaccgtgaggaacctgctgcagagccagggcagccctgagcagaagaaggaggagaccgtgaacatcatggtgtaccaggagaagctgtctgaggaggagaggaagcacaaggaggccctggaggacctgcacatggtggtggatgaggacagccgctctgagagcagcagcacagatgagggcaaggagaagaccaagctgctgctggagcggctgaaggccctggaggctgaaaattctgccctggccctggagaatgaaaaccagcgggagcagtatgagcgctgcctggatgaggtggccaaccaggtggtgcaggccctgctgacccagaaggacctgcgggaggagtgtgtgaagctgaagaccagggtgtttgacctggagcagcagaacagaaccctgagcatcctcttccagcagagggtgcggcccaccagtgacctgctgctgcagaagctgcacagccggctgctggacctgagcagcggggacctgctgtctgaggtggagaggaacagaagcctgacccagagcaggacagatgctgaggtgcatgagcaccagctgaacaccaagagcgccctgaagtgccccggcctgggcgccgtcatccctggccacctgtgccccagaaattcctacagcagcagcagcgagctgagcctgagcagcacctgcagcgagtacagcagcggcagcagctacacctggcatgatggcaagaacctgaggaagaggcagagcagccagaactgggacaagaggctgagcattgacagcagcctgcccagcggctttgccagccccaccaatgagctgccccccacccgcatcaaggagagccacatcctggagggcctgaggaagctgcagaagaggaaggtgctgctggagcccccatctgtcatcaccaagtggggctacaaggactgcatgaacagcaatgaaggcatctacagccctggcatcaagagcagcagcctgaaggagtacccaccctgcaagacagctgacctgggcagcccctgcaaggagccccacaagacctttgtgtatgacctggacagccacgtggatgctgatgatgaccccagcaccctggccctgctgcaggccgtgcccaaccagagctgccggccccacggcagcaagctgacccacagcgtgtctgacagcctgtttggctgggagaccaacaggaagcacttcctggagggcaccagctctgtgtaccccaaggagaggcctgagaagctgaccagctgtgccagcagctgccccctggagatgaagctgtgccccagcgtgcagaccccccaggtgcagcgggagcggggcccccagggccagggccacggccgcatggccctgaacctgcagctgagtgacacagatgacaatgagacctttgatgagctgcacatcgagagcagtgatgagaagagccccagtgatgtgtccctggccgctgacacagacaagtctgtggagaacctggatgtgctggtgggctttgggaagagcctgtgtggcagccctgaggaggaggagaagcaggtgcccatccccagcgagacccggcccaagaccttctccttcatcaagcagcagagggtggtgaagaggaccagcagtgaagaatgtgtgaccgtcatctttgatgctgaagatggagagcccatcgagttcagcagccaccagacaggagtggtgacagtgaccagaaatgagatcagcatcaacagcaccccagctggccccaaggccgagcacacagagctgctgccccagggcatcgcctgcctgcagcccagggctgctgcccgggactacaccttcttcaagagaagtgaggaggacacagagaagaacatccccaaggacaacgtggacaacgtgccccgggtgtccacagagagcttcagcagcaggacagtgacccagaacccccagcagcagaagctggtgaagcccacccacaacatcagctgccagagcaacagccgcagcagcgcccccatgggcatctaccagaagcagaacctgaccaagatccccccccggggcaagagcagcccccagaagagcaagctgatggagcctgaggccaccaccctgctgcccagcagcggcctggtgaccctggagaagagccctgccctggcccctgggaagctgagccgcttcatgaagacagagagcagcggccccctgtttgagctgcggagtgacccccacatccccaagcacagcgcccagctgccccacagcagcaggatgcccagcagaagagactgggtgcagtgccccaagagccagaccccaggcagccgcagcaggcctgccatcgagagcagtgacagcggggagccccccaccagagatgagcactgcggcagcggccctgaggccggcgtgaagagccccagccccccacctcctcctggccgctctgtgtccctgctggcccggcccagctatgactacagccctgcccccagcagcaccaagtctgagaccagggtgcccagcgagacagcccggacccccttcaagagccccctgctgaagggcatcagcgcccctgtgatcagcagcaacccagccaccacagaggtgcagaggaagaagcccagcgtggccttcaagaagcccatcttcacccaccccatgcccagccctgaggccgtcatccagacccgctgcccagcccacgcccccagcagcagcttcaccgtgatggccctgggcccccccaaggtgagccccaagaggggcgtgcccaagaccagcccccggcagaccctgggcaccccccagagggacatcggcctgcagaccccccgcatcagccccagcacccatgagcccctggagatgaccagcagcaagtctgtgtccccaggcaggaagggccagctgaatgattctgccagcaccccacccaagcccagcttcctgggcgtgaatgaaagccccagcagccaggtgagcagcagcagcagcagcagcagccctgccaagagccacaacagcccccacggctgccagagcgcccacgagaagggcctgaagacccggctgcctgtgggcctgaaggtgctgatgaagagcccccagctgctgaggaagagcagcacagtgcctgggaagcatgagaaggacagcctgaatgaggccagcaagagctctgtggccgtgaacaagagcaagccagaggacagcaagaacccagcctccatggagatcacagctggggagagaaatgtgaccctgcctgacagccaggcccagggcagcctggctgatggcctgcccctggagacagccctgcaggagcccctggagagcagcatccctggcagtgatggaagagatggagtggacaacagatccatgaggaggagcctgagcagcagcaagccccacctgaagccagccctgggcatgaatggagccaaggcccggagccacagcttcagcacccacagcggggacaagcccagcaccccacccatcgagggcagcggcaaggtgaggacccagatcatcaccaacacagctgagcggggcaacagcctgacccggcagaacagcagcacagagagcagccccaacaaggcccccagcgcccccatgctggagagcctgcccagcgtgggccggcccagcggccaccccagcagcggcaagggcagcctgggcagcagcggcagcttcagcagccagcacggcagccccagcaagctgcccctgcgcatcccccccaagtctgagggcctgctgatccccccaggcaaggaggaccagcaggccttcacccagggagaatgtcccagcgccaacgtggccgtgctgggggagcccggcagtgacagaagaagctgcccccccacccccacagactgcccagaggccctgcagagccctggccgcacccagcaccccagcacctttgagaccagcagcaccagcaagctggagaccagcggccgccacccagatgccagcgccacagccacagatgctgtgagcagcgaggcccccctgagccccaccatcgaggagaaggtgatgctgtgcatccaggagaatgtggagaagggccaggtgcagaccaagcccacctctgtggaggccaagcagaagccaggccccagctttgcctcctggtttggcttcaggaagagccggctgcctgccctgagcagcaggaagatggacatcagcaagaccaaggtggagaagaaggatgccaaggtgctgggcttcggcaaccggcagctgaagtctgagaggaagaaggagaagaagaagccagagctgcagtgtgaaacagaaaatgagctgatcaaggacaccaagtctgctgacaacccagatggcggcctgcagagcaagaacaacagaaggaccccccaggacatctacaaccagctgaagattgagcccaggaacagacacagccctgtggcctgcagcaccaaggacaccttcatgacagagctgctgaacagagtggacaagaaggccgccccccagacagaaagtggcagcagcaatgccagctgcagaaatgtgctgaagggcagcagccagggcagctgcctgattggcagcagcatcagcacccagggcaaccacaagaagaacatgaagatcaaggctgacatggaggtgcccaaggacagcctggtgaaggaggccaatgaaaacctgcaggaggatgaagatgatgctgtggccgacagcgtcttccagagccacatcatcgagagcaactgccagatgaggaccctggacagcggcatcggcaccttccccctgcctgacagcggcaacagaagcacaggccgctacctgtgccagcctgacagcccagaagatgctgagcccctgctgcccctgcagagcgccctgtctgctgtgtcctccatgagggcccagaccctggagcgggaggtgcccagcagcacagatggccagaggcctgctgacagcgccatcgtgcacagcaccagtgaccccatcatgacagcccggggcatgaggcccctgcagagccggctgcccaagccagccagcagcggcaaggtgagcagccagaagcagaatgaagctgagccccggccccagacctgcagcagctttggctatgcagaggaccccatggccagccagcccctgcctgactggggcagcgaggtggccgccaccggcacccaggacaaggcccccaggatgtgcacctacagcgccagcggcggcagcaacagcgacagcgacctggactatggagacaatggatttggagctggccggggccagctggtgaaggccctgaagtctgctgcccctgagattgagaccacctag

SEQ ID NO: 265305 - DNA, 5730 bp, Artificial Sequence
  derived and/or modified sequence
atggagggcaagcggcagctggagaagcgggacttcggcaagcggcttagcctggactcttctctggtggaatacatggactctaataagtacatagaacacctgctcacacagttggaagagcaacacagaagcctttggcgagaaaagttagctgtagctcggctgcagcgtgaggtggcccagcgcacaagtgaaggcgcaatgcacgaaaagttaattcacgagctggaagaggaacgccacctacgcctgcagagcgagaagagacttcaggaagtcacactagagagtgagaggaaccgcatacagatgaggtccttgcaacagcaattctcccgaatggaggaaacagtgcgcaatctgttgcaaagccagggttcccccgaacagaagaaagaggagacagtgaacatcatggtataccaggaaaagctgagcgaggaagagagaaagcacaaggaagctctggaggatctgcatatggttgttgacgaagatagccggtccgagagcagcagtacagatgagggcaaagagaagacgaaactactccttgagcggttgaaagccctggaggccgagaactcagcgctggccctcgagaacgagaatcaaagggaacaatacgaacgatgtctagacgaggttgcaaaccaggtggtgcaggccctcctgacccaaaaagatcttagggaagagtgcgtgaaactaaaaacccgagtatttgacctggaacagcaaaacaggacactgtcaatactcttccagcagcgggttcgtccaacttcggacctgctgttgcagaagctccacagccgactgctcgacctttcatctggggacctgttaagcgaagtggaaagaaaccgatcgctgacccaatcaaggactgacgcagaggtgcacgaacaccagctgaacacaaagtcagccctcaaatgccctggcctgggtgctgttatcccagggcacctgtgcccaagaaacagctactcaagctctagtgagctgagtctcagctcgacatgttcggagtattcttccggaagttcgtatacttggcacgatgggaagaacctacgcaaacgtcaaagtagccagaactgggacaaaagactgtcaattgacagttcattaccctccgggttcgctagtccgaccaatgagttgcctccgacacggatcaaggagagccacatcctggaagggctgcggaagcttcaaaaacggaaggtactcttagaacccccctctgtgataaccaaatggggctacaaggactgtatgaacagcaacgaaggcatctactcgccggggattaaaagcagttccctgaaagagtaccccccctgcaaaacagccgacttgggttctccttgtaaagagccccacaagacgtttgtgtacgatttggatagccatgtggacgcggatgacgacccttccacactagctctgctgcaagccgtgccaaaccagtcttgtagaccccatgggtctaaattgactcactcagtatcagatagcctgttcggttgggagactaacagaaagcattttttggagggcactagttcagtttaccccaaggagcgccctgagaagctcacttcctgtgcctcatcctgccctctcgagatgaagctttgccctagtgtccaaaccccccaagtgcagcgtgaacgggggcctcagggtcagggccacgggcggatggccctgaacttacagctttctgatacggatgacaacgagacattcgacgaattgcacatcgaatcgtcggacgagaaatcaccaagcgatgtgtctttggctgccgacaccgacaagagcgtggagaatctggacgttctggtcggcttcgggaagagtctgtgcggctcacccgaggaagaggaaaagcaggtacccatcccctcagagacgaggcctaagacattcagtttcatcaagcagcaacgcgttgtgaaaaggacatccagcgaggaatgtgtgaccgttatctttgatgcggaggacggcgagcctatcgagtttagctcccaccagaccggcgtagtgactgtgactcgaaacgaaatctctatcaactctacgcctgccgggccaaaggcagagcatactgaattacttcctcagggaatagcttgtctgcaacctagagcggccgcacgggattacaccttttttaagaggagcgaggaggacaccgagaagaacatcccgaaagacaacgtggacaacgtcccccgcgtctccaccgagtccttttcatccagaaccgtgactcagaatccccagcagcaaaaacttgtgaaacccacacacaacatttcctgccagtccaactcaagaagttctgctcctatgggaatctaccagaaacagaaccttactaaaataccaccccggggcaagagttcgccccagaaatcaaagcttatggagccagaagcaaccacactgttgccaagctccggtctggtgacacttgaaaagtcacccgccttggcaccgggcaaactgtctagattcatgaagactgagagctctggccctctgtttgagctacgctcagacccccacatacccaagcactcggcacagctgccacacagtagccggatgcccagtcggagagattgggtgcagtgtcccaaatcccagactccggggagccgaagccggcccgccatcgaatccagcgactccggagagcccccaactcgcgacgagcattgcgggtcagggccggaggctggcgttaagtcacctagccctcctcccccccctggacgcagcgttagccttctcgcgagaccatcctatgattactcacccgcaccctcctccaccaagtcggagaccagagtcccttccgaaaccgccagaaccccctttaaatctccccttctcaagggcatcagcgcccctgtgatctccagtaaccctgctacaacagaggtgcagcgcaagaaaccttctgtggcattcaaaaaacctatcttcacccatcccatgccttccccagaagctgttattcagacaagatgcccagcacacgccccgtcctcttcattcactgtgatggcgctcgggcccccgaaggtgtctcccaagcgaggcgttcctaagacttcacctcgtcaaacactgggcacaccacagcgtgacattggattacagactccccgcattagtccaagtacacacgagcctctggaaatgacgtcatccaaatcagtgtcccccgggagaaagggtcaactaaatgactcagcctccacgcctccaaagcccagcttcctgggcgttaacgaatccccaagtagccaagtgtcttcatcatctagctctagctcacctgccaagtcccataactctccacacgggtgtcagtcagcccacgagaaggggctgaaaacccggctgcccgtggggcttaaggtgctgatgaagtctccgcagttgctccggaagagctctaccgtcccaggtaagcatgaaaaagactccctcaacgaagccagcaagtcttcagtcgccgtgaataagagcaagcccgaagacagcaagaacccagcctcaatggagattacagcaggggaaagaaacgttaccttgcccgatagccaggcccagggcagtctcgctgatggccttcctctcgagaccgcccttcaggagccgttagagagttcaattccaggatctgatggacgggatggtgtggataatcggtccatgcgccgctctctttcttcttcgaagccgcacctaaaacccgcgcttggaatgaatggggccaaggcgcgaagccactccttctctactcactccggagacaagcctagtactcctcccattgaaggctcgggtaaggtccgcacccagataattacaaatacggcggagcggggaaattccctgacgagacagaattccagtacggagtcttcgcctaacaaagcccccagtgcccctatgttggagtccttgccaagtgtgggcaggccaagtggtcaccccagttcgggcaagggatcccttggctccagcggcagtttttcaagtcaacacggcagcccatcaaagctgcctctgcgcatcccacctaaatcggaaggactgctgatacctccagggaaggaggatcagcaggccttcacccaaggagagtgcccctctgccaatgttgccgtgttaggagaaccgggatctgacagacgatcctgcccgccaaccccaacggattgtcccgaagccctacaaagcccaggacgcactcagcatcctagcacatttgaaacaagctcgacctctaagctggagacctcaggaagacaccctgacgccagcgccaccgccacagacgcagtgtcttctgaagctccgttgagtcccacgatcgaggaaaaggttatgttgtgcatccaagaaaacgtggagaaaggacaggtacagaccaaaccaacttcagttgaggccaaacaaaagcctgggccaagttttgcctcctggttcgggtttcgaaagtcaaggctgccagccctctcatcccgcaaaatggatataagcaaaacgaaagtagaaaaaaaagatgctaaagtcctcgggtttggcaatcgtcagctcaagtctgagcgtaagaaggaaaagaagaagcccgagctgcagtgtgaaacagagaacgagttgataaaggataccaagtccgccgacaatccagacggagggttacagtcaaagaacaataggcgcactccgcaagatatctataaccagcttaaaattgagccgaggaacaggcactcccctgtggcatgcagcacgaaggacaccttcatgacggaactgctaaacagagttgataagaaagctgccccacaaacagaatccggctcaagtaatgcatcttgccggaacgtgctgaaaggctccagtcaggggagctgccttattggaagcagtatcagtacacagggcaaccacaagaaaaatatgaagatcaaggccgacatggaggtgcctaaggacagcctggtgaaggaagccaacgagaaccttcaagaagacgaggacgatgcggtagccgactccgtattccagagtcacattatagagtcaaattgccagatgcgcacattggacagcgggatcggtactttcccgttgcccgatagcggcaaccggtccaccggtagatacctgtgtcagccagactcccccgaagatgccgagccattgctgcctctccagtcagcactcagcgcagtgtcttcaatgagggcccagacgctggagcgtgaggtaccatcttcgaccgatggacagaggcctgccgactctgccatcgtacactccacatcggatccgatcatgactgcgagagggatgcgaccactgcagagccggcttccaaaacctgcctcttctggcaaagtgtcttctcagaaacagaacgaggcagagcctaggccacagacttgtagctcctttggttatgccgaagaccctatggcctcccaacccttgccagactgggggtctgaagtggcggcaactggtacccaagacaaagctccccgcatgtgtacatactccgcgtcaggaggtagcaacagcgactccgacctcgactatggagataatgggttcggcgcgggcaggggacagctcgttaaggctctcaagagcgcggcccccgagatagagacgacctag

SEQ ID NO: 265306 - DNA, 5730 bp, Artificial Sequence
  derived and/or modified sequence
atggagggcaagcggcagctggagaagcgggacttcggcaagcggctttctctcgattcctctttggtcgaatatatggattcaaataagtacatagagcatctcctaacacagctcgaagaacagcatcgctccctatggagagaaaaattagcagtggcacgtcttcagcgcgaagttgcacaacgaacaagcgagggagctatgcatgaaaaattgattcatgaattagaggaagagcggcatttgagactgcagagcgagaaaagactgcaagaggtaactctggagtcagagagaaataggatccaaatgagatctctgcagcaacaattttcccgaatggaagagactgtccgcaaccttttgcagagtcagggctcgcccgagcagaagaaagaagagaccgtcaacataatggtgtaccaggaaaaactcagcgaggaggagaggaaacataaagaagctctcgaggacttgcacatggttgtggatgaagactcccgaagtgagtcatctagcacggacgagggaaaggaaaaaacaaagctgctcctcgagcgcctcaaagcactagaggcggagaattccgccctggctctcgagaacgagaaccagagagaacagtatgaaaggtgtttagatgaagtcgccaaccaggtggtccaggcactcctcacccaaaaagatctcagagaggaatgtgtgaagctgaagactagggtgtttgatttagagcaacagaaccgcactctcagtatactgtttcaacagagagtgcggcccacctctgacctgctgcttcagaagttgcatagtcgtcttctggacttgtcctcaggggatcttttgagtgaagtagaacgcaaccgctccctgactcagtcccgcaccgatgcagaggtgcacgaacatcagctgaatactaaatcggccctcaaatgccctggtttaggcgccgttattcctggccacctatgtcctagaaacagctacagctcctcttccgagctcagcctgtccagtacatgctccgagtattcatcgggcagtagctatacgtggcatgacggtaaaaacctcagaaagcggcagtctagccagaactgggacaagagactgagcatagactccagcctgccatctggattcgcctcccccacaaacgagctgccaccgacgcggattaaggagtctcacattctcgaggggctccgcaaattgcagaaaaggaaggtgttactcgaacctccaagtgtgattaccaaatggggctataaggactgcatgaacagcaatgagggaatttatagcccggggataaaatcatctagcctgaaggagtatccaccctgcaagactgcggacttggggtccccgtgcaaggaaccacataagacttttgtttacgatctggattcccacgttgacgccgacgatgacccatccacattggccttactgcaggccgtacctaaccagagctgtaggccacacggctccaagctcacacactcagtctcagactcactatttggatgggagaccaatcgcaaacactttctggaaggaacaagcagcgtctaccctaaggaaagaccggagaaactgactagttgcgcttcgagctgtccactcgagatgaaattgtgccccagtgtccagacccctcaagtgcaacgagagaggggcccacagggacaaggtcatggtagaatggcactgaatcttcagctgtcagataccgatgacaatgaaactttcgacgagctgcatattgagagtagtgacgagaagtctccaagtgacgtgagcttagccgcagatacggataaatcagttgaaaacctggacgtgcttgtgggatttgggaaatccctctgcggcagtccagaggaagaagaaaaacaagtccctatccccagtgagaccagaccaaaaaccttttccttcatcaagcagcagcgggtggtgaaacggacaagttcagaagaatgcgttactgtgatcttcgacgctgaggacggagaaccaattgagttcagcagccatcagactggggttgttactgtcacacgcaacgaaatttctatcaatagcacgccagctgggcccaaggcagagcatacagaactcctgcctcagggtattgcctgcctgcagccaagggccgccgctcgggattacacattttttaaacgtagcgaggaggatacagaaaagaatattcctaaggataacgttgacaatgtaccgcgggttagcacagaaagcttcagttctcgcacagtaacccagaatcctcagcagcagaaattagtgaagccaacccataacatctcctgccagtcaaacagcagatcttccgcccccatggggatttaccaaaagcaaaatctcacaaaaataccccccaggggcaaaagttccccccagaaatccaaactcatggagcccgaggccaccaccctcctcccttcttccggcctcgtcacgctggagaaaagccccgccctggctcctgggaagctcagccggtttatgaaaaccgagtcttcaggacccctgtttgaactcaggtcggacccccatatccctaagcactccgcccagctcccccactcatcccggatgcctagtcggagagactgggtccagtgccccaaaagccagacacctggctcacgctcccgcccagcaatcgagagttctgattcgggcgagcctccaaccagggacgagcattgcggttcaggacctgaagccggcgttaagtcgcctagccctcccccacccccaggacgaagcgtttctttgttggctcggccctcctatgattacagtcccgcaccttcatctactaagtctgagactagggtaccctctgagactgcgagaacaccatttaagagtccccttctcaaggggatatccgcaccagtaatttcgtccaatcctgctaccaccgaggtccagcgcaagaagccgagtgtcgccttcaaaaaaccaatcttcacccatccaatgccaagtccagaagccgtcattcaaactcggtgcccagctcacgcaccgtccagcagctttacagtaatggctttgggccctccgaaagtttcaccaaaacgtggggtgccgaagacttctccaaggcagaccctgggaactccacagagggatatcggcctgcagacccctcggatcagcccttcgacacatgagccgcttgagatgaccagcagcaagagcgtttcacctggacgaaaggggcagctaaatgatagtgcaagtaccccccctaagccaagtttcctaggggttaatgagtctccatcaagtcaggtgtcttcgagctcctcctcgtcttcgcccgctaaaagtcataacagcccacacggatgccagtctgcgcatgaaaaaggcctgaagacaagactcccagtgggtctcaaagtactgatgaagtcccctcagcttctccgaaaaagctctaccgtgccaggcaaacacgagaaggattctctcaatgaggcctctaaaagttctgttgccgttaacaagagcaaacccgaggactccaagaatcctgccagtatggagataactgctggcgagcgcaacgtaactctgccggatagtcaagctcaggggtcactggcggatgggctccctctggagaccgcactccaggagcctctggaatcttcaatccctggctccgacggtcgggatggcgttgacaaccggtcaatgcgccggtctttgtcttcgtcaaagccccacttgaagcctgcacttggaatgaacggggcaaaggcgaggagccactctttctctacccattcaggagacaagccatccacacctccgattgaagggagtggcaaggtccgcacacaaatcatcactaatacagcggagagaggtaatagtttgactcggcaaaattcttcaacagaaagcagtccgaacaaggccccctctgcccccatgctggagagtttaccaagcgttggccggccgtccgggcatcctagcagtggaaagggatccctaggatcctcaggctctttctccagtcagcacggaagcccgtctaaactcccattacgcatacccccaaagagcgaaggcctgctgatcccaccagggaaagaggatcagcaggccttcactcaaggcgaatgtccaagcgcaaacgtagcggtgctcggagagccaggctctgacaggcgcagttgtccgccaacgccaacagattgcccagaggccctccagtcacctggcagaacccagcacccctctaccttcgagactagttccacgagcaaactagagacgtccggtaggcatcctgacgcctcagcgaccgctactgatgcagtgtcctcagaagcgccactctcgcctacaattgaggagaaagttatgttgtgcatacaggaaaacgttgagaaggggcaggtccagacaaagcctacctcagttgaggctaaacagaagccagggcccagcttcgccagttggtttggcttcagaaagtctcgtctgcctgctctctctagtcgcaagatggatatatccaagacaaaagtggagaagaaagacgctaaggttctagggttcggcaaccggcagctaaagtcagaacgtaaaaaagagaaaaaaaagccggagctccaatgcgagaccgaaaacgagctgataaaagataccaaaagcgccgacaatcccgacggtgggctgcagagtaagaacaataggcgcacccctcaagatatctataatcagcttaaaatcgagcctaggaatagacactctcctgttgcgtgctccactaaggatacctttatgaccgagctgctcaatcgggttgacaaaaaagccgctccccagacagagagtgggtcttccaatgcctcttgtagaaatgtcctgaaaggatctagtcagggttcctgtttaatcggcagttcaatctctacccaagggaaccataagaagaacatgaaaattaaggccgatatggaggttccgaaggactcgttggttaaagaggccaatgagaaccttcaggaggatgaagacgacgcggtcgctgattccgtctttcagtcccacatcatagagtcaaattgtcaaatgcgtactttggacagcggtataggaacatttccgctgcccgattccgggaaccggagcactggcaggtatctgtgccagcccgacagtccagaagacgccgagccgcttttaccattgcagagcgccctgtcggcagtgagcagtatgcgggcccagacactggaacgtgaggtgcctagttctactgacggccagagaccagcagacagtgccatagtgcattcaaccagcgatcctatcatgaccgcccgcggcatgcggcctctgcagtcacggctgcctaaacccgcgtcaagtggtaaggtgtctagccagaagcaaaatgaggccgaacccagaccccagacctgttcttctttcggttacgctgaggaccctatggctagtcagccactgcctgactggggttcggaagtggctgcgaccggtacgcaggataaggcccccagaatgtgtacttattccgcctccgggggctctaactcggattctgacctggattatggagacaacggatttggggccggacgggggcagttggtaaaggcactgaaaagcgccgctccggaaattgagactacatag

SEQ ID NO: 265307 - DNA, 5730 bp, Artificial Sequence
  derived and/or modified sequence
atggagggaaagagacagcttgagaaaagggactttggaaaaaggctgtctctagacagcagtcttgtggaatacatggactccaataaatacattgagcatctgctgactcagcttgaggagcaacacaggagtctctggagggagaagttggcagtggcccgactacagcgagaagttgcccaaagaacaagtgagggggccatgcatgagaagctgatacatgaactggaagaggagagacacttacgtcttcaaagcgagaagcggttgcaggaggtgaccctagagtctgaacgcaacagaattcagatgcgtagcttgcagcagcagttctccaggatggaagaaacagtacgaaatctattgcagagtcaaggatctccagagcagaaaaaagaagaaactgttaatataatggtctatcaggaaaagctgtcagaggaagagagaaaacataaggaagctttggaagatcttcacatggtggttgatgaggattcgaggagtgaaagcagcagtacagatgagggaaaagaaaagaccaaattgctattagagagattgaaagctctagaggcagagaattcagcgttggctttggagaatgaaaatcaaagggaacaatatgagcgatgtcttgatgaggtagccaaccaagttgttcaagctctgcttactcaaaaggatctaagagaggaatgtgtgaagttgaaaacaagagtgtttgatttggaacagcagaatcgaacactaagcatcctattccaacagcgagtcagacccacttctgatctgctcctccagaaacttcactcacgtctcttggatctttcatctggagatttgctttcagaggtggaaagaaaccgaagtctgacacagtcacgaactgatgctgaggtgcacgaacaccaactaaatacaaaatcggccttgaaatgccctggcttgggggctgtcatccctggtcatctctgtcctcgaaacagctacagtagcagcagtgaactgtctctttcaagcacctgcagcgagtactccagtggctcctcctacacgtggcacgatgggaagaacctcaggaaaaggcaatcatcacaaaactgggataaaaggctaagtattgattcttcgctcccaagtggctttgctagtcctacaaatgaactacctccaactcgtatcaaggaaagccacattttggaagggctaagaaagctacagaagcgaaaagtgttacttgaacccccatcagtgataaccaaatggggttataaagattgcatgaactcgaatgaaggaatatattctcctggaattaaaagtagcagcctcaaggagtatcccccctgcaaaacagctgacctggggagcccctgcaaggaaccccacaagacatttgtttatgatctagattcccacgttgatgcggacgatgacccttccaccttagcattgctccaagcagttccaaaccagagctgcaggccacatggcagtaaattaacccacagtgtttccgacagtctgtttggctgggagacaaacagaaaacactttctggaaggcacatcctcagtttatcccaaggaaaggcctgaaaagctgacaagttgcgccagcagctgtcccttagagatgaagctgtgcccaagtgtgcagacgcctcaggtacagagggagaggggcccacagggccaaggccatggccgcatggctctcaacctccagctttcagacactgatgacaatgaaacgtttgatgagctgcacatagagagcagtgatgagaaaagtccttcagacgtgtcattggctgccgacaccgataagtccgtggagaacctggatgtccttgtggggtttggaaaatctctatgtgggtctcctgaagaggaggaaaaacaagtgcccatcccttcagagactaggccaaagacttttagtttcattaagcagcaaagagttgtaaaaaggacttcttcagaagaatgtgtgactgtgatatttgatgcggaagacggtgagcccattgaattcagctctcaccagactggggttgtcactgttaccagaaatgagatttccatcaattcaactcctgctggacccaaggcagaacatactgagcttttacctcagggaattgcttgtttacagccaagagctgctgcaagagactatactttctttaaaaggtctgaagaggacactgagaaaaacattccaaaagataatgtagataatgttcccagggtgtccactgaatctttcagctccaggacagtgacacaaaatcctcagcagcaaaagctggtcaaaccaacacacaatatatcatgccagagtaattccaggtcttcggcacccatgggcatctatcaaaagcaaaatctgacaaaaatacctcccaggggcaagtcttcacctcagaaatcaaaactaatggagcccgaagccaccacactactcccttcatctggcctggtgactcttgaaaaatcaccagccttagctcctgggaaactctcacgattcatgaagactgagagctcagggcccctctttgaattacgatcagatccacacattccaaaacattccgcccaacttccgcacagctccaggatgcccagcaggagggactgggtccagtgccccaagagtcagactccagggtcacggtcaaggcctgccattgagtctagtgacagtggagagccccccacgagggatgaacactgtggctctgggccggaggcaggggtgaaatccccttcccctccgccccctccaggcaggtccgtctccctgctggccaggcccagctatgactattcaccagcaccttcatccaccaagtccgaaaccagggtccccagtgaaacagcaaggaccccattcaaatccccgctgctgaaaggaatttctgctccagttatttcttctaatccggccacgacagaagtgcagaggaagaaaccttctgtggccttcaaaaagcctatcttcactcaccctatgccctccccagaagcagtcattcaaacccgatgccctgctcatgccccctccagctccttcaccgtaatggctctggggcctccaaaggtctctccgaagagaggtgtccccaaaacctctcctcgccaaacacttgggaccccacaaagggacataggattacagactcccaggatctctccttcaacccatgagccactggaaatgacgtcctccaaaagtgtatctccagggagaaaaggacaattgaatgatagcgcctccacaccccccaagccttccttcttaggggtaaatgagtcaccatcatctcaggtcagcagttcctcatcatcctcatcacccgccaaaagccataacagccctcatggttgtcaaagtgctcatgagaaaggactgaaaactcgccttccagtgggactcaaagtgctcatgaagtctccccagctgctcaggaaaagttccaccgtgccagggaaacatgaaaaagacagtttaaatgaagcctccaaaagttccgtggctgtgaacaagtctaagccagaggactccaagaatccagcaagcatggagatcacagcgggtgaaagaaatgtgaccctaccggattcacaagcacagggcagtttagctgatgggcttcccctggaaacagcactacaagagccattggaaagtagcatccctgggagtgatggaagggatggggtagataatagatccatgagaagatccctttcctccagcaaaccacacctaaaaccagctctgggtatgaatggcgccaaagcccgcagccacagcttcagtacacactcaggagacaagccttctacgccccccatcgaagggtcaggcaaagtccgcactcagatcattaccaataccgccgagagaggcaattctcttacccggcagaactcttccacggaaagctctcccaacaaggccccttctgctcccatgttggagagtctccccagtgttgggaggccctcggggcacccctcctccgggaagggctccctggggagctcaggcagcttcagcagtcagcatgggagcccaagtaagttgcctttgaggatccctccaaagtctgagggactcctcatcccacctggaaaggaagaccagcaggccttcacccagggagagtgccccagtgccaatgtggctgtacttggggaaccaggcagtgaccgccgcagttgcccacccaccccaacagactgccctgaagccctgcagagcccagggaggactcagcatccaagcacttttgaaacaagcagtacatccaagctagaaacttctggaaggcatccagatgcctctgcaaccgcgactgatgctgtgagttcagaagcccccctctcacccacaatcgaagaaaaggtcatgttgtgcattcaggaaaatgtggaaaagggccaagtgcaaacaaagcccacctctgtggaagcaaagcagaagcctgggccttcttttgccagctggtttggttttcggaagagtagacttccagctctgagtagcaggaaaatggacatctccaaaaccaaagtagaaaagaaagatgcaaaagtcttggggtttggaaacagacaactaaaatcagaaagaaaaaaagagaaaaagaagcctgaactacagtgtgagacagaaaatgagcttatcaaggacaccaagtcagcagataatccagatggcggtttacaaagcaaaaataatcggagaacaccacaagacatttacaaccaactgaagattgaaccaaggaatagacacagccctgttgcatgttcaacgaaagacaccttcatgacggaactcttgaacagagttgataagaaagcagctccacagacagaaagtggatcaagtaatgcttcctgcaggaatgtgttaaagggcagttctcagggctcctgtctcatcggcagctctatcagtactcaaggaaaccacaagaaaaacatgaaaatcaaagccgatatggaagtaccaaaagactccctggtaaaagaggcaaatgaaaacttgcaagaggatgaagacgatgcagttgcagattctgtatttcagagccacatcatagaatccaactgccagatgagaacattggacagtgggatcggaacctttccactcccagactcgggaaatcgctcgacaggacgctacctatgccagccagactccccagaggacgctgagcctctcctgcctctccagtcagccctttctgcagtttcttccatgagagcccaaacccttgaacgtgaagtgccttcctccacagacggccagcgccctgcagatagcgccattgttcattccacatccgaccccatcatgaccgccagagggatgaggcctcttcagagccgcctccccaaaccagcttcctcaggaaaagtcagttcccaaaagcagaatgaagcagagccaaggcctcagacatgctcatcattcggatatgctgaagacccaatggcaagccagccgcttccagactgggggagtgaagttgctgccaccgggacccaggacaaggcacccagaatgtgtacgtactctgccagcggtggcagtaatagtgacagtgacctggactatggagataatggttttggagctggaaggggacagttagtgaaagcactgaagagcgctgccccagaaattgagacaacttga

SEQ ID NO: 265308 - DNA, 7592 bp, Artificial Sequence
  derived and/or modified sequence
gcaactacggagccgcagcccagggagcaagtctccgcaaacttgctccgcattcacggcaggacttcccagccgctgtggatgttcaggaaaaccgagtctgttctgttagcgtggcctttgaatgcttcaaaaataaacagaggataaccaaccgcgggaggaaatttttagctggagagagttgtagttcctgtgtctgtctccaggactgtgatatgtgttgactgaagagctaactacaagttcatcgtgaagaataaatgagataagctacctcaagtgcctgtaccaaaatagactcacaatacattgaccctggaaacagacgggggattcttataagtcacaaaagaaaataaataacttcatccatggagggaaagagacagcttgagaaaagggactttggaaaaaggctgtctctagacagcagtcttgtggaatacatggactccaataaatacattgagcatctgctgactcagcttgaggagcaacacaggagtctctggagggagaagttggcagtggcccgactacagcgagaagttgcccaaagaacaagtgagggggccatgcatgagaagctgatacatgaactggaagaggagagacacttacgtcttcaaagcgagaagcggttgcaggaggtgaccctagagtctgaacgcaacagaattcagatgcgtagcttgcagcagcagttctccaggatggaagaaacagtacgaaatctattgcagagtcaaggatctccagagcagaaaaaagaagaaactgttaatataatggtctatcaggaaaagctgtcagaggaagagagaaaacataaggaagctttggaagatcttcacatggtggttgatgaggattcgaggagtgaaagcagcagtacagatgagggaaaagaaaagaccaaattgctattagagagattgaaagctctagaggcagagaattcagcgttggctttggagaatgaaaatcaaagggaacaatatgagcgatgtcttgatgaggtagccaaccaagttgttcaagctctgcttactcaaaaggatctaagagaggaatgtgtgaagttgaaaacaagagtgtttgatttggaacagcagaatcgaacactaagcatcctattccaacagcgagtcagacccacttctgatctgctcctccagaaacttcactcacgtctcttggatctttcatctggagatttgctttcagaggtggaaagaaaccgaagtctgacacagtcacgaactgatgctgaggtgcacgaacaccaactaaatacaaaatcggccttgaaatgccctggcttgggggctgtcatccctggtcatctctgtcctcgaaacagctacagtagcagcagtgaactgtctctttcaagcacctgcagcgagtactccagtggctcctcctacacgtggcacgatgggaagaacctcaggaaaaggcaatcatcacaaaactgggataaaaggctaagtattgattcttcgctcccaagtggctttgctagtcctacaaatgaactacctccaactcgtatcaaggaaagccacattttggaagggctaagaaagctacagaagcgaaaagtgttacttgaacccccatcagtgataaccaaatggggttataaagattgcatgaactcgaatgaaggaatatattctcctggaattaaaagtagcagcctcaaggagtatcccccctgcaaaacagctgacctggggagcccctgcaaggaaccccacaagacatttgtttatgatctagattcccacgttgatgcggacgatgacccttccaccttagcattgctccaagcagttccaaaccagagctgcaggccacatggcagtaaattaacccacagtgtttccgacagtctgtttggctgggagacaaacagaaaacactttctggaaggcacatcctcagtttatcccaaggaaaggcctgaaaagctgacaagttgcgccagcagctgtcccttagagatgaagctgtgcccaagtgtgcagacgcctcaggtacagagggagaggggcccacagggccaaggccatggccgcatggctctcaacctccagctttcagacactgatgacaatgaaacgtttgatgagctgcacatagagagcagtgatgagaaaagtccttcagacgtgtcattggctgccgacaccgataagtccgtggagaacctggatgtccttgtggggtttggaaaatctctatgtgggtctcctgaagaggaggaaaaacaagtgcccatcccttcagagactaggccaaagacttttagtttcattaagcagcaaagagttgtaaaaaggacttcttcagaagaatgtgtgactgtgatatttgatgcggaagacggtgagcccattgaattcagctctcaccagactggggttgtcactgttaccagaaatgagatttccatcaattcaactcctgctggacccaaggcagaacatactgagcttttacctcagggaattgcttgtttacagccaagagctgctgcaagagactatactttctttaaaaggtctgaagaggacactgagaaaaacattccaaaagataatgtagataatgttcccagggtgtccactgaatctttcagctccaggacagtgacacaaaatcctcagcagcaaaagctggtcaaaccaacacacaatatatcatgccagagtaattccaggtcttcggcacccatgggcatctatcaaaagcaaaatctgacaaaaatacctcccaggggcaagtcttcacctcagaaatcaaaactaatggagcccgaagccaccacactactcccttcatctggcctggtgactcttgaaaaatcaccagccttagctcctgggaaactctcacgattcatgaagactgagagctcagggcccctctttgaattacgatcagatccacacattccaaaacattccgcccaacttccgcacagctccaggatgcccagcaggagggactgggtccagtgccccaagagtcagactccagggtcacggtcaaggcctgccattgagtctagtgacagtggagagccccccacgagggatgaacactgtggctctgggccggaggcaggggtgaaatccccttcccctccgccccctccaggcaggtccgtctccctgctggccaggcccagctatgactattcaccagcaccttcatccaccaagtccgaaaccagggtccccagtgaaacagcaaggaccccattcaaatccccgctgctgaaaggaatttctgctccagttatttcttctaatccggccacgacagaagtgcagaggaagaaaccttctgtggccttcaaaaagcctatcttcactcaccctatgccctccccagaagcagtcattcaaacccgatgccctgctcatgccccctccagctccttcaccgtaatggctctggggcctccaaaggtctctccgaagagaggtgtccccaaaacctctcctcgccaaacacttgggaccccacaaagggacataggattacagactcccaggatctctccttcaacccatgagccactggaaatgacgtcctccaaaagtgtatctccagggagaaaaggacaattgaatgatagcgcctccacaccccccaagccttccttcttaggggtaaatgagtcaccatcatctcaggtcagcagttcctcatcatcctcatcacccgccaaaagccataacagccctcatggttgtcaaagtgctcatgagaaaggactgaaaactcgccttccagtgggactcaaagtgctcatgaagtctccccagctgctcaggaaaagttccaccgtgccagggaaacatgaaaaagacagtttaaatgaagcctccaaaagttccgtggctgtgaacaagtctaagccagaggactccaagaatccagcaagcatggagatcacagcgggtgaaagaaatgtgaccctaccggattcacaagcacagggcagtttagctgatgggcttcccctggaaacagcactacaagagccattggaaagtagcatccctgggagtgatggaagggatggggtagataatagatccatgagaagatccctttcctccagcaaaccacacctaaaaccagctctgggtatgaatggcgccaaagcccgcagccacagcttcagtacacactcaggagacaagccttctacgccccccatcgaagggtcaggcaaagtccgcactcagatcattaccaataccgccgagagaggcaattctcttacccggcagaactcttccacggaaagctctcccaacaaggccccttctgctcccatgttggagagtctccccagtgttgggaggccctcggggcacccctcctccgggaagggctccctggggagctcaggcagcttcagcagtcagcatgggagcccaagtaagttgcctttgaggatccctccaaagtctgagggactcctcatcccacctggaaaggaagaccagcaggccttcacccagggagagtgccccagtgccaatgtggctgtacttggggaaccaggcagtgaccgccgcagttgcccacccaccccaacagactgccctgaagccctgcagagcccagggaggactcagcatccaagcacttttgaaacaagcagtacatccaagctagaaacttctggaaggcatccagatgcctctgcaaccgcgactgatgctgtgagttcagaagcccccctctcacccacaatcgaagaaaaggtcatgttgtgcattcaggaaaatgtggaaaagggccaagtgcaaacaaagcccacctctgtggaagcaaagcagaagcctgggccttcttttgccagctggtttggttttcggaagagtagacttccagctctgagtagcaggaaaatggacatctccaaaaccaaagtagaaaagaaagatgcaaaagtcttggggtttggaaacagacaactaaaatcagaaagaaaaaaagagaaaaagaagcctgaactacagtgtgagacagaaaatgagcttatcaaggacaccaagtcagcagataatccagatggcggtttacaaagcaaaaataatcggagaacaccacaagacatttacaaccaactgaagattgaaccaaggaatagacacagccctgttgcatgttcaacgaaagacaccttcatgacggaactcttgaacagagttgataagaaagcagctccacagacagaaagtggatcaagtaatgcttcctgcaggaatgtgttaaagggcagttctcagggctcctgtctcatcggcagctctatcagtactcaaggaaaccacaagaaaaacatgaaaatcaaagccgatatggaagtaccaaaagactccctggtaaaagaggcaaatgaaaacttgcaagaggatgaagacgatgcagttgcagattctgtatttcagagccacatcatagaatccaactgccagatgagaacattggacagtgggatcggaacctttccactcccagactcgggaaatcgctcgacaggacgctacctatgccagccagactccccagaggacgctgagcctctcctgcctctccagtcagccctttctgcagtttcttccatgagagcccaaacccttgaacgtgaagtgccttcctccacagacggccagcgccctgcagatagcgccattgttcattccacatccgaccccatcatgaccgccagagggatgaggcctcttcagagccgcctccccaaaccagcttcctcaggaaaagtcagttcccaaaagcagaatgaagcagagccaaggcctcagacatgctcatcattcggatatgctgaagacccaatggcaagccagccgcttccagactgggggagtgaagttgctgccaccgggacccaggacaaggcacccagaatgtgtacgtactctgccagcggtggcagtaatagtgacagtgacctggactatggagataatggttttggagctggaaggggacagttagtgaaagcactgaagagcgctgccccagaaattgagacaacttgaagaaacaaaagacgatcccgagaatagattatcgaaaatttccctagagtcattcaataaatttaacagcaatactgtgattttattagaaaaagagaagaactctctgaacaaggttgaaggacagaaggaagaaaaagaaaaaaatgaagagacatctttgagtagttcagataggcctggggtagacaacttggaatctttgagtgattctttatatgatagcttctcttcctgtgccagtcaaggttcaaatgatgtataaaggacatctcttcccttagtgagctgggactggagcgcttaagaaatgatgggtggggggtggggggtgcaccgcttgatagagataacaataaactattgcagtaccagagccttccttgtcaaattcacagcaggcaacccaccagagcttatttctctgacagggcaataaagatagactccatttattgtgtttcaagaggattaagcgtaaacacatctatgatacagaatccttaattttgcactttttttgaatatttgtacagaagttgtaaattttttggaagagaaattatatttgtagcaaaaaaagacagcaataaatggaatcagtgccatgctcttgaaataatgtactaagtcttagaagttgatgataatatatattttttaaaatcccaactgaagtttttgtgaagttcgttgtcctggtcctcaaattgtttgtgggtacactctgtaaacctacaacagggcctgccaaaaaatcggagggttcctcctcatctccatctcacaaatctcaatttgatggaaatgttcattttagtgtaatttcagattcgttgccagagattcaggtgatagtaataagtgtcattctgcttctgctgaaaaatgaaaagggtcctgaagtgtggacactgattgggagtgtgacattgtatcagaaatgaccgaattctattcccaataccagtttttccttccagacatttctttagattgtcttttacttagtgcttctctatgatcctgaatattatttgatttttatcttcttgctctttttattaaaatctgggcactctaaaaatgaaaacaaatttctatttgcaatgttcacttttaaaaataaaattaatggtgctacgaagaattctttttaatatccttttttttctacaaagactgtttatatgtaaggataaattctattttaaaggttatgtgtattttttctagatgtgaactatttataattacttatgtacaggagcttgtaaactaggcccaatagaaatatttttaggatctatatggctactttagcacataattgtttctttaaagagtattgtatgatcagtgttatttggttaatttgtgcaatttgttttattttatcttaaatgaaaattatgtaaaatgtccttgtctttcagactttaaaaaatctttttgtttcctttctgaataaaagttatatcacatttg

SEQ ID NO: 265309 - DNA, 5729 bp, Artificial Sequence
  derived and/or modified sequence
atggagggaaagcgacaacttgagaaaagagattttggaaaaagattatctctggacagcagtttggtggagtatatggattctaacaaatatattgagcatttacttactcagctcgaggagcagcacaggagtctgtggagagagaaactggctgttgccaggcttcagcgcgaggtggcccagcggacaagtgaaggggcaatgcacgagaagctgatacatgagctggaggaggagcgtcatctgaggctacagagtgagaaaaggttacaggaagtgacactggaaagcgaaagaaatcggattcagatgcggtctctgcagcaacagttttcacggatggaagaaacggtgagaaacctgctccagtctcagggcagccctgagcagaagaaggaggaaactgtcaatattatggtctatcaggagaaattgagtgaggaggagagaaagcacaaggaagctctcgaggatttgcacatggttgtcgatgaggattctcgaagtgagtcttcttctaccgacgagggtaaagaaaagacaaaactattattggagaggcttaaagcccttgaagccgagaatagtgcactagccctcgaaaacgagaatcagcgggagcaatacgaaaggtgcctcgacgaagtcgcaaatcaggtggtccaggccctgctcacgcagaaggatcttcgggaggagtgtgttaagctgaaaacccgggtctttgatctcgagcagcagaatcgcactctctccatactctttcagcagagggtccggccaacttccgacttgctgctgcagaagctgcatagcagacttctggatctgagctcaggcgacctgctatctgaggttgaaaggaacaggagtctaacacaatcacgtaccgatgcagaggttcacgaacaccagctgaatacaaagtctgccctaaagtgccctggactgggcgctgtcatccccggacatctgtgtccacggaattcatattcatcaagcagtgaacttagccttagcagcacatgttccgaatattctagtggctcctcatacacatggcacgatggcaaaaacctgaggaagcgtcagtcttcccagaattgggataaaagattatccatcgattctagtctgccctcgggttttgcaagccctactaacgaactcccaccaacacgcattaaggaaagtcacatcttagagggactgcggaaactccagaagcgaaaggttctgctggagcctccctccgtgatcacaaagtgggggtataaggactgtatgaactcaaatgagggaatctatagtcccggaataaaaagtagctctctcaaagagtaccctccttgcaaaactgccgatctgggaagcccttgtaaagaaccccataagacattcgtgtacgaccttgactctcacgtggatgctgatgacgaccccagtactctggcccttctgcaagcagtacctaatcaatcatgccggccacacggaagtaaacttacccactccgtgagtgactccttgtttggttgggagacaaatcgcaaacactttctcgaaggaacctcttcagtgtacccaaaagagcgccctgagaagctgaccagctgtgcctcctcatgtcctttggagatgaagttatgcccatccgtgcagacaccacaggtgcaacgggagcgaggccctcaagggcaaggacatggtcgaatggcgctaaacctgcagttgtccgatacggacgacaacgaaaccttcgacgaattacatatcgagtcgtctgacgagaagtctccctccgatgtgtcactggcagccgataccgacaagagcgttgaaaacttggacgtcctcgtcggcttcgggaagtccctttgtgggtctcctgaagaggaggaaaagcaggtacctatccctagcgaaacaaggccgaagactttttcctttatcaagcaacagcgagtagtcaagcgcaccagttcagaggagtgtgtaacagtgattttcgatgcagaggatggcgaacccattgagttttcctcccatcaaacaggcgttgttacagtgacaaggaatgaaatctcaatcaactctactccggctggccctaaagctgaacacaccgaactgcttccgcaggggatcgcctgcctacaacccagggccgcagcacgtgattacacattcttcaagcggtcggaggaagacaccgagaagaatatccctaaggacaacgtcgacaacgtgcctcgggtcagtacagagtctttctccagccgcaccgtcacacaaaaccctcaacaacagaagctagtcaaaccaacccacaacatcagttgtcaaagtaattctcgaagcagcgctcccatggggatttatcagaaacaaaacctgaccaaaataccccctcggggtaagagctccccccaaaaatccaaacttatggaacctgaggccacgactttgctgcccagcagcggcctggtcaccttagagaagtcaccagcactcgcaccaggcaagctctcgagattcatgaaaaccgagtcaagcggaccactgttcgagctacgatctgacccacacatacctaaacacagtgcccaactgccccactcttccagaatgccctcacgaagggattgggttcagtgtcccaagtcccagactccgggaagcaggtcccgacccgctatcgagtctagtgacagtggcgagccccctactagggatgaacactgtggctccgggccagaagcaggcgtgaagagtcccagtccccctccacctccaggacgtagcgtcagccttctggcccgtccatcttatgattattctcccgcaccttcttcaactaagagcgaaacccgggttccgtctgaaacagccaggacacctttcaaatcgcctctgctcaagggcatttcggctccagtaatttctagtaaccccgcaacgaccgaagtacagaggaagaaaccatccgtcgcctttaaaaagccaatctttactcaccccatgccatctcctgaagctgtgattcaaaccagatgtccggctcacgctcctagctcctcctttacggttatggcccttggaccacccaaggtcagccctaaacggggtgtgccaaagacctcacccaggcagaccctgggcacccctcaacgcgatattgggttgcaaacaccccgtatttccccatctacacacgaacctttagagatgacctcaagcaagagcgtgtctcccggaaggaagggccagctcaacgactctgcgagtaccccaccaaagccttccttccttggggtgaacgagagtccaagttcccaagtatcatcatcctctagtagtagctccccagctaaatcccacaattcgcctcacggatgccagtctgcacacgaaaaggggcttaaaacaaggcttccagtgggcttgaaggttctgatgaagtcacctcagctgctgaggaaatcgagtacggtgccaggcaagcacgaaaaagattctctaaacgaagcttccaaatcctccgtggctgtgaacaaatccaaaccagaagattctaagaacccggcaagtatggagatcacagctggtgaaaggaatgtgaccctgcccgattcacaggcacaaggtagtttagccgatggcttgcccctcgaaactgcgttgcaggaaccattggaatcctccattcctggcagcgatggtagagacggcgtagataaccggagcatgagacggtcgctcagctcttcaaagccacacctgaaacccgctctcggaatgaatggagccaaagcgagatcgcatagcttctctacacactcaggcgacaagccatctaccccgccaattgaaggttcaggcaaggtgaggacccagattattacgaataccgctgaacgaggcaacagtctcacacgccagaactcatccacagaatcttcccccaacaaagcaccgtccgcaccaatgctggaatctttaccatctgtgggtcgaccaagcggccatccttccagcggaaaaggctccctgggtagttccggctcatttagctcgcagcacggatctcccagcaagctcccacttcgcattcctcctaaatctgaaggactgttgatacctccaggtaaggaagaccagcaagcctttactcagggggagtgcccatctgccaacgtcgctgtactaggcgagccaggtagtgacaggcgtagctgccctcccactccaacagattgcccagaggctctgcagtctcctggcaggactcaacatccttcaacctttgagactagctccacttccaaactggaaacaagtggaagacaccctgatgccagcgcgacagccactgacgcagttagtagcgaagcaccattgtccccaactatcgaagaaaaggtgatgctctgcatccaggaaaacgttgagaagggccaggttcaaaccaagcctacttcagtggaggcgaagcaaaaaccaggtcccagtttcgcaagttggtttggattcagaaagtctcgacttcctgcccttagttccaggaaaatggacatttctaaaacaaaggtcgagaaaaaggatgctaaggtacttggtttcggcaaccgtcagctgaagtctgagcggaaaaaagagaaaaagaaacccgaattgcagtgcgaaactgagaacgagttaattaaggatacaaagtccgctgataatccagatggcggtctccagagcaagaacaatagaagaacaccccaagatatctacaaccagttaaagatagaacctagaaatcggcacagccccgtggcgtgctccaccaaagacacttttatgaccgagttactgaacagggtggataaaaaggccgctccccagaccgagtctggaagcagcaacgcttcatgtcggaatgtgcttaaggggtccagtcagggctcatgtctgatcggatcatcaatcagcacacaggggaatcacaaaaagaacatgaagatcaaagcggatatggaggtgccaaaggatagtcttgtgaaggaggccaacgagaacttacaagaggacgaggatgacgcggtcgctgacagtgtgttccagtcgcacataatcgaaagcaattgtcaaatgcggacactggactccggcattggtacttttcctctgccagacagtggcaacaggtccacaggcaggtatttgtgccaaccagactcacctgaagacgctgagcctctgttaccgttgcagagtgcactgtccgccgtttcgtcgatgcgggcacaaaccctcgagcgagaggtgcccagcagcacggatgggcagcgacccgctgacagcgccattgtgcatagtacttccgatccgattatgacagcccgaggcatgagacctctccaaagcagactccctaagcccgcatccagcgggaaggtctcctctcagaagcagaatgaagccgagcctcgccctcagacatgctcttcctttgggtacgccgaggacccaatggcgtcccagcccctgcctgattggggaagtgaggtagcggcaaccggcacacaggataaggcgccaagaatgtgtacctactccgcctctggcggttctaatagcgacagtgacctggactatggcgacaacggctttggcgctggcagaggacagctggtcaaagccctgaagtctgcagcccctgagattgaaacaaccta

SEQ ID NO: 265310 - DNA, 5729 bp, Artificial Sequence
  derived and/or modified sequence
atggagggtaaacggcaactggaaaaacgcgactttggcaaaaggctgtcactggattcctccctggtcgaatatatggatagcaataagtacatcgaacaccttctgactcagcttgaggagcaacatcgttccttatggagagaaaaattagccgttgccaggttgcagcgggaagtagcacagcgcacatcagaaggcgcaatgcatgagaagttgatacacgagcttgaagaggaacgtcatctgcgtctccagtcggaaaaaagattgcaggaggtaaccctagagtccgaacggaacaggatccagatgaggtctctccagcagcaattttccaggatggaggagacagtacgcaacttgctccagagccagggctctcccgagcagaagaaggaagaaaccgttaacattatggtataccaggaaaagctcagtgaggaagagcgaaaacacaaggaagctctcgaggatcttcatatggtcgtggacgaggacagccgcagtgagtcctcgtctaccgacgaggggaaggagaagaccaagttgctcctcgaacgcctgaaggcactggaagcggaaaatagcgcgctggccctagaaaatgaaaatcagcgtgagcagtatgagcggtgcctggacgaagtcgcaaatcaggtagttcaagccctgcttactcagaaggacctgagagaggagtgcgttaaactcaaaacacgcgtctttgacctggagcagcagaacaggaccttgtccatattgtttcagcaaagagttcgacccacctctgacctcctactgcagaagctgcattcacgtctgctggacctctctagcggggatctgctctcggaggtcgaacgcaataggagtctgacccaatctaggacagacgctgaggttcacgagcatcagttgaacaccaagagtgctttaaagtgccccggattgggcgctgtaataccaggacatttgtgcccacgtaatagctatagttcatcatctgagctatccttgtctagcacctgtagtgagtatagtagtgggagctcttatacatggcacgatgggaagaatctgcgaaagcgtcagtccagccaaaactgggacaagcgcttaagcattgactcaagcttgcctagcggattcgcctcacctacaaatgagctgccccctacgaggattaaggagtctcacatcctcgagggtctgcgaaagctgcaaaaacgcaaggtgcttctcgaacctccttccgtgatcactaagtggggttacaaagactgtatgaattccaatgaggggatctactccccagggattaaaagcagcagcctgaaggaatacccaccctgtaaaacagctgacttggggtctccatgcaaggaaccccacaaaacttttgtgtatgacctcgattcccatgttgacgctgatgatgatccaagcactctggcccttctccaggccgtgccaaaccagtcgtgcagaccacacggcagcaagctgacacacagcgtttccgactctctcttcggttgggagaccaatcgtaaacacttcctggaggggactagcagtgtttaccccaaggaaaggcccgaaaagctgacaagttgcgcctctagctgtcccttggagatgaagttgtgcccttcggtccagaccccgcaagtgcagcgggagagaggtccccagggccaagggcatgggaggatggctttaaatctgcagctgtcggacacagatgacaacgaaacctttgatgaattacacatcgagtcttctgatgagaaaagtccatcggacgtatctttagccgctgataccgacaagtccgtggagaacctagatgtcctggtcggtttcggaaaatctttgtgtggctcacctgaggaggaggagaagcaggtcccaatcccctccgagactcggcctaagactttctcattcatcaaacagcaacgagtggtcaaaaggacgagcagcgaggagtgtgtcactgttattttcgatgcggaagacggcgaaccgatagagttctcctctcaccagaccggggtcgtcaccgtgacacgcaacgaaataagcattaattctacaccagccggacctaaggctgaacacaccgaactgctccctcagggcattgcttgtctgcaacccagggcagctgccagggattacacgttctttaagcggtctgaggaagatactgagaaaaacattcccaaagacaatgtcgacaatgtgcctagggttagtactgaatcgttttcttcccgcacagttactcagaacccccaacagcaaaagctggtcaagccgacacataacatttcctgtcagtccaactccagatcatctgcccctatgggcatttatcaaaagcagaatctgaccaaaattcctccacgcggaaagtcttcccctcaaaagagtaaactgatggaaccggaagctactactctgctcccaagctccggccttgtcacactcgagaagagccctgccctggccccaggaaaactctcacgctttatgaagactgaaagcagtgggccactattcgaattacgatctgaccctcatatcccaaaacatagcgcgcagcttccccacagctctcgcatgccttcgcgtcgcgactgggtgcagtgccccaaaagtcagacccccggaagcagatcccgtcctgccatcgagagctccgattcgggggagcctcccactagagatgagcactgtggatctggtccagaggcaggggtgaaatctccctcccccccacccccacccggaagaagtgtgagcctcttggcaaggccatcctatgactattcccctgctccctcttccactaaatcagaaaccagagtcccctccgagacagcccgtacgccttttaagagtccactcctgaagggaatctccgccccagtcattagctcaaatccagcgaccactgaagtgcagcgcaagaaaccaagtgtggcctttaaaaagccaatctttacccatccgatgccaagcccagaagctgtgattcaaacccggtgtccagcccacgccccttcctcaagtttcactgtaatggcactgggccctccgaaggtgagtcccaagcgtggggtgccaaagacaagccccaggcagaccctgggaacaccccagcgggacatcggtctccaaacccctcgtatctcgcccagtacacacgagcctctggaaatgaccagttctaaaagtgtcagtccaggcagaaaaggccaactcaacgattcggctagcacaccaccaaagccaagctttctcggtgttaatgaatctccttcaagccaagtgtctagcagttccagcagttctagcccggctaagagccacaattctccacatgggtgtcaaagcgctcatgagaaggggcttaaaacccggttacctgtgggactcaaggtcctcatgaaaagccctcagctgctgagaaagtcctcgacggtgcccggaaaacatgagaaggactctctgaatgaagcctcgaaaagtagcgtagctgtcaacaagtcgaaacctgaagacagcaagaatccggctagcatggaaataactgccggagagagaaacgttaccctaccggactcccaagcacaaggctctttagctgacggtcttccactggagaccgcgctccaggagcctctagagagcagcatcccgggttcggatggtagagacggggttgataacaggtccatgagacgctccctttcatcaagcaagccccatctgaaacccgcattgggaatgaacggcgctaaagctcgcagccatagcttctcaacccattcaggagataagccttcgactccgccaatcgaagggtccggcaaggtacgtacccagatcatcactaatacagctgaacgcggtaacagccttactcgtcaaaatagttcgaccgaaagcagtcccaacaaagccccttctgcccctatgctggagtcacttccgtccgtgggacgacctagtgggcacccgtcctcaggaaaaggcagcttgggctcgagtggctcttttagttcacagcatgggtctccctccaaattacccctccggatcccaccgaagagcgaaggattgcttatacctccaggcaaagaggaccagcaggcctttacccagggcgaatgcccgagtgccaacgtggccgtgttgggagaacccggatcagatcggcgaagctgcccacccactccgacggattgccctgaggctcttcaaagtccagggcgtactcagcatccatctacattcgagacatctagcacaagcaaattggagacctccggacgtcaccccgacgccagcgctacagcaacagatgcagtatcttcagaggctccactgagtccgacaatcgaggaaaaagttatgctgtgtatccaagagaacgtggaaaaagggcaggtgcaaacaaaacctacaagtgtagaagcaaagcagaaaccgggtccatcatttgccagctggtttggctttcggaaatcgcgactgccagctctgtccagtcggaagatggatatttctaagaccaaagttgagaaaaaggatgctaaagttttagggtttggtaatcggcagcttaagtccgagcggaagaaggagaagaagaagcctgaactgcaatgcgagactgaaaacgaactcattaaggataccaagtcggctgacaatccagacggcggacttcagtcaaagaacaacaggaggactccccaagatatctataaccaactgaagattgagcctagaaaccgccactctccagtcgcctgcagcaccaaagacacattcatgacggagttactcaatcgcgtcgacaagaaagctgctccacaaactgaatccggatccagtaatgcatcttgccggaatgtcttgaaaggcagctcccagggctcctgcctgattgggagcagtatatctacccaggggaaccataagaaaaacatgaagattaaagctgatatggaggtcccaaaagattcccttgtgaaggaggctaacgagaatcttcaagaggacgaagatgatgcagtggctgatagcgtttttcagagtcacattatcgaaagtaactgccagatgcgtactctcgattcaggaattggaacttttccattacccgactccggaaatagaagcacggggagatacttgtgtcaaccggacagtcccgaagatgccgagccccttctgccgctccagtcagctcttagtgccgtctcaagtatgcgagcccaaactcttgagagggaggtcccttcaagcaccgacggacagcgccctgctgactctgctatagttcactctaccagcgaccctatcatgaccgcacggggaatgagacccctgcaaagtagactcccgaagcctgcctcgtccggcaaggtaagctctcagaagcagaatgaagcagaacctcggccacagacttgtagtagcttcggatatgccgaagaccccatggcctctcagccactgcctgattggggtagcgaagtggcagccactgggacccaggacaaggctccaaggatgtgcacgtacagcgcctctggaggtagcaatagtgattctgatctcgactacggcgacaatggattcggcgctggcaggggtcagctggtcaaagcgctgaaatcggctgcgccagagatcgagacgaccta

SEQ ID NO: 265311 - protein, 347 aa, Artificial Sequence
  derived and/or modified sequence
MGDELAPCPVGTTAWPALIQLISKTPCMPQAASNTSLGLGDLRVPSSMLYWLFLPSSLLAAATLAVSPLLLVTILRNQRLRQEPHYLLPANILLSDLAYILLHMLISSSSLGGWELGRMACGILTDAVFAACTSTILSFTAIVLHTYLAVIHPLRYLSFMSHGAAWKAVALIWLVACCFPTFLIWLSKWQDAQLEEQGASYILPPSMGTQPGCGLLVIVTYTSILCVLFLCTALIANCFWRIYAEAKTSGIWGQGYSRARGTLLIHSVLITLYVSTGVVFSLDMVLTRYHHIDSGTHTWLLAANSEVLMMLPRAMLTYLYLLRYRQLLGMVRGHLPSRRHQAIFTIS

SEQ ID NO: 265312 - DNA, 1044 bp, Artificial Sequence
  derived and/or modified sequence
atgggcgacgagctggccccctgccccgtgggcaccaccgcctggcccgccctgatccagctgatcagcaagaccccctgcatgccccaggccgccagcaacaccagcctgggcctgggcgacctgagagtgcccagcagcatgctgtactggctgttcctgcccagcagcctgctggccgccgccaccctggccgtgagccccctgctgctggtgaccatcctgagaaaccagagactgagacaggagccccactacctgctgcccgccaacatcctgctgagcgacctggcctacatcctgctgcacatgctgatcagcagcagcagcctgggcggctgggagctgggcagaatggcctgcggcatcctgaccgacgccgtgttcgccgcctgcaccagcaccatcctgagcttcaccgccatcgtgctgcacacctacctggccgtgatccaccccctgagatacctgagcttcatgagccacggcgccgcctggaaggccgtggccctgatctggctggtggcctgctgcttccccaccttcctgatctggctgagcaagtggcaggacgcccagctggaggagcagggcgccagctacatcctgccccccagcatgggcacccagcccggctgcggcctgctggtgatcgtgacctacaccagcatcctgtgcgtgctgttcctgtgcaccgccctgatcgccaactgcttctggagaatctacgccgaggccaagaccagcggcatctggggccagggctacagcagagccagaggcaccctgctgatccacagcgtgctgatcaccctgtacgtgagcaccggcgtggtgttcagcctggacatggtgctgaccagataccaccacatcgacagcggcacccacacctggctgctggccgccaacagcgaggtgctgatgatgctgcccagagccatgctgacctacctgtacctgctgagatacagacagctgctgggcatggtgagaggccacctgcccagcagaagacaccaggccatcttcaccatcagctag

SEQ ID NO: 265313 - DNA, 1267 bp, Artificial Sequence
  derived and/or modified sequence
gacccctgtggggcagatcaacactcaaggcaggtgcagaatcaacaacctgtgacaaagccagccatccctgccaggaagcatgggggatgagctggcaccttgccctgtgggcactacagcttggccggccctgatccagctcatcagcaagacaccctgcatgccccaagcagccagcaacacttccttgggcctgggggacctcagggtgcccagctccatgctgtactggcttttccttccctcaagcctgctggctgcagccacactggctgtcagccccctgctgctggtgaccatcctgcggaaccaacggctgcgacaggagccccactacctgctcccggctaacatcctgctctcagacctggcctacattctcctccacatgctcatctcctccagcagcctgggtggctgggagctgggccgcatggcctgtggcattctcactgatgctgtcttcgccgcctgcaccagcaccatcctgtccttcaccgccattgtgctgcacacctacctggcagtcatccatccactgcgctacctctccttcatgtcccatggggctgcctggaaggcagtggccctcatctggctggtggcctgctgcttccccacattccttatttggctcagcaagtggcaggatgcccagctggaggagcaaggagcttcatacatcctaccaccaagcatgggcacccagccgggatgtggcctcctggtcattgttacctacacctccattctgtgcgttctgttcctctgcacagctctcattgccaactgtttctggaggatctatgcagaggccaagacttcaggcatctgggggcagggctattcccgggccaggggcaccctgctgatccactcagtgctgatcacattgtacgtgagcacaggggtggtgttctccctggacatggtgctgaccaggtaccaccacattgactctgggactcacacatggctcctggcagctaacagtgaggtactcatgatgcttccccgtgccatgctcacatacctgtacctgctccgctaccggcagctgttgggcatggtccggggccacctcccatccaggaggcaccaggccatctttaccatttcctagagttcttgagtccacagtctggcaagctgaggttaaaaatcatatgttgaatgcagcagtgtccacttatgactaacttcttagaacagcacaatataatagtggaattgggcctttcagaagacctcaactgatgatttt

SEQ ID NO: 265314 - DNA, 1044 bp, Artificial Sequence
  derived and/or modified sequence
atgggagacgaacttgccccctgcccagtaggcaccaccgcctggcctgcactcatccagttaatctccaagactccttgtatgcctcaggcagcatccaatacctccctcggcctgggcgacttgcgcgttccctcctctatgttatactggctttttctgccatcctcactgctcgcagctgctacacttgcggtaagccctctgctgctcgtgactattctgaggaatcagaggctgagacaggagcctcattacctgcttccggctaatatattattgtctgacctcgcatacatcctgctgcatatgctcatcagtagtagctcacttggtgggtgggagctcggccgcatggcatgcggcattttgaccgacgccgtgttcgcggcttgtacgtcaacaatcctgtctttcacggctatcgtgttacatacttatcttgccgttatccacccactgagatatctctcattcatgtcccacggtgccgcctggaaagccgtggctctgatttggctcgtggcttgttgctttccaaccttcctcatctggctgagcaaatggcaggatgcccagctggaggaacagggagcatcctatatcctacccccctccatggggacacaacctggctgcggactactcgtcatagtgacttacacgagtattctttgtgtgttattcctgtgcaccgctctgatagcgaattgtttctggcgcatatatgcggaggctaaaacctccggcatttgggggcaggggtattcgagggcgcggggtacgctgctgatacattcagtgctaattaccctgtatgtatccacaggtgttgtgttttcccttgatatggttttgactagatatcatcacattgactccgggacccacacgtggcttttggcggctaactcagaggtcctcatgatgctgccacgagcaatgctgacttacctgtacctgttacgctaccgacagctcctgggtatggtgaggggacacctgccgtctcgccgccaccaggcaatatttacaatcagctag

SEQ ID NO: 265315 - DNA, 1044 bp, Artificial Sequence
  derived and/or modified sequence
atgggagatgagctggccccctgccctgtgggcaccacagcctggccagccctgatccagctgatcagcaagaccccctgcatgccccaggccgccagcaacaccagcctgggcctgggggacctgcgggtgcccagctccatgctgtactggctgttcctgcccagcagcctgctggccgccgccaccctggccgtgagccccctgctgctggtgaccatcctgaggaaccagaggctgcggcaggagccccactacctgctgcctgccaacatcctgctgagtgacctggcctacatcctgctgcacatgctgatcagcagcagcagcctgggcggctgggagctgggccgcatggcctgtggcatcctgacagatgctgtgtttgctgcctgcaccagcaccatcctgtccttcaccgccatcgtgctgcacacctacctggccgtcatccaccccctgcgctacctgtccttcatgagccacggggccgcctggaaggctgtggccctgatctggctggtggcctgctgcttccccaccttcctgatctggctgagcaagtggcaggatgcccagctggaggagcagggcgccagctacatcctgccccccagcatgggcacccagcccggctgcggcctgctggtgattgtgacctacaccagcatcctgtgtgtgctcttcctgtgcacagccctgattgccaactgcttctggaggatctatgcagaggccaagaccagcggcatctggggccagggctacagccgggcccggggcaccctgctgatccacagcgtgctgatcaccctgtatgtgtccactggagtggtgttcagcctggacatggtgctgacccgctaccaccacatcgacagcggcacccacacctggctgctggccgccaacagcgaggtgctgatgatgctgccccgggccatgctgacctacctgtacctgctgcgctaccggcagctgctgggcatggtgcggggccacctgcccagccgccgccaccaggccatcttcaccatctcctag

SEQ ID NO: 265316 - DNA, 1044 bp, Artificial Sequence
  derived and/or modified sequence
atgggcgacgagctggccccctgccccgtgggcaccaccgcctggcctgcgcttatccagctgatctctaagacaccctgcatgccacaggctgcaagtaatacatctctgggccttggcgatctgagagtgccttccagcatgctgtactggctcttcctgcctagttccctgctggccgccgccacactggccgtctcaccgttgctgctggtgaccatcctgagaaaccagcgcctccgacaggaaccccactacttgctccccgccaatatactgcttagcgacctcgcctacattctgttgcacatgttaattagttcgagcagcctgggcggttgggaactaggaagaatggcatgcgggattctgactgatgccgtttttgcagcatgcaccagtacgatcctgtccttcaccgccatcgttctccacacataccttgccgtaatccatccgctacgttatctatcctttatgagccatggcgcggcctggaaggctgtggcgctgatctggctcgtggcttgctgttttcccacattcctgatatggctctccaagtggcaggacgcgcagctcgaagagcagggcgccagttatatcctgcccccatctatggggacccagcctggatgcggactgctggtgattgttacttacacgtctatactctgcgtattgtttctttgcacagccctcattgctaactgcttctggcgcatttacgctgaagccaagacctcgggcatatggggtcagggctattcaagggccaggggaacgttgctgatacatagtgtcttgatcacgttgtacgtatctaccggagttgttttttctctcgatatggttctgactagataccatcacatcgactccggtacccatacatggctgctggctgccaacagtgaagtcttaatgatgttgccacgcgcgatgctgacctacctctacttactccgctacaggcaactgctcggaatggtgcgaggccacctccctagtcgtcgccaccaggcgatttttacaatcagctag

SEQ ID NO: 265317 - DNA, 1044 bp, Artificial Sequence
  derived and/or modified sequence
atgggagacgaacttgcaccctgcccggtgggcactactgcatggcccgctctgattcagctcatcagcaaaacgccttgtatgccccaggctgctagcaatacatccttaggacttggcgacctgagggtaccaagttcaatgctgtattggctttttctgcctagctcactgcttgccgcagcaactctggctgtgtctccacttcttttagtgacaatcctacggaatcagcgactgcgccaggaaccccactacctgctccctgccaatatcctgctgtcggatctggcctatatcctgctgcacatgctcatcagctcgagctccctgggaggatgggaactcgggaggatggcctgcgggatcctaacagacgccgtattcgctgcatgcacctccacgatcctttcattcactgccatagtgctccacacctacctcgccgtcatccaccctctgagatatctctcctttatgagtcacggcgctgcatggaaggccgtggcgttgatctggttagtggcatgctgtttccccacttttttgatttggctgtctaaatggcaagatgcccaactggaggagcagggcgcatcctacattttgccgccaagcatgggtacccaacccggatgtggtctgttagtgatcgtcacctatacatcaatcctgtgcgtgcttttcctgtgtacagcactcatcgcgaactgtttttggaggatctacgccgaagccaaaacctctggaatttggggccaaggctattccagggccagaggaaccctgttgattcattccgtcctgattactctttatgtgtctacgggtgtggtttttagcctggatatggttctgacaaggtatcaccatattgattcaggcacacacacttggctcctggctgcaaattcagaggttctaatgatgttacccagggcgatgctcacgtatttatacctcttgcgctatcgccaattgctcggaatggtacgcggtcatctgccgagtcgtcgccaccaagccattttcactatcagttag

SEQ ID NO: 265318 - protein, 85 aa, Artificial Sequence [sequence omitted]

SEQ ID NO: 265319 - protein, 432 aa, Artificial Sequence
  derived and/or modified sequence
MAERTMAMPTQIPADGDTQKENNIRCLTTIGHFGFECLPNQLVSRSIRQGFTFNILCVGETGIGKSTLIDTLFNTNLKDNKSSHFYSNVGLQIQTYELQESNVQLKLTVVETVGYGDQIDKEASYQPIVDYIDAQFEAYLQEELKIKRSLFEYHDSRVHVCLYFISPTGHSLKSLDLLTMKNLDSKVNIIPLIAKADTISKNDLQTFKNKIMSELISNGIQIYQLPTDEETAAQANSSVSGLLPFAVVGSTDEVKVGKRMVRGRHYPWGVLQVENENHCDFVKLRDMLLCTNMENLKEKTHTQHYECYRYQKLQKMGFTDVGPNNQPVSFQEIFEAKRQEFYDQCQREEEELKQRFMQRVKEKEATFKEAEKELQDKFEHLKMIQQEEIRKLEEEKKQLEGEIIDFYKMKAASEALQTQLSTDTKKDKHRKK

SEQ ID NO: 265320 - DNA, 258 bp, Artificial Sequence
  derived and/or modified sequence
atgatccagcaggaggagatcagaaagctggaggaggagaagaagcagctggagggcgagatcatcgacttctacaagatgaaggccgccagcgaggccctgcagacccagctgagcaccgacaccaagaaggacaagcaccccgacccctacgagttcctgctgctgagaaagatcaagcaccccggcttcaacgaggagctgaccatcaccctgctgatcatccagaagcacgtggccggcctgagccacttctag

SEQ ID NO: 265321 - DNA, 258 bp, Artificial Sequence
  derived and/or modified sequence
atgattcagcaggaggagatccgcaagcttgaagaggagaaaaagcagctggaaggcgaaataattgatttctataaaatgaaggccgcttcagaagccctccagacccagctcagcactgataccaaaaaagacaagcacccggatccttacgaatttcttttactgcggaagatcaaacatcccggcttcaacgaagaactcacaattacactcctgatcattcaaaagcacgtcgccggcctttcacatttctag

SEQ ID NO: 265322 - DNA, 258 bp, Artificial Sequence
  derived and/or modified sequence
atgatccagcaggaggagatcaggaagctggaggaggagaagaagcagctggagggggagatcatcgacttctacaagatgaaggccgccagcgaggccctgcagacccagctgagcacagacaccaagaaggacaagcacccagacccctatgagttcctgctgctgaggaagatcaagcaccctggcttcaatgaggagctgaccatcaccctgctgatcatccagaagcacgtggccggcctgagccacttctag

SEQ ID NO: 265323 - DNA, 258 bp, Artificial Sequence
  derived and/or modified sequence
atgatccagcaggaggagatccggaagctggaggaggagaagaagcagctcgaaggagaaattatagacttctataagatgaaagctgcgtccgaggctctgcagactcaattgagtaccgacacaaagaaagataaacaccctgacccatacgagttcctgctcttacgtaaaatcaagcaccccggcttcaacgaggagctgaccatcacgctgttaatcatccaaaaacatgtcgccggattatcacacttctag

SEQ ID NO: 265324 - DNA, 258 bp, Artificial Sequence
  derived and/or modified sequence
atgattcagcaggaggagatacgcaagctcgaagaagaaaaaaagcagctggaaggagagattatcgatttctacaagatgaaggccgctagcgaggctctgcagacacaactgtccacagacacaaagaaagataaacatcccgatccctatgaatttctgttgcttcgcaagattaaacacccaggatttaacgaagagctcaccatcactctgctgattatccaaaagcacgtggccggtctctcccatttttag

SEQ ID NO: 265325 - DNA, 380 bp, Artificial Sequence
  derived and/or modified sequence
cagctgcaggacaagttcgagcatcttaaaatgattcaacaggaggagataaggaagctcgaggaagagaaaaaacaactggaaggagaaatcatagatttttataaaatgaaagctgcctctgaagcactgcagactcagctgagcaccgatacaaagaaagacaaacatcctgatccatatgaattcctcttgttaagaaaaataaagcatccaggattcaatgaagaactgactatcaccttgttaatcattcagaaacatgttgcaggcttaagccatttttgatatagatactgaaacaattacttgctaagagcaaacttgaaggtatggataaggccctgagtcatcttcctgagctgaatgatatttaagct

SEQ ID NO: 265326 - DNA, 1299 bp, Artificial Sequence
  derived and/or modified sequence
atggcagaaaggactatggcaatgcctacacagatcccggccgacggagacactcagaaagagaataatattagatgcctgaccaccatcggtcattttggtttcgagtgcttgccaaaccagctggtttctcgttcaatccggcaggggtttactttcaacattctgtgcgtgggagagacaggcatcggtaagtcaaccctgatcgacacactgttcaacaccaacttgaaggataataagtcgagtcacttctactctaacgtgggcctgcagatccaaacatacgaattgcaagaatctaatgtgcaactgaagctgacggtggtggagactgtcgggtatggagaccaaatcgataaagaggcctcgtaccagccaattgtggattacatcgatgctcagttcgaggcctacctgcaggaggagttgaaaattaagcgttctctgtttgagtaccacgattccagagtgcatgtctgcctgtatttcatttccccgactggacacagcttgaagtcattggatctcttaacaatgaaaaatctcgactctaaggtgaatataattcccctgattgcaaaggccgacactatatctaaaaacgacctgcagacttttaaaaacaaaatcatgtcagagcttatttcaaatgggattcagatctatcagctgcctacagatgaggaaacggccgcccaggctaactcatctgttagcggcctgcttccattcgccgtggtggggtcaaccgacgaagttaaggtgggtaaacgaatggttcggggaagacattatccttggggagtgttgcaggttgagaacgagaaccattgtgattttgtgaagttacgcgatatgctgctgtgtaccaacatggaaaatttgaaagaaaaaacccatacccagcactatgagtgctaccggtatcagaagctgcagaaaatgggttttactgacgtcggtccgaacaaccagccggttagtttccaggagatctttgaggccaaacgccaagaattctacgaccagtgtcagagagaagaagaagaattgaaacaaagatttatgcagagagtgaaagagaaggaggctaccttcaaggaggccgaaaaagagctgcaggataagtttgagcatctgaaaatgatacagcaggaggaaattcgtaagttggaggaggagaaaaagcagctcgaaggagaaataatcgacttctacaagatgaaggccgcctctgaggccctgcaaacacagctcagcaccgacactaagaaagacaaacacagaaagaagtag

SEQ ID NO: 265327 - DNA, 1299 bp, Artificial Sequence
  derived and/or modified sequence
atggccgagaggaccatggccatgcccacccagatcccagcagatggagacacccagaaggagaacaacatccgctgcctgaccaccatcggccactttggatttgagtgcctgcccaaccagctggtgagccgcagcatccggcagggcttcaccttcaacatcctgtgtgtgggggagactggaattggcaagagcaccctgattgacaccctcttcaacaccaacctgaaggacaacaagagcagccacttctacagcaatgtgggcctgcagatccagacctatgagctgcaggagagcaatgtgcagctgaagctgactgtggtggagaccgtgggctatggagaccagattgacaaggaggccagctaccagcccatcgtggactacattgatgcccagtttgaggcctacctgcaggaggagctgaagatcaagaggagcctgtttgagtaccatgacagccgggtgcacgtgtgcctgtacttcatcagccccaccggccacagcctgaagagcctggacctgctgaccatgaagaacctggacagcaaggtgaacatcatccccctgattgccaaggctgacaccatcagcaagaatgacctgcagaccttcaagaacaagatcatgtctgagctgatcagcaatggcatccagatctaccagctgcccacagatgaggagacagctgcccaggccaacagctctgtgtctggcctgctgccctttgctgtggtgggcagcacagatgaggtgaaggtgggcaagaggatggtgcggggccgccactacccctggggcgtgctgcaggtggagaatgaaaaccactgtgactttgtgaagctgcgggacatgctgctgtgcaccaacatggagaacctgaaggagaagacccacacccagcactatgagtgctaccgctaccagaagctgcagaagatgggcttcacagatgtgggccccaacaaccagcctgtgtccttccaggagatctttgaggccaagaggcaggagttctatgaccagtgccagcgggaggaggaggagctgaagcagcgcttcatgcagagggtgaaggagaaggaggccaccttcaaggaggccgagaaggagctgcaggacaagtttgagcacctgaagatgatccagcaggaggagatcaggaagctggaggaggagaagaagcagctggagggggagatcatcgacttctacaagatgaaggccgccagcgaggccctgcagacccagctgagcacagacaccaagaaggacaagcacaggaagaagtag

SEQ ID NO: 265328 - DNA, 1299 bp, Artificial Sequence
  derived and/or modified sequence
atggccgagcggaccatggccatgcccacccagatccccgccgacggcgatacacagaaggaaaataatatccgttgcctgacgacaatcgggcactttggctttgagtgcttgcctaatcaattggtgtcccgctctattcgtcagggtttcaccttcaatattctgtgcgtcggggagaccggcattggaaaatcaaccctgattgacacactctttaataccaacctcaaggacaacaagtcaagtcacttttactccaatgtcggcctgcaaattcaaacttacgaactacaggagtcaaatgtgcagttgaagctcactgtggttgaaacggtcggctatggggaccagattgacaaagaagcctcgtaccagcccatagttgattacatcgacgcacagtttgaagcatacctccaagaggaattgaaaattaagcggtctctgttcgagtaccatgattctagagtgcatgtgtgcctgtatttcatttctccgaccgggcacagtttaaagagccttgatctcctgactatgaagaacttagatagtaaagttaatatcatccctttgatcgcaaaggccgacactatttccaagaatgacctccagaccttcaagaacaagatcatgagcgaactgattagcaacggaatccaaatctaccagttgcccacagatgaagagactgccgcgcaggcaaacagctcagtgagcgggctactgccatttgccgtcgttggaagtacagacgaggtgaaggtcggcaagaggatggttagggggagacattacccgtggggagtgctgcaggttgaaaacgagaatcactgcgattttgtgaagctaagggatatgctgttgtgtacaaatatggaaaacctcaaggagaagacacatacccagcactacgagtgctaccgttatcagaaactacagaaaatgggctttacggatgtgggaccaaacaatcagcctgtgagttttcaagagatatttgaggctaagaggcaagaattttacgaccagtgtcagagagaggaggaggagctgaagcagaggttcatgcagcgggttaaagaaaaggaagccacgtttaaggaagccgaaaaagagctccaagacaaattcgaacacctgaaaatgattcagcaggaagagatcaggaagctagaagaggaaaaaaaacagttggagggtgaaataatcgatttttacaagatgaaggccgcctctgaagcactgcagacacagctcagcaccgatacaaaaaaggacaagcatagaaaaaaatag

SEQ ID NO: 265329 - DNA, 1299 bp, Artificial Sequence
  derived and/or modified sequence
atggcagagcgcactatggccatgcccacccagatccctgctgatggagatacccagaaggagaataatatcaggtgtcttaccactatcggccatttcgggtttgagtgcttgccaaaccagctggtctctagaagcatacgccaggggtttacttttaacattctctgtgtgggcgagacaggtattggtaaatctaccctaattgacacactttttaatacaaatcttaaggataacaagtcctcgcatttctatagcaatgtgggcctgcagattcagacctacgagctgcaggagtctaatgtacagctgaagctgacagtggtggaaactgtgggttatggtgaccagatcgacaaagaagcatcctaccagccaatagtcgattacattgacgcacagtttgaggcctacctacaggaagaattgaagattaagcgttccctatttgaatatcatgattcacgtgtgcacgtgtgcttgtactttatcagtcccacaggccatagcctgaagtccctcgatttactgacgatgaagaacttagactcaaaagtgaacattattccactcattgccaaggccgacactatatcaaaaaatgatctgcagaccttcaaaaataaaatcatgtctgaactgatcagcaacggcatccagatttatcagctcccgactgatgaggagacagctgctcaagccaactcgagcgtgtcaggcttacttcccttcgctgtcgtgggctccaccgacgaagttaaggttgggaaaagaatggtgcgcggacgccactatccatggggcgttttgcaggtagagaacgagaaccactgtgacttcgtaaaactcagagatatgctgttgtgcaccaacatggaaaatcttaaagaaaagactcatacccaacactatgagtgttacagataccagaagcttcagaagatgggatttacagatgtgggcccaaataatcaaccagtcagctttcaggagatcttcgaagccaagcggcaggaattttatgaccagtgccagagggaggaggaagaactgaagcagagattcatgcagagagttaaggagaaggaagctacctttaaagaggcagagaaagagttacaggacaaatttgaacaccttaaaatgatccagcaggaggaaatacgtaaactggaagaggagaagaagcaacttgagggtgaaatcatcgacttttacaagatgaaagccgcaagcgaagccttgcaaactcaattgagtactgacactaagaaggataagcatcggaagaagtag

SEQ ID NO: 265330 - DNA, 3785 bp, Artificial Sequence
  derived and/or modified sequence
acagtgaatatttatttggtccacaactggggacagtagaaaggacaccagcttggaatcagttcggacctgtgtctgctgcacagctgaatccctgggaaactcttttagtgtagcatggcagaaagaacaatggctatgcccacacaaatacctgctgatggagatacacaaaaagaaaataatattcgttgtttaactacgattggacattttggttttgaatgtttgcccaatcagttggtgagcagatctatccgacaaggattcacttttaatattctctgtgtgggggagactggaattggaaaatcgacactgatagacacattgtttaatactaacttgaaagataacaaatcctcacatttttactcaaatgttggacttcaaattcagacatatgaacttcaggaaagcaatgttcagttgaaattgactgttgtggagacagtagggtatggtgatcaaatagacaaagaagccagctaccaaccaatagttgactacatagatgcccaatttgaggcctatcttcaagaagaactgaagattaaacgttccttgtttgagtaccatgattctcgcgtccacgtgtgtctttacttcatttcacctacaggacattccctgaagtctcttgatctattaacaatgaagaaccttgacagtaaggtgaatattataccactgattgccaaagcagacactatttctaaaaatgatttacagacgtttaagaataagataatgagtgaattgattagcaatggcatccagatatatcagctcccaacagatgaagaaactgctgctcaagcgaactcctcagttagtgggctgttaccctttgctgtggtagggagtacagatgaagtgaaagttggaaaaaggatggtcagaggccgtcactacccttggggagttttgcaagtggaaaatgaaaatcactgtgacttcgttaagctccgagatatgcttctttgtaccaatatggaaaatctaaaagaaaaaacccacactcagcactatgaatgttataggtaccaaaaactgcagaaaatgggctttacagatgtgggtccaaacaaccagccagttagttttcaagaaatctttgaagccaaaagacaagagttctatgatcaatgtcagagggaagaagaagagttgaaacagagatttatgcagcgagtcaaggagaaagaagcaacatttaaagaagctgaaaaagagctgcaggacaagttcgagcatcttaaaatgattcaacaggaggagataaggaagctcgaggaagagaaaaaacaactggaaggagaaatcatagatttttataaaatgaaagctgcctccgaagcactgcagactcagctgagcaccgatacaaagaaagacaaacatcgtaagaaataatagtttctcttactattctgagagccctatcattctacatcgcaacttcctgtgagattgtctttgtagcatttaactctgaagttctcattttaaaaattggcttgcttattgtatattttccccaactaaagtgtgaactcctagcggggtgtggtggctcatgcctgtaatcccagcactttgggaggctgaggcgggtggaccacctgaggtcaggagttcaaaaccagcctgaccaaaatgatgaaaccctgcctctactaaaaatacaaaaattagctgggtttggtggccggtacctgtaatcccagccacttgggaggctgaggcaggagaatcacttgaaccccggaggtggaggttgcagtgagccaagatctcaccattgtactccagcctgggtgacaagagcaaaactccgcctcaaaaaaaaaaaaaaaaaaaaaagtatgaactcccagaaggcagatcctgtgtccctcttttcagattctgtatcttggcacttaggacgtacactaacacaaatatgactttcaatcaatatttgccaaaatgaaaaaacaaaagaaacacgtagcatcatgtaaaaggagctggttaggtggagaaatttatttaccatagtcctgcttttggatccagtagtgacttttaacttttatatccaaatagaagctggaggctttgttggggactcataggcataaaatgttaagttatacaaatctaattaataggcctattttcctttttaagttctactactgataatttcttgacagtttttatgataaaaggttggaatttgataagaactcccatgcttttgtgtcagacttaaaactgatattagaataaagaattcaaaagctagagaaagagttgcatttgaatgataatattatgtgttacagatttggggtatatgccaaagttatcaaagttgtagaaaataaggccaggtgtggtggctcacacctgtaatcccagcactttgggaggccgaggtgggcggatcacttgcggtcaggagcttgagaacagcccggccaacatgacgaaaccccatctctactaataatacaaaagttagccgggtgtggtgttgtgcacctgtagtccctgctactcggaaagctgaggcaggagaatcgcttgtagccaggaggcagaggttgtagtgagcagagattgcgccactgcactccagcctgggtgacagagcgctgagtcaccacacctggtataagccactgtgcctgacccacaatgacttttatacatattgttaaatcatcttacagattttataatttgggggaagaaaaattttactaaatgatcttttaatggaaactctacaagaaccagaatctttgctttgttcacttatgtatccattcctaggcctagaaaaatgtctgacgcatagcagcaattattcattgaataaatggacccagcaatagtacattagctatgccatatgcatacattaaaaatgtagattattgactttcaaaagataattaatgtaacttcttactgcttctgaacatgtttgtgagttatattgctgagggacctttatcttctcattctttcatcttaatccaatgttattaaaactgaaactgaaatcaccaatattattccatatttaaaaataacatctaccttataaaaattatcattgtgctgcatttgagaatagactttttaggtaataatggtataatccatagggtttttgagggcacagaaggattcatgctaacagaacattttattttctattttccaagagctataaaacatgatattatatgatactataaggcatatttttattttccataattttttctaaaaaaaattagtgttggttttccatataacttttaactttataagtaaatatttgtctctttcagctccagtttcatgtgaaatagagtttccagatttatgtagcatggaaagttttaatacgtcagttactgatttttgccagtcattttctcaattatttacttcttttatctttagttgattttttttgtagtgacaagttttgtttctattctcatttccttttgtgtatattctatgtagatttcgtttttggttactatgaaaattacatataacatcctggagttataacattctgatttgaatttatttcaacttaacttcaatcacataccaaaattctactgctatataggtctactctttttaggttattgatgtaacaaattgtatctttattcattgtacaccacctaacagatttataattacattttatgcatttgtcttttaaatcctgtagaaaataaaaagcggagttacaaacc

SEQ ID NO: 265331 - DNA, 1299 bp, Artificial Sequence
  derived and/or modified sequence
atggccgagagaaccatggccatgcccacccagatccccgccgacggcgacacccagaaggagaacaacatcagatgcctgaccaccatcggccacttcggcttcgagtgcctgcccaaccagctggtgagcagaagcatcagacagggcttcaccttcaacatcctgtgcgtgggcgagaccggcatcggcaagagcaccctgatcgacaccctgttcaacaccaacctgaaggacaacaagagcagccacttctacagcaacgtgggcctgcagatccagacctacgagctgcaggagagcaacgtgcagctgaagctgaccgtggtggagaccgtgggctacggcgaccagatcgacaaggaggccagctaccagcccatcgtggactacatcgacgcccagttcgaggcctacctgcaggaggagctgaagatcaagagaagcctgttcgagtaccacgacagcagagtgcacgtgtgcctgtacttcatcagccccaccggccacagcctgaagagcctggacctgctgaccatgaagaacctggacagcaaggtgaacatcatccccctgatcgccaaggccgacaccatcagcaagaacgacctgcagaccttcaagaacaagatcatgagcgagctgatcagcaacggcatccagatctaccagctgcccaccgacgaggagaccgccgcccaggccaacagcagcgtgagcggcctgctgcccttcgccgtggtgggcagcaccgacgaggtgaaggtgggcaagagaatggtgagaggcagacactacccctggggcgtgctgcaggtggagaacgagaaccactgcgacttcgtgaagctgagagacatgctgctgtgcaccaacatggagaacctgaaggagaagacccacacccagcactacgagtgctacagataccagaagctgcagaagatgggcttcaccgacgtgggccccaacaaccagcccgtgagcttccaggagatcttcgaggccaagagacaggagttctacgaccagtgccagagagaggaggaggagctgaagcagagattcatgcagagagtgaaggagaaggaggccaccttcaaggaggccgagaaggagctgcaggacaagttcgagcacctgaagatgatccagcaggaggagatcagaaagctggaggaggagaagaagcagctggagggcgagatcatcgacttctacaagatgaaggccgccagcgaggccctgcagacccagctgagcaccgacaccaagaaggacaagcacagaaagaagtag

SEQ ID NO: 265332 - protein, 357 aa, Artificial Sequence
  derived and/or modified sequence
MLQQILHDMYIDPELLAELSDVQKHILFYKMREEQLRRWKERETWEALAQDEGLRPPKTKRAASDKHIQWLLGADGEVWVWIMGEGPGDKPYEEISEELIAERARLQAQREAEELWRQKEAEITKKFRDALANEKARILAEKWKVEMEDRKAAKVLEERIHEEFKRKEEEERKRGEEQIRLQEEQRAKELYWTLKQAQLHCQASEKEEREWEEQLRRSKAADEERSRRAQRARDEYRHHSLRAIQKGTVAGLSSMFRELGQSHEQEARLYHHLPDPGLPQPLALPVRTWERPLRPVSRDVIVRWFKEEQLPRRAGFERNTKFIAPWFHGGNYHCFRRRVTSGTLRTEGQPTRLPSVV

SEQ ID NO: 265333 - protein, 215 aa, Artificial Sequence
  derived and/or modified sequence
MLQQILHDMYIDPELLAELSDVQKHILFYKMREEQLRRWKERETWEALAQDEGLRPPKTKRASDKHIQWLLGADGEVWVWIMGEGPGDKPYEEISEELIAERARLQAQREAEELWRQKEAEITKKFRDALANEKARILAEKWKVEMEDRKAAKVLEERIHEEFKRKEEEERKRGEEQIRLQEEQRAKELYWTLKQAQLHCQASEKEEREWEEQCE

SEQ ID NO: 265334 - protein, 431 aa, Artificial Sequence
  derived and/or modified sequence
MLQQILHDMYIDPELLAELSDVQKHILFYKMREEQLRRWKERETWEALAQDEGLRPPKTKRASDKHIQWLLGADGEVWVWIMGEGPGDKPYEEISEELIAERARLQAQREAEELWRQKEAEITKKFRDALANEKARILAEKWKVEMEDRKAAKVLEERIHEEFKRKEEEERKRGEEQIRLQEEQRAKELYWTLKQAQLHCQASEKEEREWEEQLRRSKAADEERSRRAQRARDEYRHHSLRAIQKGTVAGLSSMFRELGQSHEQEARLYHHLPDPGLPQPLALPVRTWERPLRPVSRDVIVRWFKEEQLPRRAGFERNTKFIAPWFHGIISREDAEALLENMTEGAFLVRVSEKIWGYTLSYRLQKGFKHFLVDASGDFYSFLGVDPNRHATLTDLVDFHKEEIITVSGGELLQEPCGQRDSPPDYHLLFE

SEQ ID NO: 265335 - DNA, 1074 bp, Artificial Sequence
  derived and/or modified sequence
atgctgcagcagatcctgcacgacatgtacatcgaccccgagctgctggccgagctgagcgacgtgcagaagcacatcctgttctacaagatgagagaggagcagctgagaagatggaaggagagagagacctgggaggccctggcccaggacgagggcctgagaccccccaagaccaagagagccgccagcgacaagcacatccagtggctgctgggcgccgacggcgaggtgtgggtgtggatcatgggcgagggccccggcgacaagccctacgaggagatcagcgaggagctgatcgccgagagagccagactgcaggcccagagagaggccgaggagctgtggagacagaaggaggccgagatcaccaagaagttcagagacgccctggccaacgagaaggccagaatcctggccgagaagtggaaggtggagatggaggacagaaaggccgccaaggtgctggaggagagaatccacgaggagttcaagagaaaggaggaggaggagagaaagagaggcgaggagcagatcagactgcaggaggagcagagagccaaggagctgtactggaccctgaagcaggcccagctgcactgccaggccagcgagaaggaggagagagagtgggaggagcagctgagaagaagcaaggccgccgacgaggagagaagcagaagagcccagagagccagagacgagtacagacaccacagcctgagagccatccagaagggcaccgtggccggcctgagcagcatgttcagagagctgggccagagccacgagcaggaggccagactgtaccaccacctgcccgaccccggcctgccccagcccctggccctgcccgtgagaacctgggagagacccctgagacccgtgagcagagacgtgatcgtgagatggttcaaggaggagcagctgcccagaagagccggcttcgagagaaacaccaagttcatcgccccctggttccacggcggcaactaccactgcttcagaagaagagtgaccagcggcaccctgagaaccgagggccagcccaccagactgcccagcgtggtgtag

SEQ ID NO: 265336 - DNA, 648 bp, Artificial Sequence
  derived and/or modified sequence
atgctgcagcagatcctgcacgacatgtacatcgaccccgagctgctggccgagctgagcgacgtgcagaagcacatcctgttctacaagatgagagaggagcagctgagaagatggaaggagagagagacctgggaggccctggcccaggacgagggcctgagaccccccaagaccaagagagccagcgacaagcacatccagtggctgctgggcgccgacggcgaggtgtgggtgtggatcatgggcgagggccccggcgacaagccctacgaggagatcagcgaggagctgatcgccgagagagccagactgcaggcccagagagaggccgaggagctgtggagacagaaggaggccgagatcaccaagaagttcagagacgccctggccaacgagaaggccagaatcctggccgagaagtggaaggtggagatggaggacagaaaggccgccaaggtgctggaggagagaatccacgaggagttcaagagaaaggaggaggaggagagaaagagaggcgaggagcagatcagactgcaggaggagcagagagccaaggagctgtactggaccctgaagcaggcccagctgcactgccaggccagcgagaaggaggagagagagtgggaggagcagtgcgagtag

SEQ ID NO: 265337 - DNA, 1296 bp, Artificial Sequence
  derived and/or modified sequence
atgctgcagcagatcctgcacgacatgtacatcgaccccgagctgctggccgagctgagcgacgtgcagaagcacatcctgttctacaagatgagagaggagcagctgagaagatggaaggagagagagacctgggaggccctggcccaggacgagggcctgagaccccccaagaccaagagagccagcgacaagcacatccagtggctgctgggcgccgacggcgaggtgtgggtgtggatcatgggcgagggccccggcgacaagccctacgaggagatcagcgaggagctgatcgccgagagagccagactgcaggcccagagagaggccgaggagctgtggagacagaaggaggccgagatcaccaagaagttcagagacgccctggccaacgagaaggccagaatcctggccgagaagtggaaggtggagatggaggacagaaaggccgccaaggtgctggaggagagaatccacgaggagttcaagagaaaggaggaggaggagagaaagagaggcgaggagcagatcagactgcaggaggagcagagagccaaggagctgtactggaccctgaagcaggcccagctgcactgccaggccagcgagaaggaggagagagagtgggaggagcagctgagaagaagcaaggccgccgacgaggagagaagcagaagagcccagagagccagagacgagtacagacaccacagcctgagagccatccagaagggcaccgtggccggcctgagcagcatgttcagagagctgggccagagccacgagcaggaggccagactgtaccaccacctgcccgaccccggcctgccccagcccctggccctgcccgtgagaacctgggagagacccctgagacccgtgagcagagacgtgatcgtgagatggttcaaggaggagcagctgcccagaagagccggcttcgagagaaacaccaagttcatcgccccctggttccacggcatcatcagcagagaggacgccgaggccctgctggagaacatgaccgagggcgccttcctggtgagagtgagcgagaagatctggggctacaccctgagctacagactgcagaagggcttcaagcacttcctggtggacgccagcggcgacttctacagcttcctgggcgtggaccccaacagacacgccaccctgaccgacctggtggacttccacaaggaggagatcatcaccgtgagcggcggcgagctgctgcaggagccctgcggccagagagacagcccccccgactaccacctgctgttcgagtag

SEQ ID NO: 265338 - DNA, 1074 bp, Artificial Sequence
  derived and/or modified sequence
atgttgcagcaaatcctccacgacatgtacattgatccggaactactcgcagagctgagcgatgtgcagaagcacattctgttctataagatgcgcgaagaacagttaagaagatggaaagaaagagaaacatgggaggccctcgcccaagatgagggtctgcggccccctaagaccaaaagagctgcatccgataaacacattcaatggctactgggggccgacggagaggtgtgggtttggatcatgggcgaaggacccggtgacaagccttatgaagagatatccgaggaattgattgcagagcgagcccgcttacaggcacagagggaagcagaagagctttggagacaaaaagaagccgagataacaaaaaagtttcgcgacgccttggctaacgagaaggccaggattcttgccgagaagtggaaagtggaaatggaagatcgaaaggccgctaaagtattggaggaacggattcacgaagaattcaagcgcaaggaagaggaagaaagaaagcggggtgaggagcagattagactacaagaggaacaaagggctaaagagctctactggacgttaaaacaagctcagctgcattgtcaggccagtgaaaaagaggagcgggaatgggaggaacaactgagacgaagcaaagccgcggatgaggaacggagccgcagggcacaaagggctcgggacgagtaccgccatcattcacttcgcgctatccaaaaggggacagtggctgggctgagttccatgttcagggaactaggtcagagccatgagcaggaggcacgcctgtaccatcacttgccagaccccggcctgccccaacctctggcactgcctgtgcgcacctgggagagacctcttcggccagtatcaagggacgtgatcgtccgctggttcaaggaagagcaacttcctagaagggccggtttcgagaggaatactaagttcatcgcaccctggttccacgggggaaattaccactgtttccgccgccgggtgaccagcggcaccctgaggacagagggccagccaactagattgccgagtgtggtatag

SEQ ID NO: 265339 - DNA, 648 bp, Artificial Sequence
  derived and/or modified sequence
atgcttcagcagattctccatgacatgtatattgaccctgaactccttgcagagctcagtgatgtccagaagcacatcctgttttacaagatgagagaagagcaactgaggcgatggaaggagcgagaaacttgggaggccctggctcaggatgagggccttagacctcccaaaaccaaacgagctagcgacaagcacatccagtggctgctgggggccgatggagaagtgtgggtctggattatgggcgaaggaccaggagacaagccgtacgaagagatcagcgaggagctaatagccgagcgggcacgcctccaggcacagagagaggccgaggagctctggcggcagaaagaggctgaaatcactaaaaaattccgggatgccttagccaacgagaaagcaaggattttggctgagaagtggaaggtagaaatggaggatagaaaggctgccaaggtgttggaagagagaattcacgaagaattcaaacgaaaagaagaagaggaacgcaagaggggagaagaacagattagactgcaggaagagcagagagccaaggagctgtactggacacttaagcaggcccagctgcactgtcaggcctctgagaaggaagagagggagtgggaggaacaatgtgaatag

SEQ ID NO: 265340 - DNA, 1296 bp, Artificial Sequence
  derived and/or modified sequence
atgctccagcagatactgcatgacatgtacattgacccagaactcctggctgaactcagtgacgtgcagaagcatattctattttataaaatgagagaggagcagctcagacgatggaaagagcgcgagacctgggaggccctagcacaggatgagggccttcgtcccccgaagaccaagcgcgcatctgacaaacacattcagtggctccttggcgcagatggggaggtctgggtctggattatgggtgaaggacctggtgataaaccctacgaagaaatcagtgaagaactgatcgccgaacgagcaaggcttcaggctcagagggaggccgaagagctgtggagacagaaggaggctgagattacaaagaaattcagagatgcattagctaacgaaaaggccagaatccttgcagagaaatggaaagtcgagatggaggacagaaaggccgccaaggttctggaggaaagaatccatgaagagttcaaaagaaaggaggaagaggagaggaagcgcggcgaggaacagattagactgcaggaggagcaaagagctaaagaactgtactggaccctcaaacaggcacagcttcactgccaggcatcagaaaaagaggagagggaatgggaggagcagctgagacggtctaaagctgcggacgaggaacgatcacgcagggcgcagcgtgctcgggatgagtataggcaccatagcctacgcgccatccagaaagggaccgttgccggtctgtcatccatgtttagggaactggggcagagtcatgaacaggaagcacggctataccaccatctaccagaccccggattgccacagcccttagcccttcctgtgcggacttgggagaggcccctgcgaccagtgtcaagggacgtcatagtccgttggttcaaagaggaacagctaccacggagggccgggttcgaacgaaataccaagtttattgccccatggttccacggcattatcagccgggaagatgccgaggccttgttagaaaatatgacggagggcgccttcctggttagggtctctgagaagatctggggctacactctcagttaccgcttacagaagggttttaaacatttcctggtcgacgcttcaggggacttctactcatttctcggcgtggacccaaatagacatgctacactgactgatttggtggacttccataaagaagagattatcactgtgagcgggggtgagctcttgcaggaaccctgtggccagcgagactcaccccccgactaccacctcctgttcgaatag

SEQ ID NO: 265341 - DNA, 1074 bp, Artificial Sequence
  derived and/or modified sequence
atgctgcagcagatcctgcatgacatgtacattgatcctgagctgctggccgagctgagtgatgtgcagaagcacatcctcttctacaagatgagggaggagcagctgcggcgctggaaggagcgggagacctgggaggccctggcccaggatgagggcctgcggccccccaagaccaagagagctgccagtgacaagcacatccagtggctgctgggcgcagatggagaggtgtgggtgtggatcatgggagagggccctggggacaagccctatgaggagatcagcgaggagctgattgctgagcgggcccggctgcaggcccagcgggaggccgaggagctgtggaggcagaaggaggccgagatcaccaagaagttcagagatgccctggccaatgagaaggcccgcatcctggccgagaagtggaaggtggagatggaggacaggaaggccgccaaggtgctggaggagcgcatccacgaggagttcaagaggaaggaggaggaggagaggaagagaggagaggagcagatccggctgcaggaggagcagagggccaaggagctgtactggaccctgaagcaggcccagctgcactgccaggccagcgagaaggaggagcgggagtgggaggagcagctgcggcgcagcaaggctgctgatgaggagaggagcagaagagcccagagggccagagatgagtaccgccaccacagcctgcgggccatccagaagggcaccgtggccggcctgagctccatgttccgggagctgggccagagccatgagcaggaggcccggctgtaccaccacctgcctgaccccggcctgccccagcccctggccctgcctgtgaggacctgggagcggcccctgcggcctgtgtccagagatgtgattgtgcgctggttcaaggaggagcagctgccccggcgggccggctttgagaggaacaccaagttcatcgccccctggttccacggcggcaactaccactgcttcagaagaagagtgaccagcggcaccctgaggacagagggccagcccacccggctgcccagcgtggtgtag

SEQ ID NO: 265342 - DNA, 648 bp, Artificial Sequence
  derived and/or modified sequence
atgctgcagcagatcctgcatgacatgtacattgatcctgagctgctggccgagctgagtgatgtgcagaagcacatcctcttctacaagatgagggaggagcagctgcggcgctggaaggagcgggagacctgggaggccctggcccaggatgagggcctgcggccccccaagaccaagagggccagtgacaagcacatccagtggctgctgggcgcagatggagaggtgtgggtgtggatcatgggagagggccctggggacaagccctatgaggagatcagcgaggagctgattgctgagcgggcccggctgcaggcccagcgggaggccgaggagctgtggaggcagaaggaggccgagatcaccaagaagttcagagatgccctggccaatgagaaggcccgcatcctggccgagaagtggaaggtggagatggaggacaggaaggccgccaaggtgctggaggagcgcatccacgaggagttcaagaggaaggaggaggaggagaggaagagaggagaggagcagatccggctgcaggaggagcagagggccaaggagctgtactggaccctgaagcaggcccagctgcactgccaggccagcgagaaggaggagcgggagtgggaggagcagtgtgagtag

SEQ ID NO: 265343 - DNA, 1296 bp, Artificial Sequence
  derived and/or modified sequence
atgctgcagcagatcctgcatgacatgtacattgatcctgagctgctggccgagctgagtgatgtgcagaagcacatcctcttctacaagatgagggaggagcagctgcggcgctggaaggagcgggagacctgggaggccctggcccaggatgagggcctgcggccccccaagaccaagagggccagtgacaagcacatccagtggctgctgggcgcagatggagaggtgtgggtgtggatcatgggagagggccctggggacaagccctatgaggagatcagcgaggagctgattgctgagcgggcccggctgcaggcccagcgggaggccgaggagctgtggaggcagaaggaggccgagatcaccaagaagttcagagatgccctggccaatgagaaggcccgcatcctggccgagaagtggaaggtggagatggaggacaggaaggccgccaaggtgctggaggagcgcatccacgaggagttcaagaggaaggaggaggaggagaggaagagaggagaggagcagatccggctgcaggaggagcagagggccaaggagctgtactggaccctgaagcaggcccagctgcactgccaggccagcgagaaggaggagcgggagtgggaggagcagctgcggcgcagcaaggccgcagatgaggagaggagccggcgggcccagagggccagagatgagtaccgccaccacagcctgcgggccatccagaagggcaccgtggccggcctgagctccatgttccgggagctgggccagagccatgagcaggaggcccggctgtaccaccacctgcctgaccccggcctgccccagcccctggccctgcctgtgaggacctgggagcggcccctgcggcctgtgtccagagatgtgattgtgcgctggttcaaggaggagcagctgcccaggagagctggctttgaaagaaacaccaagttcatcgccccctggttccacggcatcatcagcagagaagatgctgaggccctgctggagaacatgacagaaggagccttcctggtgcgggtgtctgagaagatctggggctacaccctgagctaccgcctgcagaagggcttcaagcacttcctggtggatgccagcggggacttctacagcttcctgggcgtggaccccaacagacatgccaccctgacagacctggtggacttccacaaggaggagatcatcaccgtgtctggaggagagctgctgcaggagccctgtggccagagggacagccccccagactaccacctgctgtttgaatag

SEQ ID NO: 265344 - DNA, 1074 bp, Artificial Sequence
  derived and/or modified sequence
atgctgcagcagatcctgcacgacatgtacatcgaccccgagctgctggccgagctgagcgacgtccagaaacacatactcttctataaaatgcgggaggaacagctgaggagatggaaggaaagggaaacctgggaagctctggcccaagacgagggactcaggcccccaaagaccaaacgggcagctagtgacaagcatatccagtggctgcttggtgcggacggcgaagtgtgggtatggattatgggcgagggtcctggagacaagccctacgaagagatctctgaggagctgattgctgagcgcgctaggctgcaagcccagcgcgaggcggaggaactgtggaggcagaaggaagccgagatcacaaaaaagtttcgagacgccctggctaatgagaaagcccggattctagccgagaaatggaaagtcgaaatggaggaccgcaaagcagctaaggttctagaggagcgtattcacgaagaatttaagaggaaggaagaagaagagcgcaagcggggcgaggagcagattaggctgcaggaggaacagcgggcaaaggagctttactggacactcaaacaggcgcagctccactgtcaggccagcgaaaaggaggaaagagaatgggaagagcaattacgccgttcgaaggcagccgatgaggagcggtcccggcgtgctcaaagggcaagggacgagtaccgtcaccacagcctgcgcgccattcaaaaagggactgttgcaggactaagtagcatgttccgggagctggggcagagccacgagcaggaggctcgcctttatcatcatctccctgaccccggtctgccacaacctcttgctttaccagtccgtacctgggaacgacccctcagacctgtcagcagggatgtgatcgtgagatggttcaaagaggagcagctccctcgcagggccggttttgaacggaacaccaaattcatagcaccctggtttcacggaggcaattaccactgtttccggcgcagagtcacttcgggtactctccggaccgagggccaacccacccgcctgccttcagttgtctag

SEQ ID NO: 265345 - DNA, 648 bp, Artificial Sequence
  derived and/or modified sequence
atgctgcagcagatcctgcacgacatgtacatcgaccccgagctgctcgctgaactgagcgatgtgcagaaacacatactattttacaaaatgcgtgaggagcagcttaggcgctggaaagaacgcgaaacatgggaggctctggctcaagacgagggtcttcggcccccaaaaacgaaacgcgcctccgataagcacatccagtggctgttgggcgccgacggggaagtgtgggtttggatcatgggtgaggggcccggtgacaaaccatatgaagaaataagcgaagagttgattgctgaacgcgcaagactccaggcccaacgcgaagctgaagagctatggcgtcagaaagaagccgaaatcactaaaaaatttcgcgatgctctggctaatgagaaagctcgaattttagcggagaagtggaaagtcgaaatggaagacagaaaagccgctaaggtgctcgaggaacgcattcacgaggaatttaaaagaaaggaagaggaggaacggaagcggggcgaggaacaaataaggctccaagaagaacagagggccaaagaattgtactggaccttaaaacaagcacaactccactgtcaggcttcagaaaaggaagagagagagtgggaggaacagtgtgagtag

SEQ ID NO: 265346 - DNA, 1296 bp, Artificial Sequence
  derived and/or modified sequence
atgctgcagcagatcctgcacgacatgtacatcgaccccgagctgttggccgaattgtcagatgtgcagaaacacatcctgttttacaaaatgcgcgaggagcagctgagacggtggaaggagagagaaacctgggaggctctcgcccaggatgaggggctgcgcccccctaagacaaaacgcgcctccgacaaacacattcaatggctgctgggggcagatggtgaggtgtgggtgtggatcatgggagaggggcccggcgacaaaccctatgaagaaatctcagaagagttgatcgcggaaagggcacgtctccaggctcagcgggaagcagaagagctctggcgccagaaggaagcagaaattaccaaaaaattccgggacgccctcgctaatgagaaagcacggatcttagccgaaaaatggaaggttgagatggaggaccgaaaggccgcaaaggtgttggaagaaaggatccacgaagagtttaagagaaaggaggaggaggagaggaagagaggcgaggagcagatacgcctacaggaggagcagagggctaaagaactgtattggaccctgaaacaagcccagctgcactgccaagcgtccgaaaaggaggaaagagagtgggaggagcagctgcggaggagcaaggctgcagatgaagaacgctcaagacgcgctcagcgcgctagggatgagtacagacatcacagccttcgagccattcaaaagggcacggtggcgggattaagtagcatgtttagggagctcgggcagtcccacgagcaggaggctaggttgtatcaccacctgccagatcccggactgcctcaacccctggcactgccggtccggacctgggagcggccactccggccggttagccgcgatgtgatcgtcaggtggtttaaggaggaacagttgcctcggcgagccggctttgaacgcaacacaaagttcattgcaccgtggttccacgggattatttcccgagaggacgccgaagcgctgctcgagaatatgaccgaaggcgcattcttagttcgcgtgagcgaaaagatttggggttacactctatcctaccgattacagaaggggttcaaacatttccttgtcgatgcatctggagatttctactcttttctgggcgtggaccctaatagacacgccaccctaactgatttagttgacttccataaagaggaaataatcacagtcagtgggggggaacttttgcaggagccatgcgggcagcgtgattctccacctgactatcacctcctgtttgagtag

SEQ ID NO: 265347 - DNA, 1074 bp, Artificial Sequence
  derived and/or modified sequence
atgctgcaacagatcttgcatgacatgtacatcgaccctgaactgttagctgaactttccgacgtgcagaagcacattttgttctataagatgcgagaggagcagctccggcgatggaaggaacgcgagacatgggaggcactggcacaggacgaggggctgagacccccaaagaccaaaagggccgctagcgataagcacattcagtggctgttaggtgccgatggcgaggtttgggtgtggattatgggggaagggccaggagataagccttacgaggagatatctgaagagttgattgccgagagagcccgtcttcaggcccagcgcgaagctgaagaattgtggcgccaaaaggaggcagagattacgaagaagttccgcgatgccctggctaacgaaaaggcaagaattctggctgaaaaatggaaagtggagatggaggaccgtaaagccgctaaagtcctcgaagaacgcattcatgaggagttcaaaagaaaagaggaagaagaaaggaagaggggcgaagaacaaattcgccttcaggaagaacagcgtgccaaggaactgtattggaccctgaagcaggcccagctccactgtcaggcctccgagaaagaagaaagagagtgggaggagcagctgcgcagaagtaaggctgcggatgaggaacggagccgccgtgcccaaagagcgagggacgagtatcggcatcactctctgcgtgccatccagaagggcaccgtcgctgggctgagttcgatgttccgagagttagggcaatcccatgagcaggaagcgagattgtaccaccacctacccgacccaggtttgccccaacctcttgcactgcccgtgagaacatgggagcgcccacttcggccagtatcccgagatgttatcgtgcggtggttcaaggaggagcagctgcccaggcgtgccggatttgagcgcaacactaaattcattgcgccttggttccatggcggaaactatcattgctttaggaggcgagtgacttctggcactttgcgaaccgaggggcagccaactcggttgcctagcgtcgtgtag

SEQ ID NO: 265348 - DNA, 648 bp, Artificial Sequence
  derived and/or modified sequence
atgctccagcagatcctccacgatatgtatatcgatccggaactgctggcagagctgtctgatgtacagaagcatatcctcttttacaaaatgcgggaggaacagcttaggagatggaaagaacgtgagacttgggaagccctggcacaggatgagggactccgcccaccaaaaacaaagcgggcttccgacaagcacatacaatggctgctgggcgcagacggcgaggtttgggtttggattatgggagagggacctggagataagccatatgaggagatttcagaggagctgattgctgagcgggctcgactgcaggcacagcgggaggctgaggagctgtggagacagaaggaggccgaaattacaaaaaaattccgggatgctttggccaacgaaaaggcaagaatcctggccgagaagtggaaggtggagatggaagacagaaaagccgctaaagtgttggaagagagaatccatgaagagttcaagagaaaagaggaggaggagaggaagagaggtgaagaacagataagacttcaggaggaacaacgcgcaaaggagctttactggaccttaaagcaagcacagcttcattgccaggcgtctgagaaagaggagcgcgagtgggaggagcagtgcgagtag

SEQ ID NO: 265349 - DNA, 1296 bp, Artificial Sequence
  derived and/or modified sequence
atgctgcagcagatcctccatgatatgtacatagaccctgagctgctagccgaactgagcgatgtgcagaaacatattctcttttataagatgagggaagagcagctcagacggtggaaagaacgtgaaacatgggaagccctcgcccaggacgaaggcttaagacctcccaaaactaaaagggccagcgataagcacattcagtggttgctgggagcagatggcgaagtttgggtctggatcatgggcgaaggaccaggcgataagccttacgaagaaattagcgaagagctcatcgccgaacgggcacggttgcaggcccaaagagaggccgaagagttgtggcgacagaaagaggcagagattacgaagaagtttagggatgcactcgcaaacgaaaaagcacggattttggccgagaaatggaaggtggagatggaggatagaaaagcggcaaaagtcctggaggagcggatccacgaggaattcaaacggaaagaggaagaagagaggaagcgtggcgaggaacagatacgtctgcaagaagaacaacgagccaaggagctctattggacgctgaaacaggcccagttacattgtcaagcgtcagagaaggaagagagggaatgggaagagcagctccgcagaagtaaggccgcagacgaggagcggagccggagagcccagagagctcgcgacgagtatcgacaccactcccttcgtgctatacagaaagggacagtcgccggactctcttccatgttcagagagcttggccagagccatgagcaggaggcaagattgtaccatcacttacccgaccccggactgccccagccactggcgctgcctgtgcggacatgggagcgccctctgcgacccgtcagtagagacgtgatagtccggtggtttaaagaagaacagctgccaagacgcgcaggcttcgagcgcaacacgaagttcatagcgccatggtttcatgggattataagtcgcgaggacgcagaggccctcctggagaatatgaccgaaggtgctttcctggtgcgagtatccgagaaaatctggggctacacactgtcttacaggctgcagaaggggtttaagcacttcctcgttgacgcctccggagacttctacagcttcctaggggttgaccccaatcggcatgcaactctcaccgatctggttgattttcacaaggaggagattatcactgtgtctggtggggagctcttgcaagaaccgtgtggccaaagggactccccaccagactatcacctgttattcgagtag

SEQ ID NO: 265350 - DNA, 3983 bp, Artificial Sequence
  derived and/or modified sequence
actaacagatcactcgacacctaccagcccaggcagggctgggactgggcatttcctggctgagctggaggcttgggcccttcccattgtctcagaaccccaggtgatgccaagacatgggctctcctgggatgccgtgcttggtgacccaggagaaggactagattgctcctggtggttgctcccccttgcagagtcccacctgcccctttgggtcctgttgcctggcctcttttgctgtcctgggtagaggagatgagttcgtcgctggctgcaagctgaggccaactgacaatgctgcacagagaaggggcaccgagagtggccccggattgagcagtccgtagtgcagagcagcccctcgggcgttctgcctggccctgcttcccctgctggctgcccttctggtgcgtgcatcccaggtggcatcatgctgcagcagatcctgcacgacatgtacatcgaccccgagctccttgccgagctcagcgatgtgcagaagcacatcctcttctacaaaatgcgggaggagcagctgaggcgctggaaggagcgggagacttgggaggccctggcccaggacgagggtctcaggcctccaaagaccaagcgagcagcgagtgacaagcacatccaatggctcctaggggcagatggcgaggtctgggtctggatcatgggagaaggccctggtgacaagccctacgaagagatctctgaggagctgattgcagagagggcgcggctgcaggcacagagggaagctgaggagctctggagacagaaggaggcagagatcaccaagaagttccgggatgctctggccaatgagaaagcccggatcttggcggagaagtggaaagtggagatggaagaccgcaaggctgccaaagtcctggaggaacgcatccacgaggaattcaagaggaaagaggaagaggagaggaagcgaggagaagagcagattcgcctccaggaagagcagagggcgaaggagctctactggaccctgaagcaggctcagctgcattgccaagccagtgagaaagaggagcgagagtgggaagaacagttgcgccggtccaaggcggctgatgaggagaggagccgccgagcccagcgcgcccgggacgagtaccgacaccactcgctccgtgctatccagaagggcacggtcgctggcctcagctccatgttccgggagcttggccagagccatgagcaggaggcaagactctaccaccacctccccgacccgggtctgccgcagccccttgccctgccggtcaggacctgggagcgcccgctgcgcccagtctccagagatgtcatcgtccgctggtttaaggaggagcagctgcctcgccgagctggcttcgagaggaacaccaagttcatcgccccctggttccatggaggaaattatcactgtttcaggaggagagttacttcaggaaccctgcggacagagggacagcccaccagactaccatctgttgtttgaataatttttttccttatcaattggattcattttggtatcctgtttttgaactcagcttaagaacttctcatctcaaatcctatggccttctggaagatccaccactatccaaaggaaaaagtagattaatatgcctcaagggatatgacatctatggcatagggctactggtctcatcccagcgatcgggacagaaattgctaatagctcatgcaactctttcatgaagagcttagctatgaccttagaagacaaagcctgtttgtcatggctgccgtaaaccgagctcttacagtgcgtggaccatgttttaataatccaaaataattccagtgccgaaccctgaatttaacatatggtagacattcagtaaatgtttgttgaatgaatgcatgtcttctaaaagttttccaacacaaattagcagtggtttcttgtaaattatttcctactcgccactctataaaatcatggcaataatagaagattatgaaggatttctatggaggacataaatgctgcatctttcataatctccattatcaccctcattgatattatcattggaattatctaaggtgagccccagtttccagggcagctgattgacaccgtcctgccttccttatttaacctcttcttttgccactcgcctctatctttgaatcatattttggccttggttttgcaatggttttatgtcatcctacagatgtcttcaagacctggggtgagttatcaatgcaagaatggttcttagaaatctgatgaggcctctgctctctgggatgtggccctctctatgcaggttactccaatgattagctctgtcctcattgtccttttaattcccttgtcaacttaatctcagtatgttgcttatattaacaagaagactcacgcaataactcctcgataactctcagtgatggtatctgttggtgcatacttgtgttccacagttatggccatatacacagaggtagtatatgatgaagagaagattacagtctttacagtcaagaagacttgggttcatatcctaaccctggaacttactagcattataatgcttgcagcattgtgtttggtgagaggaaaagaatgaatggattctaggaatgttagggaacgatttactttacccgatggctgtatcaaacatctatgccccacttcttctcttgcctcacctattccttagattcttggtcacttctctaccacaagccaccagcactataaccagttttgcgtgggttctgctcttcctccctatgttgatcagtgtcatgtgagcataagccaatggtagcttgccacatgccccatctcccattgctgcagaggcataagacagaagagatgggaagtgaatgcccgatgtggtgaatctgggatgaatgggagtcataggctggtagatcgctttttcctccttcttcctcctggaggaactattctgagagtcatctgtttgtatggtcttgtagaagacagtcctgtaagatcgagcaaccagtcatgatgaaaccaagtggtggccggatcagtatgacaccctgctgcccccgtttttaattcttctctgccttgccctgctctctcctgttgctctgggattgcacttctgaatgaagtagcagctcataagcttttgccacaggctctgtcttttggggaatccaggataagaacccattatacagaagtgttcaataatatcaattttgcaactcactcagctccatggcttcccccggtctacctgtctcactacatgcataaagtgaaatgatggaaggaatctgctttctgaactctaatgtgccttcattgattatcattaaaattatcattaaaattgccttatttctatggactcagaggaatgatgttttagttttggctctctgatttaccaactatgtgactttgtccaagtcatttaacttcagtaaacctcggtatgactgaaaagggagttttctgtatggccgtcactaggtttttttgtgggttagttaaatgataaacatgaaagctctgtccaaatgaaaaaggtatttctaacaacaaccacaataacaataacaacttagtgcttagcccatgatgtatcaggggatatgatgtgatgattttcaaggtgttggaggcaacttctgttccaagaactcccagcagctttgaaagcagactgagatgagttgagaccctgaatccctgggctgttgttcctgtcacccctaattaatatgtgagagacaacagctgggttttccatccctaacacatttatttcattttatttggggcctgcaatttctgcatgtctcatatattttaggttttacctttttacctggctttaaaataaatcccttgtaagttgtcctgcaaatgaaattactgtctggaaaactgcaatttcatcttgagagttttattatgctaataaatgtcaggattctcatat

SEQ ID NO: 265351 - DNA, 953 bp, Artificial Sequence
  derived and/or modified sequence
cccctttgggtcctgttgcctggcctcttttgctgtcctgggtagaggagatgagttcgtcgctggctgcaagctgaggccaactgacaatgctgcacagagaaggggcaccgagagtggccccggattgagcagtccgtagtgcagagcagcccctcgggcgttctgcctggccctgcttcccctgctggctgcccttctggtgcgtgcatcccaggtggcatcatgctgcagcagatcctgcacgacatgtacatcgaccccgagctccttgccgagctcagcgatgtgcagaagcacatcctcttctacaaaatgcgggaggagcagctgaggcgctggaaggagcgggagacttgggaggccctggcccaggacgagggtctcaggcctccaaagaccaagcgagcgagtgacaagcacatccaatggctcctaggggcagatggcgaggtctgggtctggatcatgggagaaggccctggtgacaagccctacgaagagatctctgaggagctgattgcagagagggcgcggctgcaggcacagagggaagctgaggagctctggagacagaaggaggcagagatcaccaagaagttccgggatgctctggccaatgagaaagcccggatcttggcggagaagtggaaagtggagatggaagaccgcaaggctgccaaagtcctggaggaacgcatccacgaggaattcaagaggaaagaggaagaggagaggaagcgaggagaagagcagattcgcctccaggaagagcagagggcgaaggagctctactggaccctgaagcaggctcagctgcattgccaagccagtgagaaagaggagcgagagtgggaagaacagtgtgagtagagcttgtgcctcaggcagggagaccagtcccgcctccccacccacctcctcccaatgctgatgtactcattcgtcatttc

SEQ ID NO: 265352 - DNA, 1296 bp, Artificial Sequence
  derived and/or modified sequence
atgctgcagcagatcctgcacgacatgtacatcgaccccgagctccttgccgagctcagcgatgtgcagaagcacatcctcttctacaaaatgcgggaggagcagctgaggcgctggaaggagcgggagacttgggaggccctggcccaggacgagggtctcaggcctccaaagaccaagcgagcgagtgacaagcacatccaatggctcctaggggcagatggcgaggtctgggtctggatcatgggagaaggccctggtgacaagccctacgaagagatctctgaggagctgattgcagagagggcgcggctgcaggcacagagggaagctgaggagctctggagacagaaggaggcagagatcaccaagaagttccgggatgctctggccaatgagaaagcccggatcttggcggagaagtggaaagtggagatggaagaccgcaaggctgccaaagtcctggaggaacgcatccacgaggaattcaagaggaaagaggaagaggagaggaagcgaggagaagagcagattcgcctccaggaagagcagagggcgaaggagctctactggaccctgaagcaggctcagctgcattgccaagccagtgagaaagaggagcgagagtgggaagaacagttgcgccggtccaaggcggctgatgaggagaggagccgccgagcccagcgcgcccgggacgagtaccgacaccactcgctccgtgctatccagaagggcacggtcgctggcctcagctccatgttccgggagcttggccagagccatgagcaggaggcaagactctaccaccacctccccgacccgggtctgccgcagccccttgccctgccggtcaggacctgggagcgcccgctgcgcccagtctccagagatgtcatcgtccgctggtttaaggaggagcagctgcctcgccgagctggcttcgagaggaacaccaagttcatcgccccctggttccatggaattattagccgagaagatgcagaagctctcctggagaacatgactgagggagcattcctggtccgggtcagtgagaaaatctggggttacaccctctcctaccgcctgcagaaagggttcaaacactttcttgtggatgcttctggggatttttacagcttcctgggagtggaccccaatcgccatgcaacgctcacggatctcgttgatttccataaggaggaaattatcactgtttcaggaggagagttacttcaggaaccctgcggacagagggacagcccaccagactaccatctgttgtttgaataa

SEQ ID NO: 265353 - protein, 292 aa, Artificial Sequence
  derived and/or modified sequence
MGKPRQNPSTLVSTLCEAEPKGKLWVNGYAGTQGTRDATLQTRLIPLSFHLQRGKGLAAPLSALSAPRLPERPADGRVAVDAQPAARSMDSDSGEQSEGEPVTAAGPDVFSSKSLALQAQKKILSKIASKTVANMLIDDTSSEIFDELYKVTKEHTHNKKEAHKIMKDLIKVAIKIGILYRNNQFSQEELVIVEKFRKKLNQTAMTIVSFYEVEYTFDRNVLSNLLHECKDLVHELVQRHLTPRTHGRINHVFNHFADVEFLSTLYSLDGDCRPNLKRICEGINKLLDEKVL

SEQ ID NO: 265354 - DNA, 879 bp, Artificial Sequence
  derived and/or modified sequence
atgggcaagcccagacagaaccccagcaccctggtgagcaccctgtgcgaggccgagcccaagggcaagctgtgggtgaacggctacgccggcacccagggcaccagagacgccaccctgcagaccagactgatccccctgagcttccacctgcagagaggcaagggcctggccgcccccctgagcgccctgagcgcccccagactgcccgagagacccgccgacggcagagtggccgtggacgcccagcccgccgccagaagcatggacagcgacagcggcgagcagagcgagggcgagcccgtgaccgccgccggccccgacgtgttcagcagcaagagcctggccctgcaggcccagaagaagatcctgagcaagatcgccagcaagaccgtggccaacatgctgatcgacgacaccagcagcgagatcttcgacgagctgtacaaggtgaccaaggagcacacccacaacaagaaggaggcccacaagatcatgaaggacctgatcaaggtggccatcaagatcggcatcctgtacagaaacaaccagttcagccaggaggagctggtgatcgtggagaagttcagaaagaagctgaaccagaccgccatgaccatcgtgagcttctacgaggtggagtacaccttcgacagaaacgtgctgagcaacctgctgcacgagtgcaaggacctggtgcacgagctggtgcagagacacctgacccccagaacccacggcagaatcaaccacgtgttcaaccacttcgccgacgtggagttcctgagcaccctgtacagcctggacggcgactgcagacccaacctgaagagaatctgcgagggcatcaacaagctgctggacgagaaggtgctgtag

SEQ ID NO: 265355 - DNA, 879 bp, Artificial Sequence
  derived and/or modified sequence
atggggaagccccgtcaaaacccttctacattggtcagtactttatgcgaggccgaacccaagggcaaactatgggtgaatggctacgccgggacgcaggggaccagggatgcaaccttgcagaccagactcatcccactcagcttccaccttcagcgaggcaagggcctggcagcccctctgtcagccctcagtgctccaagactgcccgaaaggcccgctgacggtagggttgccgtggatgcccagccagccgcgcggagcatggattcagacagtggggagcagtcggagggggagcctgtgacggcggcgggacccgatgtcttcagtagcaaatcccttgctctccaggcccaaaaaaaaatcctgagtaaaatcgccagcaagaccgtggctaatatgctgatcgacgatacctcttctgagatcttcgacgagctctataaggtcaccaaggagcacacccacaacaagaaagaggcgcacaagatcatgaaagacctcatcaaggttgctatcaagatcggaattctttaccgtaacaaccagttcagccaggaggagctggtgattgttgaaaagtttcggaagaagctgaaccagaccgcaatgacaatcgtctccttttacgaggtcgaatataccttcgaccgcaatgtcctgtcaaacctcttgcatgagtgcaaagacctggtccatgagctggtgcagcgccacttgactccccgcactcatggaaggatcaaccacgttttcaaccatttcgctgacgtggaatttctgtccaccctatattccctagacggcgactgtcgcccgaatttgaagagaatttgcgaaggcatcaacaaactgcttgacgagaaagtgctctag

SEQ ID NO: 265356 - DNA, 879 bp, Artificial Sequence
  derived and/or modified sequence
atgggcaagccccggcagaaccccagcaccctggtgtccaccctgtgtgaggccgagcccaagggcaagctgtgggtgaatggctacgccggcacccagggcaccagagatgccaccctgcagaccaggctcatccccctgtccttccacctgcagaggggcaagggcctggccgcccccctgagcgccctgagcgccccccggctgcctgagaggcctgcagatggccgggtggccgtggatgcccagcctgctgcccgctccatggacagcgacagcggggagcagagcgagggggagcctgtgacagctgctggcccagatgtgttcagcagcaagagcctggccctgcaggcccagaagaagatcctgagcaagatcgccagcaagacagtggccaacatgctgattgatgacaccagcagcgagatctttgatgagctgtacaaggtgaccaaggagcacacccacaacaagaaggaggcccacaagatcatgaaggacctgatcaaggtggccatcaagattggcatcctgtacagaaacaaccagttcagccaggaggagctggtgattgtggagaagttcaggaagaagctgaaccagacagccatgaccatcgtgtccttctatgaggtggagtacacctttgacagaaatgtgctgagcaacctgctgcacgagtgcaaggacctggtgcatgagctggtgcagaggcacctgacccccaggacccacggccgcatcaaccacgtgttcaaccactttgctgatgtggagttcctgagcaccctgtacagcctggatggagactgccggcccaacctgaagaggatctgtgagggcatcaacaagctgctggatgagaaggtgctgtag

SEQ ID NO: 265357 - DNA, 879 bp, Artificial Sequence
  derived and/or modified sequence
atgggcaagccccggcagaaccccagcaccctggtgagcaccctgtgcgaagctgaaccaaaggggaagctatgggttaatggatatgcagggacacagggcacacgcgacgccaccctccagacaaggttaatccccctgtccttccacctccaacggggcaaaggtcttgcagcccctttgagcgcactctccgcaccgagactgccagagagacctgctgatggccgtgtcgctgttgacgcccaacctgcagcccgcagcatggattcagactcaggagagcaatctgaaggtgaacccgtcaccgcagcaggccccgatgtgtttagcagcaaaagcttggctctccaggcacagaagaagattttaagcaaaatcgccagtaagacagtcgcgaacatgctgatcgacgacacatcaagtgaaatttttgacgagttgtacaaggtgaccaaagagcacacacacaataaaaaggaggcgcacaagatcatgaaggacttaattaaggtagcaatcaagatcggaattctctaccgcaacaatcaattttcccaggaggagctcgtgattgttgaaaaatttagaaagaaactgaatcagactgccatgaccatcgtgagtttctacgaggtcgagtatacttttgatagaaatgttctgtcaaatttgctgcatgagtgtaaggatctcgtgcatgagctggttcagcgccatttgacaccacgaactcatggtagaatcaaccatgtctttaaccatttcgccgacgtggaattcctgtcaacattgtattcactagacggcgattgcaggcctaacttaaagagaatttgcgagggtatcaacaagctgctcgatgagaaggtgttgtag

SEQ ID NO: 265358 - DNA, 879 bp, Artificial Sequence
  derived and/or modified sequence
atggggaagccacgccagaacccctctacgctggtgtccaccttatgcgaggccgagcctaagggcaagctatgggtgaatggctacgctgggacccaaggtacgagggatgctactctgcaaacacgactgattcccctctcgtttcatctgcagaggggcaaaggcctggccgcaccactctcagccttatctgctcctcgcctaccagaacgcccagcagatggccgtgttgcagtagacgcccagcctgctgcccgatctatggatagcgattccggagagcagagtgagggtgaacctgttaccgctgccggtccagatgtttttagcagtaagagcctggccctacaagcccagaagaagattctgtccaagatcgcaagcaagaccgtagccaatatgctgattgatgacacatcctccgagatcttcgacgagctgtacaaggtgacaaaggaacacactcataataagaaagaggcccataaaattatgaaagatctgataaaggttgctatcaagattggaattctgtatcggaacaaccaatttagccaagaggagctcgtgatcgtggagaaatttaggaagaagctgaatcaaacagccatgacgatcgtcagtttctatgaagttgaatatactttcgatcggaatgtcctgtctaacctgctgcacgagtgcaaagacctggtgcatgaacttgtccagagacacctcacaccacggacacacggcagaatcaaccatgttttcaatcatttcgccgacgtggagttcctgtccactctgtactctttggatggcgattgtcggcctaacttgaaaagaatatgcgagggcatcaataagcttctggatgaaaaggtcctgtag

SEQ ID NO: 265359 - DNA, 2262 bp, Artificial Sequence
  derived and/or modified sequence
acttgctagtcttacctcaagtaatgggaaacgaccagacctcctaaagagtcagtgtgcaagttagggctactgtcccaagaaggacacctgagtccaaatggggaaaccacggcaaaacccaagcacactggtttccacactctgtgaggcagagccaaaggggaaactgtgggtcaacggatatgcagggacccaaggcacaagggatgccacgttacaaacaagactcatccccttatcttttcatcttcagaggggaaagggacttgccgccccgctgtccgccctgagtgcgccgcggctgcccgagcgccccgcagacgggcgggtggccgtggacgcccagccagcagcccgcagcatggattcggattccggggagcagagcgagggcgagcccgtgaccgccgcaggtcctgatgtttttagttcaaagagtcttgcgcttcaagcccagaagaagattctgagcaaaatagccagcaaaactgtggccaacatgttgattgatgacaccagcagcgagatctttgatgagctctacaaagtcaccaaagagcacacacacaacaagaaggaagcccacaagatcatgaaagacttaatcaaggtggcgatcaaaatcgggatcctctaccggaacaaccagtttagccaagaggagctggttattgtggagaagttccggaagaagctgaaccagaccgccatgaccattgtcagcttctatgaggtggaatacaccttcgataggaacgtgctctccaatctcctgcatgagtgcaaggacctggtgcatgaactggtgcagcggcacctgacgcccaggacccacgggcgcatcaaccacgtctttaaccactttgccgatgtggagttcctctccaccctctatagtctggatggagactgtaggcccaacctcaagaggatttgtgaaggaatcaataagttgctagatgagaaagtcctttaaatgccttccctcctactggactttgctgctttaaagttacagcactcaaccatgatctgggtgagaatcaagaacataagcagaaacccttgtcaaagatgtccatgttctttcctgttcatccctctgatgctgattctgatgctgaactgagctcaggtgtgtttttcttccaagctttctagcaaggtttctacttaaaatcacctgtgtgcaagcccaaaggacatttcatctattctaagcagaaaggctgttttgttcattacagtgagtgctgttcatctcatggagtgggaggagcactaaaccaggagacagaggacatggatttggtttccagcttaaccagttaggactctgtcctctgcattctggaaccatgatgcctgcctgcctgcctcacagggctgttgtgaggaccagatgagatgatgtatgttcatacttttggaatctctaatttaaagtcttaatattttgtcttctgagtgtgaggggataaacctggatgtagactattaagcagcataggagaaaagaacaatagaatctaatggactgggtttgcaatctctctctaaatgcactgcttcagacaaagtgaaatccaaaggtgtgaaaaagtatagctgcaaattggaaaaatgtgtttcaagagtcgtctttttggccaggcatggtggctcacacctgtaatcccagcactttgggaggccgaggtgggcagattgcctgaggtccggagttcaagatcagcctggccaacatgatgaaaccctatctctactaaaattacaaaaattagccaggcgtggtggtacacgcctgtaatcccagctactcaggaggctgaggcaggagaattgtttgaacctgggagatggaggctgcagtgagctgagatcacgccactgtactccagcctgggcaacagagcaagactctgtctctaaaaaataataataataataataatttttttaaaaagaggtgtttttgaggtcttagatgttcaggttgatgatcctgcagagggaaactttccatgggggggtggggagagagagttttccatccacaatatagaaacagagaagcactgtgctccctctgcaggaccagccttcccttatctaaggggcatggagctcagggaggctttattccatatgcacgggagaatcaggcagaatgaacccctacccatctttcttggcttttcagtcattttgtgctgttttctctggttcattaataaattgaaactgccctccaaacaa

SEQ ID NO: 265360 - protein, 551 aa, Artificial Sequence
  derived and/or modified sequence
MALRRLLLLLLLSLESLDLLPSVHGARGRAANRTLSAGGAAVGGRRAGGALARGGRELNGTARAPGIPEAGSRRGQPAAAVAAAASAAVTYETCWGYYDVSGQYDKEFECNNSESGYLYCCGTCYYRFCCKKRHEKLDQRQCTNYQSPVWVQTPSTKVVSPGPENKYDPEKDKTNFTVYITCGVIAFVIVAGVFAKVSYDKAHRPPREMNIHRALADILRQQGPIPIAHCERETISAIDTSPKENTPVRSSSKNHYTPVRTAKQTPGHYGKDAYRSGGPDLHNFISSGFVTLGRGHTKGDHQYNHPILSSVTQIPPHEKPRMNNILTSATEPYDLSFSRSFQNLAHLPPSYESAVKTNPSKYSSLKRLTDKEADEYYMRRRHLPDLAARGTLPLNVIQMSQQKPLPRERPRRPIRAMSQDRVLSPDRGLPDEFSMPYDRILSDEQLLSTERLHSQDPLLSPERTAFPEQSLSRAISHTDVFVSTPVLDRYRMSKMHSHPSASNNSYATLGQSQTAAKRHAFASRRHNTVEQLHYIPGHHTCYTASKTEVTV

SEQ ID NO: 265361 - DNA, 1656 bp, Artificial Sequence
  derived and/or modified sequence
atggccctgagaagactgctgctgctgctgctgctgagcctggagagcctggacctgctgcccagcgtgcacggcgccagaggcagagccgccaacagaaccctgagcgccggcggcgccgccgtgggcggcagaagagccggcggcgccctggccagaggcggcagagagctgaacggcaccgccagagcccccggcatccccgaggccggcagcagaagaggccagcccgccgccgccgtggccgccgccgccagcgccgccgtgacctacgagacctgctggggctactacgacgtgagcggccagtacgacaaggagttcgagtgcaacaacagcgagagcggctacctgtactgctgcggcacctgctactacagattctgctgcaagaagagacacgagaagctggaccagagacagtgcaccaactaccagagccccgtgtgggtgcagacccccagcaccaaggtggtgagccccggccccgagaacaagtacgaccccgagaaggacaagaccaacttcaccgtgtacatcacctgcggcgtgatcgccttcgtgatcgtggccggcgtgttcgccaaggtgagctacgacaaggcccacagaccccccagagagatgaacatccacagagccctggccgacatcctgagacagcagggccccatccccatcgcccactgcgagagagagaccatcagcgccatcgacaccagccccaaggagaacacccccgtgagaagcagcagcaagaaccactacacccccgtgagaaccgccaagcagacccccggccactacggcaaggacgcctacagaagcggcggccccgacctgcacaacttcatcagcagcggcttcgtgaccctgggcagaggccacaccaagggcgaccaccagtacaaccaccccatcctgagcagcgtgacccagatccccccccacgagaagcccagaatgaacaacatcctgaccagcgccaccgagccctacgacctgagcttcagcagaagcttccagaacctggcccacctgccccccagctacgagagcgccgtgaagaccaaccccagcaagtacagcagcctgaagagactgaccgacaaggaggccgacgagtactacatgagaagaagacacctgcccgacctggccgccagaggcaccctgcccctgaacgtgatccagatgagccagcagaagcccctgcccagagagagacccagaagacccatcagagccatgagccaggacagagtgctgagccccgacagaggcctgcccgacgagttcagcatgccctacgacagaatcctgagcgacgagcagctgctgagcaccgagagactgcacagccaggaccccctgctgagccccgagagaaccgccttccccgagcagagcctgagcagagccatcagccacaccgacgtgttcgtgagcacccccgtgctggacagatacagaatgagcaagatgcacagccaccccagcgccagcaacaacagctacgccaccctgggccagagccagaccgccgccaagagacacgccttcgccagcagaagacacaacaccgtggagcagctgcactacatccccggccaccacacctgctacaccgccagcaagaccgaggtgaccgtgtag

SEQ ID NO: 265362 - DNA, 1656 bp, Artificial Sequence
  derived and/or modified sequence
atggcactccgcagactgctgctgctgctgctactgtccctggaaagcctggacctcctccctagcgtccacggcgcgagagggcgggcggccaatagaaccttatccgctggcggagcagccgttggagggcgcagggcgggcggagctctagcacgcggaggcagagagctcaacggaactgctcgagctcccggcatccccgaagcgggatccagaagaggtcagcccgctgccgccgtcgcagccgccgcttccgccgccgtgacctacgagacctgctggggctattatgatgtctcaggacaatacgacaaagaattcgagtgtaacaacagtgagagtgggtatctgtactgctgtggcacatgttactatagattctgttgcaaaaagcggcatgaaaaattggaccagagacagtgtactaactaccagtctcccgtgtgggttcagaccccaagtactaaggttgtgtcccctggcccggagaacaagtacgatccagagaaggataagaccaactttaccgtctatatcacctgcggagtgattgcatttgtgatagttgctggcgttttcgccaaagtgtcctacgacaaagcccaccggcctcctagagaaatgaatattcaccgagccctcgctgacattctgagacagcaagggcctatccctattgcccactgcgaacgtgaaacaatcagtgcaatagacacatcacccaaggaaaacacacctgtacgcagttcaagcaagaatcattatacccctgtgagaactgctaagcagactcccgggcattatggtaaagatgcctatcgctccggaggccctgacctacacaactttatcagctccggttttgtcacgctgggtaggggacacaccaagggagaccatcagtacaaccacccaatactgtcaagcgtgacccagatccccccacacgaaaaacctcgtatgaataacatcctcacctcagcgacagagccctatgacctctcctttagtaggagctttcagaatctcgcgcacctgccaccttcctacgagagcgcggtcaagacaaacccatctaaatacagcagcctgaagcggctaaccgacaaggaagccgacgaatactacatgcgccgaagacatttgcctgatctagccgcccgcgggactctgcccctcaacgtgatacagatgagtcagcaaaagccactgccccgcgagaggccacggagacccatccgcgctatgtctcaggatcgggtgctgtctcctgatcgaggcctcccggatgagttttccatgccttacgatcgcatcctgtccgatgagcagctcctttccacagagcgattacatagccaagatccactgctgtctccagaacggaccgcgtttccagaacagagcctttctagggccatttctcatacggacgtgtttgtgtcaacccccgtgctggaccggtatcgaatgagtaagatgcactcccacccatcagctagtaataatagttacgctactttgggccagtcccagacagctgcgaaacggcacgccttcgcgtcgcggaggcataacacagtagagcaattgcattatattcccggccaccatacctgctacacagcctccaagaccgaggtcactgtgtag

SEQ ID NO: 265363 - DNA, 1656 bp, Artificial Sequence
  derived and/or modified sequence
atggccctgcggcggctgctgctgctgctgctgctgagcctggagagcctggacctgctgcccagcgtgcacggggcccggggccgggccgccaacagaaccctgtctgctggaggagctgctgtgggcggcagaagagctggaggagccctggcccggggcggccgggagctgaatggaacagcccgggcccctggcatccctgaggccggcagcagaagaggccagcctgctgctgctgtggccgccgccgccagcgctgctgtgacctatgagacctgctggggctactatgatgtgtctggccagtatgacaaggagtttgagtgcaacaacagcgagagcggctacctgtactgctgcggcacctgctactaccgcttctgctgcaagaagagacatgagaagctggaccagaggcagtgcaccaactaccagagccctgtgtgggtgcagacccccagcaccaaggtggtgtccccaggccctgagaacaagtatgaccctgagaaggacaagaccaacttcaccgtgtacatcacctgtggggtgattgcctttgtgattgtggccggcgtgtttgccaaggtgtcctatgacaaggcccacaggcctccccgggagatgaacatccaccgggccctggccgacatcctgcggcagcagggccccatccccatcgcccactgtgagcgggagaccatcagcgccatcgacaccagccccaaggagaacacccctgtgcgcagcagcagcaagaaccactacacccctgtgaggacagccaagcagaccccaggccactacggcaaggatgcctaccgcagcggcggccctgacctgcacaacttcatcagcagcggctttgtgaccctgggccggggccacaccaagggggaccaccagtacaaccaccccatcctgagctctgtgacccagatcccccctcatgagaagcccaggatgaacaacatcctgaccagcgccacagagccctatgacctgtccttcagccgctccttccagaacctggcccacctgccccccagctatgaatctgctgtgaagaccaaccccagcaagtacagcagcctgaagaggctgacagacaaggaggctgatgagtactacatgagaagaagacacctgcctgacctggccgcccggggcaccctgcccctgaatgtcatccagatgagccagcagaagcccctgccccgggagcggccccggcggcccatccgggccatgagccaggacagagtgctgagcccagaccggggcctgcctgatgagttctccatgccctatgaccgcatcctgagtgatgagcagctgctgagcacagagcggctgcacagccaggaccccctgctgagccctgagaggacagccttccctgagcagagcctgagccgggccatcagccacacagatgtgtttgtgtccacccctgtgctggaccgctacaggatgagcaagatgcacagccaccccagcgccagcaacaacagctatgccaccctgggccagagccagacagctgccaagagacatgcctttgccagccgccgccacaacacagtggagcagctgcactacatccctggccaccacacctgctacacagccagcaagacagaggtgacagtgtag

SEQ ID NO: 265364 - DNA, 1656 bp, Artificial Sequence
  derived and/or modified sequence
atggccctgcggcggctgctgctgctgctgctgctgagcctggagtccctggatctccttccatctgtacacggcgcgaggggccgtgcggccaaccggacgctgtcagctgggggcgcagctgttggggggaggagggcgggaggcgccttggctagaggcgggcgagagctgaacggaacagcaagagcccccggtattccagaggccggcagtagaaggggacagccagcagctgccgttgccgccgcggcctcagctgccgtcacatacgagacctgttggggatattacgacgtatcaggccagtatgataaggaatttgagtgtaataattcagaaagcggctacctgtattgctgcggaacatgctactacagattttgctgtaagaaaagacatgaaaagttggaccaacggcagtgcacaaattaccagagcccggtatgggtgcaaactccgagcacaaaggtggtgtcacctggcccagaaaataagtacgaccccgaaaaggacaagaccaactttactgtttacattacttgtggtgtgatcgcttttgtcatagtagctggtgtttttgccaaagtgagctatgataaagcacaccgccccccaagagagatgaatatccacagggcacttgccgatatcctgcggcagcagggaccaatcccaatagcccactgtgagcgggagaccatcagcgccatagatacctctcccaaggagaatactccggtcaggtcctcgagcaagaaccactacacgcccgttaggacagccaagcagacgcccggccactacgggaaagacgcatacagaagcggagggcccgacctccacaactttatctcttccggctttgtcacacttggcaggggacatactaagggtgatcatcaatacaaccatcctattctaagcagcgttactcaaatcccccctcatgaaaaaccaagaatgaacaacatcctgacatctgctactgagccttacgacctgtcattctccagaagttttcagaatctcgcacacctgccacccagttatgagagcgctgtcaagacaaacccatccaaatactcctcattaaagaggctcaccgataaggaggcagatgaatattatatgaggcggcggcacctccccgaccttgccgctcgcggaacgttaccgttgaacgtcattcaaatgagtcagcagaaacccctccccagagaacggccacgccggcccatcagagctatgagccaagaccgtgtgctgagccctgaccggggactcccagacgagttttctatgccatatgatcggatcttaagcgatgagcagttgctttccactgagaggttgcatagtcaagaccctcttctgtcccctgaaaggaccgcttttcctgagcagagcctgtcgcgggcaatctcacatacagatgtgtttgtatccacccccgtcctcgatagataccggatgtcgaaaatgcattcccacccgtctgcctccaacaactcttacgctaccctcgggcaatcccaaacagctgccaaacgacacgcctttgcaagccgacggcacaataccgttgaacagcttcactacattcctggacaccatacatgctatacagcctccaaaactgaggtaactgtctag

SEQ ID NO: 265365 - DNA, 1656 bp, Artificial Sequence
  derived and/or modified sequence
atggccctgagaaggctccttttactcctgctcctgtcactcgagtcgctggatttgcttccctccgtgcatggagcacggggtagagccgcaaatcgtacactcagcgccggaggggctgcggtgggcggacgccgtgccggaggggctttggcccgaggagggcgtgaattgaacggtaccgcccgtgccccagggattccggaagccggatcgcggcgtggccagccagcggcagccgtggcagcagccgcttcagctgccgtcacctatgagacttgctggggctactacgatgtgagtggccagtatgacaaagaatttgagtgcaataattcagaaagcggatacctatattgctgtggaacatgttattatagattttgctgtaaaaagaggcacgagaagctcgatcagaggcagtgtaccaactatcaatcccccgtctgggtacagacgccaagcacaaaggtggtgagccctggacctgaaaataagtatgatcctgagaaagacaagaccaatttcaccgtctacattacatgtggcgtgatcgccttcgtgatcgttgctggcgtgttcgcgaaagtgtcgtacgataaagcacacaggccgcctcgtgaaatgaatattcaccgtgctctggctgacattctgaggcagcagggtcccattcctattgctcactgcgaaagggagaccatcagcgcgattgacacctcccctaaggaaaatacccctgtccgctcctccagcaagaatcactacacaccagtgaggacggctaaacaaacacctggacactacgggaaggatgcctaccgaagcggtggtcctgacttgcacaattttattagttcaggatttgtgaccctgggcaggggccatacaaagggcgaccatcagtacaatcaccccatacttagtagcgtgacccaaatccctcctcacgagaaaccacgtatgaacaacattctcacatctgccactgagccctatgacctgtccttttccaggtcctttcaaaacctcgcccacttgcccccatcttatgagtcagccgttaagacgaacccatcaaagtatagttcccttaagcgattgaccgataaggaggccgacgagtattacatgcggaggcgccacctgcccgatttagctgccagagggaccctgccactgaacgtgatccagatgagccagcagaaacccctgcccagagaacgccctcgaagacctatccgagctatgagccaggacagagtgctgtctccagaccggggacttccagacgagtttagcatgccctatgaccggatacttagtgatgagcagctgctttccaccgaaaggttgcacagccaggacccattactgtcacctgaaagaaccgcttttcccgaacagagtcttagcagagccattagccataccgacgttttcgtgtctacgcctgtcctggatcgctatcgtatgtctaaaatgcatagccacccgtcagccagcaacaactcttacgctactctgggacaatcgcagaccgctgccaaaagacacgcattcgcttctagacgccacaatacggttgagcaactgcactatattccagggcatcacacctgctacacagcatccaaaacagaagtcaccgtttag

SEQ ID NO: 265366 - DNA, 2391 bp, Artificial Sequence
  derived and/or modified sequence
cgccgccactgccgcccgcgcctcgatggcgccatcgccccggagccgctgaccgctcagcgcctccagcccggcccgcgcggcgggtcctccgagcccggcccgccgggggagcggcctgccgcggaagcctccccgcgccctcccgcccggccccgccatggcgctgcggcgcctcctgctgctgctgctgctctcgctggagtccctggacctgctgcccagcgtccacggagcccgcggccgcgccgccaaccggaccctgagtgcaggcggcgctgccgtcgggggccggagggccgggggcgccctggcacggggcggccgcgagctgaacggcaccgcccgggcgcccggaatcccggaggcgggaagccggcgggggcagcccgcggcggctgtggcggcggcggccagcgcggccgtcacctacgagacgtgctggggctactacgacgtgagcggccagtacgacaaggagttcgagtgtaacaacagcgagagcggctacctgtactgctgcggtacctgctactaccgcttctgctgcaagaagcgccacgagaagctggaccagcgccagtgcaccaactaccagagcccggtgtgggtacagacgcccagcaccaaggtggtgtcgccggggcccgagaacaagtacgacccggagaaggacaagaccaacttcaccgtctacatcacctgcggggtgatcgccttcgtcatcgtggccggcgtcttcgccaaggtctcctacgacaaggcccaccgccctccacgggagatgaacatccacagggctctggctgacatcttaagacaacagggaccaatccccatagcacactgtgaaagagaaactatctcggctatcgatacctctcccaaagagaacacgccggtcagatcgtcctccaaaaaccactacactcctgtgcgtacggccaagcagactccagggcattatgggaaggatgcttaccgaagtggaggacctgatctccataacttcatctcatctggatttgtcacattaggaagaggacacaccaagggtgatcatcaatataaccatccgattttgagcagtgttacccagatcccgccacatgagaagccacggatgaacaacatcctgacatcagccaccgagccctatgacctctccttctcccgctcgttccagaacttggcccacctgcccccatcctacgagtctgcagtaaagaccaaccccagcaagtattcatctctgaagaggctaaccgacaaggaggctgacgagtattacatgagacggcggcacctgcccgacctggctgcccgcggcaccctccccctcaatgtcatccagatgtcccaacagaagccgttgccaagggaacgaccccgccggcccatccgggccatgtcccaggacagggtcctgtccccggatcggggcctgccagatgagttcagcatgccctacgaccgcatcctgtccgacgagcagctgctctccacggagcgcctgcactcccaggacccgctgctgtccccggagcggacggcctttcccgagcagtcgctgtccagggccatctcgcacacggacgtctttgtgtccacacccgtgctggaccgctaccgcatgagcaagatgcactctcatcccagtgcctccaataactcatacgccaccctgggccagagccagacggcagccaagcgtcatgcctttgcctcacgcagacacaacacggtggagcagctgcactacatcccgggccaccacacctgctacacagccagcaagaccgaagtgaccgtgtgaccggcggggcagggccggggctgctgggcgtggcagagcagagcgggggccgggaggggccaggagcagagcttctagccttgccactctcccttcccttgtcccctctgtaggaagtgggggtgggccacctttgcccaaaaagccatacccccggggacacagccccgatggcctggtccaatacacttagacccaggaccaagagcaatcgctcttgctcctccagaagaatcagtggggagtgaggagggggctaggccccattctcacccccgaccaccttcaccaactccctttccgtcccgcgcctccttctccccatccgggggactcagctgcaggttctgtcagcagagagacccttgcttgactgtggtctgaagctgcctgggtttgaaggggccagcgggtccaatcagtgggctgaccggataggctactcggtctcattcattcatctagaaccgcatcacagaaatctcctagtgcctaaaaactgcctgctcgctctctcagagccagggagctgctgtgtccataagcacaataatgattcttttcttgcctgctgg

SEQ ID NO: 265367 - protein, 235 aa, Artificial Sequence
  derived and/or modified sequence
MAREECKALLDGLNKTTACYHHLVLTVGGSADSQNLRQELQKTRQKAQELAVSTCARLTAVLRDRGLAADERAEFERLWVAFSGCLDLLEADMRRALELGAAFPLHAPRRPLVRTGVAGASSGVAARALSTRSLRLEAEGDFDVADLRELEREVLQVGEMIDNMEMKVNVPRWTVQARQAAGAELLSTVSAGPSSVVSLQERGGGCDPRKALAAILFGAVLLAAVALAVCVAKLS

SEQ ID NO: 265368 - DNA, 708 bp, Artificial Sequence
  derived and/or modified sequence
atggccagagaagaatgcaaggcattgctggatggcctcaataagaccacagcgtgctaccaccatctggtgctgaccgtgggtggttctgccgactcccaaaacctgcgccaggagctacagaaaacgcggcaaaaagctcaggagctggcagtcagtacctgcgcgcggcttacggcggttctgagggataggggtctggcagccgacgagcgcgctgaatttgagcgactctgggtagcattctcaggctgtctggacctgctagaggccgacatgcgcagagcccttgaattgggggctgcgttcccactgcacgcccctagaagacctctggttagaacaggggttgccggcgcctcgtccggggtggccgctcgggctctatccactaggtcacttcgcctggaggcagaaggcgattttgacgtagccgacctccgagaactcgaacgggaagtcctgcaagtgggcgagatgatcgataacatggaaatgaaggtgaacgtccctaggtggactgtccaggcccgccaggcagcaggcgctgagctgctgtctaccgtttctgcaggccccagttctgttgtttcccttcaagagagggggggagggtgcgacccacgtaaagcccttgcagcaattctatttggagcagtactattggctgcagtggctctggccgtctgcgttgccaagctgagctag

SEQ ID NO: 265369 - DNA, 708 bp, Artificial Sequence
  derived and/or modified sequence
atggcccgggaggagtgcaaggccctgctggatggcctgaacaagaccacagcctgctaccaccacctggtgctgactgtgggcggcagcgctgacagccagaacctgcggcaggagctgcagaagacccggcagaaggcccaggagctggccgtgtccacctgtgcccggctgacagctgtgctgcgggaccggggcctggccgcagatgaaagagctgagtttgagcggctgtgggtggccttcagcggctgcctggacctgctggaggccgacatgaggcgggccctggagctgggcgccgccttccccctgcacgccccccggcggcccctggtgaggactggagtggccggggccagcagcggcgtggccgcccgggccctgagcaccaggagcctgcggctggaggccgagggggactttgatgtggccgacctgcgggagctggagcgggaggtgctgcaggtgggggagatgattgacaacatggagatgaaggtgaatgtgccccgctggacagtgcaggcccggcaggccgccggggctgagctgctgagcacagtgtctgctggccccagctctgtggtgtccctgcaggagcggggcggcggctgtgaccccaggaaggccctggccgccatcctgtttggagctgtgctgctggccgctgtggccctggccgtgtgtgtggccaagctgtcctag

SEQ ID NO: 265370 - DNA, 708 bp, Artificial Sequence
  derived and/or modified sequence
atggcccgggaggagtgcaaggccctgctggacggcctgaacaagacaacagcctgctatcaccacctggttctgactgtaggtggaagcgccgatagtcagaacctgcgtcaggagctccagaagactaggcaaaaagcccaagaattggccgtcagcacttgtgcaagacttacagctgtactgagagaccgaggactggccgctgatgagcgggccgaatttgagcgactgtgggtcgcattctctggctgtctggatctgctcgaggcagatatgcggcgcgctctcgaattaggggctgccttccccctgcatgcacctcgtagacccctggtgagaactggggtggccggggcaagctcaggggtcgcagccagagcacttagtaccagaagcttgcgtctcgaagccgagggggatttcgatgttgcggatctaagagagctcgaacgcgaagttctgcaggtcggcgagatgatcgacaatatggaaatgaaggtgaatgtcccaagatggacagtgcaggcccggcaggctgccggcgctgagctgctctcaacagtgagcgccggtccctcaagcgttgtctcactacaagagcgaggagggggatgcgacccccgcaaagcgctggccgccattctctttggagccgtgttgctggccgccgtggcactggcagtctgcgtggcaaagctgagttag

SEQ ID NO: 265371 - DNA, 708 bp, Artificial Sequence
  derived and/or modified sequence
atggccagggaggagtgcaaggccttgctcgacggtctgaacaagacgacggcgtgttaccaccatttagtgctgacagtggggggatccgctgacagtcaaaatctccgccaggagctgcagaaaacccggcagaaggcacaggagcttgcggtgtcaacatgcgccagattaaccgctgtactgcgagataggggtctcgcagccgatgaacgggcagaatttgaaaggctgtgggtggctttctcgggctgcctcgatctactagaagcagacatgagacgggctctggagctaggggcagcctttccactacacgctcctcgacgaccgttggttaggaccggggtggctggcgcatccagcggggtagcggcaagggctctgtccacgcggagcctgagactggaggccgaaggagacttcgatgtggccgatttgagggagttagagagagaagtcctacaagttggcgaaatgatcgacaacatggaaatgaaagtcaacgttcctaggtggacagttcaggccagacaggccgcaggtgccgagctcctttccacagtatccgcgggacctagcagtgtggtaagtttgcaggaacgcggagggggttgtgacccgcgtaaggccctagctgctattctattcggcgctgtactgttagccgcagtggccctggctgtgtgcgtcgctaaactgtcttag

SEQ ID NO: 265372 - DNA, 2894 bp, Artificial Sequence
  derived and/or modified sequence
actagaggtggggttagcgcttggaagcaccgaccaacgtgagcgcaacgcggcagggacacctgaccccggcggcgcccagcccctcggattgccagtcactgctcgctttggggcacggaggtgcccagtcctgcggggcacccgacgtcctgtcgccgacagggtccgggagtcagtatagctgggttctagtcccatcacaggcaaaaactccgcgggagcctggcccgctttttacctgggcctcagtttccccatccgtaaaatagaacgggttggatctcccgagcgctaacattccagaactcggatggggcgaaggggagggagggatgggccacccacacgtgacctccccgcgtggagccccgcctaccactgatccagggggtggcagctccggccgggacgagcggggtgggcgggtcctaggaaaccctacccggccgcccttggcagcgcctaaggcggagcgcgcggctctgcagcctgcttgccccggagttggcacccacggaggatggggaccgcaccctcagcttcgcagggagccaccgtggaggccagggcggtgcagagacacgacgtgtgactcggagtgcgcctggggaggatggacgagggagcgggggaccgctaacggggctccctctgcgcgccccgtccgcagaggcgcacgtcgagggtcccgggcgggctccgtggacgttggcggtagcgccgagcgagtcacggaccatgaagagcgttcgtgccgcgcggcccaaggccgggatgggggttagccacatcctgccgcgctgagggggaggctaacgggcgcgggcggccgggcccagccggagcccaccgcgatggcgagggaggagtgcaaggcgctgctggacgggctcaacaagacgactgcgtgctaccaccacctggtgctgaccgtcggtggctcggcggactcgcagaacctgcggcaggagctgcaaaagacgcgccagaaggcgcaggagctggcggtgtccacctgcgcccggctgactgctgtgctgcgcgaccggggcctggccgccgacgagcgcgccgagttcgagcggctctgggtggccttctcgggctgcctggacctgctggaagcggacatgcgacgcgcgctggagctgggcgccgcgttcccgctgcacgcgccgcggcggccgctggtgcgcacaggtgtggctggcgcctcctccggcgtggcggcgcgcgcgctgagcacccgcagcctgcggctcgaggcggagggcgacttcgacgtcgcggacctgcgggagctggagcgcgaggtccttcaggtgggcgagatgatcgacaacatggagatgaaggtcaacgtgccccgctggaccgtgcaagcccggcaggcggcgggcgccgagctcctgtccacggtcagcgccggcccctcctcggtcgtgtccttgcaggagcgcggggggggttgcgaccccaggaaggccctggccgccatccttttcggcgccgtgctgctggcggctgtggccctagccgtgtgcgtggcgaagctgagctgacggacacccgacggccgcctgctgctgccgctccctcccctgagaaaagactcgggatgggtgtggggtctggcctgtgcaaggggagtggtcctaaaaccccgtgtgtgcatgggtacacgcgcgtttccagtgcacatctgcctgggcaggacacggtttcctcttgctggcccgggaggagttaactttgcgccggccgtcagggcattaccgctaacgtctgcaggagctttattccctattaatagaaaaccgtcacagtgaccctagatccctccgagttaatgagttaacacatgtgctgttggggcgtctttacagggagtccgagttcggtgcccacccctgccagcgtcgccccctttctgcgtgggacagtttgaaaaggtgggtggggtggagtgaagtttggagagggacgctgtttggttctatgtggttggtctgtttcccggacaagaaaaattgcaatcaaatgtcagcagcttttattaccttaatctttcagggcctaaatttaggagagtgtcccgagagcagttcatacaaagggctttctctaagacgcgctacagcccttcctagcagagtttatccattcgtccccaagagcagctagaagagatttgaggtcatgacctcccactgccgctcaggggctgaccctatttaggaaaccaaagagggtgggttgaacctactctcacggacttggatccagtgcgcacacttgcctgcggaaaagggctctccccagccacccggagatgggggtaagaggaagagcagaggcttggggtagggccacctggtgtttaaacaggcactttctccttctctggggcttatttttgttcagaactagaccagagtgtttgaacctcctttgcaggagggctgggaatcctctttagagcacttaatcctatttatcccctggaatgtgcgtgctggccagtaggagggctggctttggcagctccctgacccccgcgctgcccgcccctccggggtaatgtggcattactggcccacagaggttttgagccaatcagctctgagactgggttagaatgtaacagctttaacttgggatttaagaagcttttaaaaggtaataatactctgaaagaaaaatgacgtaaccacagcgtgtactatgaaagctgttattttaataaagaacgctgggccatgaactcatacctgccaatgagtcaaacatagtatctttatgtagatacttagattactaaatatatatttcatctacttctgaagttgatagtcttcccccccccccacttttttcttttttgagacagg

SEQ ID NO: 265373 - DNA, 569 bp, Artificial Sequence
  derived and/or modified sequence
atttttgttttggggaggaagggcaggggcttgcggatagaagggggtcaaaggaacggtgattatcacctgtgaggggaaagggggtgctgtcctccctccttcccttttcctcagcctgcaccccctgcaatcccccacctttcggggtctccccctccttgttgctaaggcccggaccgtcatcccagcaacagcctcagtcatgtgaccggcaatggcggcgctgacgagaggctttcttgggggcctcagagctggggaagaaaggaggaaggttagcatgttgaagttccttcttgagcaacttggggagaagctgataatggaattctgcagagaagagaggagatggaaggggagtttttatttctgggttggctgaggggaatggtaacatttgccatcataactttttacccttcccccactcccagtcctggtcagctgagtggaaatagaaggatttctgctgccatcatcttccatgggctttccaggtcacacgacctacaagtagggagcagggaaagaagagtgagcctgcatgccaattctaagctcttcag

SEQ ID NO: 265374 - DNA, 708 bp, Artificial Sequence
  derived and/or modified sequence
atggccagagaggagtgcaaggccctgctggacggcctgaacaagaccaccgcctgctaccaccacctggtgctgaccgtgggcggcagcgccgacagccagaacctgagacaggagctgcagaagaccagacagaaggcccaggagctggccgtgagcacctgcgccagactgaccgccgtgctgagagacagaggcctggccgccgacgagagagccgagttcgagagactgtgggtggccttcagcggctgcctggacctgctggaggccgacatgagaagagccctggagctgggcgccgccttccccctgcacgcccccagaagacccctggtgagaaccggcgtggccggcgccagcagcggcgtggccgccagagccctgagcaccagaagcctgagactggaggccgagggcgacttcgacgtggccgacctgagagagctggagagagaggtgctgcaggtgggcgagatgatcgacaacatggagatgaaggtgaacgtgcccagatggaccgtgcaggccagacaggccgccggcgccgagctgctgagcaccgtgagcgccggccccagcagcgtggtgagcctgcaggagagaggcggcggctgcgaccccagaaaggccctggccgccatcctgttcggcgccgtgctgctggccgccgtggccctggccgtgtgcgtggccaagctgagctag

SEQ ID NO: 265375 - protein, 405 aa, Artificial Sequence
  derived and/or modified sequence
MQPAEEGPSVPKIYKQRSPYSVLKTFPSLNVVSESRMILDAFAQQCSRVLSLLNCGGKLLDSNHSQSMISCVKQEGSSYNERQEHCHIGKGVHSQTSDNVDIEMQYMQRKQQTSAFLRVFTDSLQNYLLSGSFPTPNPSSASEYGHLADVDPLSTSPVHTLGGWTSPATSESHGHPSSSTLPEEEEEEDEEGYCPRCQELEQEVISLQQENEELRRKLESIPVPCQTVLDYLKMVLQHHNQLLIPQPADQPTEGSKQLLNNYPVYITSKQWDEAVNSSKKDGRRLLRYLIRFVFTTDELKYSCGLGKRKRSVQSGETGPERRPLDPVKVTCLREFIRMHCTSNPDWWMPSEEQINKVFSDAVGHARQGRAVGTFLHNGGSFYEGIDHQASQDEVFNKSSQDGSGD

SEQ ID NO: 265376 - protein, 534 aa, Artificial Sequence
  derived and/or modified sequence
MEEEMQPAEEGPSVPKIYKQRSPYSVLKTFPSKRPALAKRYERPTLVELPHVRAPPPPPPPFAPHAAVSISSSEPPPQQFQAQSSYPPGPGRAAAAASSSSPSCTPATSQGHLRTPAQPPPASPAASSSSSFAAVVRYGPGAAAAAGTGGTGSDSASLELSAESRMILDAFAQQCSRVLSLLNCGGKLLDSNHSQSMISCVKQEGSSYNERQEHCHIGKGVHSQTSDNVDIEMQYMQRKQQTSAFLRVFTDSLQNYLLSGSFPTPNPSSASEYGHLADVDPLSTSPVHTLGGWTSPATSESHGHPSSSTLPEEEEEEDEEGYCPRCQELEQEVISLQQENEELRRKLESIPVPCQTVLDYLKMVLQHHNQLLIPQPADQPTEGSKQLLNNYPVYITSKQWDEAVNSSKKDGRRLLRYLIRFVFTTDELKYSCGLGKRKRSVQSGETGPERRPLDPVKVTCLREFIRMHCTSNPDWWMPSEEQINKVFSDAVGHARQGRAVGTFLHNGGSFYEGIDHQASQDEVFNKSSQDGSGD

SEQ ID NO: 265377 - DNA, 1218 bp, Artificial Sequence
  derived and/or modified sequence
atgcagcccgccgaggagggccccagcgtgcccaagatctacaagcagagaagcccctacagcgtgctgaagaccttccccagcctgaacgtggtgagcgagagcagaatgatcctggacgccttcgcccagcagtgcagcagagtgctgagcctgctgaactgcggcggcaagctgctggacagcaaccacagccagagcatgatcagctgcgtgaagcaggagggcagcagctacaacgagagacaggagcactgccacatcggcaagggcgtgcacagccagaccagcgacaacgtggacatcgagatgcagtacatgcagagaaagcagcagaccagcgccttcctgagagtgttcaccgacagcctgcagaactacctgctgagcggcagcttccccacccccaaccccagcagcgccagcgagtacggccacctggccgacgtggaccccctgagcaccagccccgtgcacaccctgggcggctggaccagccccgccaccagcgagagccacggccaccccagcagcagcaccctgcccgaggaggaggaggaggaggacgaggagggctactgccccagatgccaggagctggagcaggaggtgatcagcctgcagcaggagaacgaggagctgagaagaaagctggagagcatccccgtgccctgccagaccgtgctggactacctgaagatggtgctgcagcaccacaaccagctgctgatcccccagcccgccgaccagcccaccgagggcagcaagcagctgctgaacaactaccccgtgtacatcaccagcaagcagtgggacgaggccgtgaacagcagcaagaaggacggcagaagactgctgagatacctgatcagattcgtgttcaccaccgacgagctgaagtacagctgcggcctgggcaagagaaagagaagcgtgcagagcggcgagaccggccccgagagaagacccctggaccccgtgaaggtgacctgcctgagagagttcatcagaatgcactgcaccagcaaccccgactggtggatgcccagcgaggagcagatcaacaaggtgttcagcgacgccgtgggccacgccagacagggcagagccgtgggcaccttcctgcacaacggcggcagcttctacgagggcatcgaccaccaggccagccaggacgaggtgttcaacaagagcagccaggacggcagcggcgactag

SEQ ID NO: 265378 - DNA, 1605 bp, Artificial Sequence
  derived and/or modified sequence
atggaggaggagatgcagcccgccgaggagggccccagcgtgcccaagatctacaagcagagaagcccctacagcgtgctgaagaccttccccagcaagagacccgccctggccaagagatacgagagacccaccctggtggagctgccccacgtgagagcccccccccccccccccccccccttcgccccccacgccgccgtgagcatcagcagcagcgagccccccccccagcagttccaggcccagagcagctacccccccggccccggcagagccgccgccgccgccagcagcagcagccccagctgcacccccgccaccagccagggccacctgagaacccccgcccagcccccccccgccagccccgccgccagcagcagcagcagcttcgccgccgtggtgagatacggccccggcgccgccgccgccgccggcaccggcggcaccggcagcgacagcgccagcctggagctgagcgccgagagcagaatgatcctggacgccttcgcccagcagtgcagcagagtgctgagcctgctgaactgcggcggcaagctgctggacagcaaccacagccagagcatgatcagctgcgtgaagcaggagggcagcagctacaacgagagacaggagcactgccacatcggcaagggcgtgcacagccagaccagcgacaacgtggacatcgagatgcagtacatgcagagaaagcagcagaccagcgccttcctgagagtgttcaccgacagcctgcagaactacctgctgagcggcagcttccccacccccaaccccagcagcgccagcgagtacggccacctggccgacgtggaccccctgagcaccagccccgtgcacaccctgggcggctggaccagccccgccaccagcgagagccacggccaccccagcagcagcaccctgcccgaggaggaggaggaggaggacgaggagggctactgccccagatgccaggagctggagcaggaggtgatcagcctgcagcaggagaacgaggagctgagaagaaagctggagagcatccccgtgccctgccagaccgtgctggactacctgaagatggtgctgcagcaccacaaccagctgctgatcccccagcccgccgaccagcccaccgagggcagcaagcagctgctgaacaactaccccgtgtacatcaccagcaagcagtgggacgaggccgtgaacagcagcaagaaggacggcagaagactgctgagatacctgatcagattcgtgttcaccaccgacgagctgaagtacagctgcggcctgggcaagagaaagagaagcgtgcagagcggcgagaccggccccgagagaagacccctggaccccgtgaaggtgacctgcctgagagagttcatcagaatgcactgcaccagcaaccccgactggtggatgcccagcgaggagcagatcaacaaggtgttcagcgacgccgtgggccacgccagacagggcagagccgtgggcaccttcctgcacaacggcggcagcttctacgagggcatcgaccaccaggccagccaggacgaggtgttcaacaagagcagccaggacggcagcggcgactag

SEQ ID NO: 265379 - DNA, 1218 bp, Artificial Sequence
  derived and/or modified sequence
atgcagcctgcggaggagggacccagcgtcccgaagatctacaagcagcgctccccgtactcagttctcaaaacgtttccttccctgaacgtggtttccgagagccgaatgatcttggacgcattcgcccagcagtgttcccgcgtacttagcctgctcaactgtggaggcaagctgttggatagtaatcattctcaatctatgattagttgtgtgaagcaggaggggtcctcttacaatgaacgccaagagcattgtcacattggaaaaggcgtccattcacaaacatctgacaacgtcgatatcgaaatgcagtatatgcagcgtaaacagcagaccagcgcctttttgagggttttcacggactccctgcaaaactatctcctcagcgggagctttccaacaccaaaccccagctccgccagcgagtacggccacctggcagatgtggatcctctgtccacgtcaccagttcacactttaggagggtggacgtcccccgccacatctgagagccacggccacccatcaagcagcacgttgccggaggaagaggaggaagaggacgaggaggggtactgtccgcgttgtcaggaattggaacaagaagtgatcagcctacagcaagagaatgaagagcttcgccgcaaactggaatccatacccgttccctgccagacggtgctcgattatctgaagatggtactgcagcaccataatcaattactgattccccagccagctgaccagcctacagagggttccaaacaattactcaataattaccccgtctatattaccagcaagcagtgggatgaagctgtgaattcgtcaaaaaaagacggcaggcgcttgttgagatatttaattaggtttgtgttcacaaccgacgaattgaagtattcctgcggactcgggaagcggaaaagatccgtccaatccggcgagacgggacctgagcggaggccactggaccccgtgaaggttacttgtttgagagaattcatccgtatgcattgtacttcaaacccagactggtggatgccctctgaggaacaaattaacaaggtgttctccgatgctgtaggacatgccagacagggccgggccgtcggcacatttttacacaacggtggatcattttacgagggcatcgaccaccaggcctcccaggacgaagtgttcaataagtcaagtcaagatggatccggcgactag

SEQ ID NO: 265380 - DNA, 1605 bp, Artificial Sequence
  derived and/or modified sequence
atggaggaggaaatgcagccagcagaggagggaccatctgtccccaagatctacaagcagcgatcaccttattccgtactgaaaaccttcccttctaaaaggcccgcccttgctaagaggtatgagcgccccaccctggttgagcttccacatgtccgcgctcctcccccccccccacccccattcgcgccacatgctgcagtgtctatatctagctccgagccccccccacaacaattccaggcccagagttcctaccctcccggccccggcagagcagcagccgccgcatctagcagttctccttcatgtacacccgcaacgagccaggggcatctccgcacccctgcacaaccaccgccggcctctcctgccgcttcgtccagctcgagctttgcagcagtggtacggtacggcccaggggccgccgccgccgccggaacgggtggtaccggatcggatagcgcttccctggagctgtcagccgagtctagaatgatcttagacgcctttgcacagcaatgtagccgggtgcttagcctactgaactgcggaggaaaactgctggatagtaaccactcccagagcatgatctcatgcgtcaagcaggagggatccagctacaacgagcgtcaggaacactgtcacattggtaagggagtgcattcacagacaagtgataatgtggacatcgagatgcagtacatgcagcgaaaacagcagacttctgcctttttacgcgttttcaccgactccctgcagaactacttactgtccggatcattcccaacccccaaccctagctcggctagtgagtacggccacctggctgatgtcgatcctctgagcacttctccagtacacactctgggagggtggacatcccccgcaactagcgaatctcatggccacccctcatcgtcgacactgcccgaggaagaggaggaggaagacgaggagggttattgcccgagatgccaagagctggaacaggaggtgataagcctccagcaggaaaacgaggagctgcgtcggaaacttgagtcaatccccgttccatgccagaccgtgctcgattatcttaagatggtattgcagcatcataatcagcttctgatcccccagcccgcggaccagcctacagaaggatcaaagcaactactcaataactacccagtctatatcacttcaaaacaatgggatgaagccgtcaacagctctaagaaggatggtaggaggctgcttcgatatctgattcggtttgtcttcacaacagatgagcttaaatatagctgcggattaggcaaaagaaagaggagcgttcagtccggtgagactgggcccgaaagaaggccacttgaccccgtgaaggtgacatgcctcagagaattcatccggatgcactgtacttctaaccccgattggtggatgccctcagaagaacagataaataaggtgttcagtgacgcagtgggccacgccagacaggggagagcagtgggcaccttcctccataacgggggcagtttctatgagggaatcgaccatcaagctagccaggacgaagtcttcaacaaatcgtcacaggacggcagcggagactag

SEQ ID NO: 265381 - DNA, 1218 bp, Artificial Sequence
  derived and/or modified sequence
atgcagcctgctgaggagggccccagcgtgcccaagatctacaagcagaggagcccctacagcgtgctgaagaccttccccagcctgaatgtggtgtctgagagcaggatgatcctggatgcctttgcccagcagtgcagccgggtgctgagcctgctgaactgtggcggcaagctgctggacagcaaccacagccagagcatgatcagctgtgtgaagcaggagggcagcagctacaatgaaaggcaggagcactgccacatcggcaagggcgtgcacagccagaccagtgacaacgtggacatcgagatgcagtacatgcagaggaagcagcagaccagcgccttcctgcgggtcttcacagacagcctgcagaactacctgctgagcggcagcttccccacccccaaccccagcagcgcctctgaatatggccacctggctgatgtggaccccctgagcaccagccctgtgcacaccctgggcggctggaccagccctgccaccagcgagagccacggccaccccagcagcagcaccctgcctgaggaggaggaggaggaggatgaggagggctactgcccccgctgccaggagctggagcaggaggtgatcagcctgcagcaggagaatgaggagctgcggaggaagctggagagcatccctgtgccctgccagacagtgctggactacctgaagatggtgctgcagcaccacaaccagctgctgatcccccagcctgctgaccagcccacagagggcagcaagcagctgctgaacaactaccctgtgtacatcaccagcaagcagtgggatgaggccgtgaacagcagcaagaaggatggaagaaggctgctgcgctacctgatccgctttgtgttcaccacagatgagctgaagtacagctgtggcctgggcaagaggaagaggtctgtgcagagcggggagactggacctgagcggcggcccctggaccctgtgaaggtgacctgcctgcgggagttcatccgcatgcactgcaccagcaacccagactggtggatgcccagcgaggagcagatcaacaaggtgttcagtgatgctgtgggccacgcccggcagggccgggctgtgggcaccttcctgcacaatggaggcagcttctatgagggcatcgaccaccaggccagccaggatgaggtgttcaacaagagcagccaggacggcagcggggactag

SEQ ID NO: 265382 - DNA, 1605 bp, Artificial Sequence
  derived and/or modified sequence
atggaggaggagatgcagcctgctgaggagggccccagcgtgcccaagatctacaagcagaggagcccctacagcgtgctgaagaccttccccagcaagaggcctgccctggccaagagatatgagcggcccaccctggtggagctgccccacgtgcgggcccctcctcctcctcctcctccatttgcccctcatgctgctgtgtccatcagcagcagcgagcccccaccccagcagttccaggcccagagcagctacccacctggccctggccgggctgctgctgctgccagcagcagcagccccagctgcaccccagccaccagccagggccacctgcggaccccagcccagcccccaccagccagccctgctgccagcagcagcagcagctttgctgctgtggtgcgctatggccctggagctgctgctgctgctggcaccggcggcactggaagtgacagcgccagcctggagctgtctgctgagagcaggatgatcctggatgcctttgcccagcagtgcagccgggtgctgagcctgctgaactgtggcggcaagctgctggacagcaaccacagccagagcatgatcagctgtgtgaagcaggagggcagcagctacaatgaaaggcaggagcactgccacatcggcaaaggagtgcacagccagaccagtgacaacgtggacatcgagatgcagtacatgcagaggaagcagcagaccagcgccttcctgcgggtcttcacagacagcctgcagaactacctgctgagcggcagcttccccacccccaaccccagcagcgcctctgaatatggccacctggctgatgtggaccccctgagcaccagccctgtgcacaccctgggcggctggaccagccctgccaccagcgagagccacggccaccccagcagcagcaccctgcctgaggaggaggaggaggaggatgaggagggctactgcccccgctgccaggagctggagcaggaggtgatcagcctgcagcaggagaatgaggagctgcggaggaagctggagagcatccctgtgccctgccagacagtgctggactacctgaagatggtgctgcagcaccacaaccagctgctgatcccccagcctgctgaccagcccacagagggcagcaagcagctgctgaacaactaccctgtgtacatcaccagcaagcagtgggatgaagctgtgaacagcagcaagaaggatggccggcggctgctgcgctacctgatccgctttgtgttcaccacagatgagctgaagtacagctgtggcctgggcaagaggaagaggtctgtgcagagcggggagaccggccctgagcggcggcccctggaccctgtgaaggtgacctgcctgcgggagttcatccgcatgcactgcaccagcaacccagactggtggatgcccagcgaggagcagatcaacaaggtgttcagtgatgctgtgggccacgcccggcagggccgggctgtgggcaccttcctgcacaacggcggcagcttctatgagggcatcgaccaccaggccagccaggatgaggtgttcaacaagagcagccaggacggcagcggggactag

SEQ ID NO: 265383 - DNA, 1218 bp, Artificial Sequence
  derived and/or modified sequence
atgcagcccgccgaggagggccccagcgtgcccaagatctacaagcagaggagtccatatagcgtgttgaaaacttttccatcgctcaatgttgtatcagaaagccgcatgatactggacgccttcgcccagcagtgctctcgcgtcttgtcccttctcaactgcggtggcaaactgctggattcaaaccattcccagagtatgatcagctgcgtgaagcaggaaggaagctcatacaatgaacggcaggagcattgccatatcgggaaaggcgtgcattcacagacgtccgacaatgtcgacattgaaatgcagtacatgcagcgcaaacagcagaccagcgccttcctgagagtgttcacggactcactgcagaattacttgttgtccggttccttccccacaccaaacccatcttccgcttccgaatatggacacctggccgatgtcgatcctttgagcaccagcccagtgcatacccttggaggatggacgtccccagcaacgtccgaatcccacggtcaccctagttcgagtactctgccagaggaggaggaggaggaagatgaagagggttattgccctagatgtcaggaactggagcaagaggtaatctccctccagcaggagaatgaggagctgcggcgcaagctggagagcatcccagtgccatgccaaactgtgctggactacctgaaaatggttctccagcaccacaaccagttacttatccctcagcccgccgaccagccaaccgaaggttctaaacagttattgaataattacccagtttatattacatccaaacagtgggatgaggcggtgaacagcagcaagaaagacggccggcgcttgctccgttatctaatccggttcgtgttcacgacagacgagctgaaatattcatgcggcttgggtaagaggaaacggtcagttcaatccggagagacaggcccagagcgcagaccactggatcccgtcaaggtgacctgtcttagagagttcattaggatgcactgcacttcgaacccagactggtggatgccatcagaggagcagattaataaggtgttttccgatgctgtggggcatgcccgccaaggcagagccgtcggaacctttttacacaatggcgggtcgttttacgagggaatcgatcaccaggcctcccaggatgaggtgttcaataagtcctcccaggatggaagcggagactag

SEQ ID NO: 265384 - DNA, 1605 bp, Artificial Sequence
  derived and/or modified sequence
atggaggaggagatgcagcccgccgaggagggccccagcgtgcccaagatatacaaacagaggagcccgtactccgtcttgaaaacgtttccctcaaaacggccagccctggccaagcggtatgagcgaccaacactggtggagctgccacacgtgcgcgcccccccacctccgccccccccttttgccccacacgccgcagtgtcaattagctcaagtgagccacccccgcaacagtttcaggctcaatcttcctatccacccggacccggccgagccgctgccgccgcttccagttcatcacccagttgtactcccgccacttcgcagggtcacctgaggacaccggcccaaccaccgccagcctcacctgctgcctcttcttcctcgagtttcgcggccgtggtcagatacggcccaggggcagctgccgcggctggtacagggggcaccggaagcgactctgcctcacttgagctttcagcagaaagtcgcatgattctcgacgcattcgcccaacagtgtagcagggtgctgtcactgctgaactgcggaggcaagctgttagacagcaatcactctcaaagtatgatctcatgcgtgaagcaggaggggtcctcttataacgagcgtcaggagcattgccatattgggaaaggcgtccactcccagacgtccgataatgtcgatatagagatgcagtacatgcagagaaagcagcagaccagtgcctttctccgcgtgttcaccgactcgctgcagaattatcttctgtccgggagttttccaacccctaatcccagctcagctagcgaatacggtcatcttgcagatgtggaccccctatctacatcccctgtgcatacattgggaggatggacaagccctgccactagcgagagccacgggcacccctcatctagcaccctgccagaagaagaggaggaggaagatgaagagggctactgccctcggtgccaagaactcgagcaggaggtcatttctctacagcaagagaacgaggaactgcggcgtaaactggagtcaatccccgtgccatgccagactgtgctggactacctgaagatggtgctgcaacatcataatcaactcctcatcccccagcctgctgaccaacccacagaggggagcaagcaattgttaaacaattaccccgtttacatcacctctaagcagtgggacgaagccgttaattcctccaaaaaagatggaaggcgcctactgcggtaccttatacggtttgtgttcacaacggatgagttgaaatattcctgcgggctgggaaagaggaaaaggtcagtgcaatccggcgagactggccctgaacgacggcccttggaccccgtgaaggtgacatgtctgagggagttcattaggatgcattgtacttcgaaccccgattggtggatgccttctgaagagcagattaacaaagttttctctgacgccgtgggccatgcgaggcagggcagggcggtgggcaccttcctgcacaacggcggaagcttttacgagggaattgatcaccaggcttcccaagatgaggtgttcaacaaaagcagccaagacggaagcggcgattag

SEQ ID NO: 265385 - DNA, 1218 bp, Artificial Sequence
  derived and/or modified sequence
atgcaaccagcggaggagggcccttccgttcctaagatatacaagcagcgcagcccttatagcgttttaaaaaccttcccatctctcaacgtggtgtcagagagtaggatgatactggacgcctttgcgcaacagtgctctagggtcttgagtctgctcaactgtggaggtaaattactggactccaaccattctcagtctatgataagttgcgtcaagcaggaaggctcttcatataatgaaagacaagaacactgccatatcgggaagggagtacactctcaaactagcgacaacgtggatatcgagatgcagtacatgcagagaaagcagcagactagtgcattcttgagggtgttcactgattcactgcagaactacctcctcagtggtagctttcctacacctaatcctagctcagcatcggagtacggccatttggccgacgtggaccctttgtcaacatcccccgttcacaccctggggggatggacatcaccggctacgtcggaaagtcacggacaccctagttctagcacactacccgaagaagaggaagaagaagacgaggagggttattgcccccgatgtcaggaattggaacaggaggtgattagtctgcagcaggaaaacgaggagctccggaggaagttagagtctattcccgttccttgtcagacagtgctggactatctgaagatggtcctgcagcatcacaatcagcttcttattccacaacctgcagatcagcccacagaagggtccaaacagttgctgaacaactatcctgtgtacattacttctaaacagtgggacgaggcagtgaacagcagcaagaaagatggaaggcgtctgctccggtatttaatcaggtttgtgtttacgaccgacgagctaaagtactcctgcgggctcggaaagagaaagcgttcggtccagagtggtgaaacgggccctgagcgcagaccactcgaccccgtcaaggtgacttgtctgagagaattcatccggatgcactgtacaagcaacccagactggtggatgcccagcgaggaacagattaataaagtcttctcggacgctgtaggccacgccagacaaggacgtgctgttgggaccttcctgcacaacggaggcagtttttacgagggaatcgaccatcaggctagccaggacgaagttttcaacaagtcaagccaggatggctccggtgattag

SEQ ID NO: 265386 - DNA, 1605 bp, Artificial Sequence
  derived and/or modified sequence
atggaagaggagatgcagcccgctgaggaaggaccaagtgtacctaaaatttataagcagcgttctccctactcagttcttaagacattccccagtaagagaccagccctggctaagcgctatgagcgccctacattagtcgagctgccgcatgtgcgcgcacccccaccacctccgccaccattcgcccctcatgccgcagtctctataagcagctctgagccaccccctcagcaattccaggcccaatcgagctatcctcctggtcccggaagggctgcagcagcggcatcaagttcaagcccctcttgtacccctgccacaagccaaggacacctgagaactcccgctcagcctcctcccgcttcaccagccgcttcatccagcagtagctttgcagcagtcgtgcggtacggaccaggagctgccgcagctgccggtactggcggtacaggtagtgacagtgcttctctcgagctctctgctgaaagtcgaatgattttagacgcattcgcacagcaatgctcacgggtgcttagcctcctgaattgcggcggaaagttactggattccaatcactcacaatctatgattagctgtgtgaaacaggagggcagcagttataacgagcgtcaggagcattgccatattggtaaaggcgtgcactcacaaacttcagacaatgtggacatcgagatgcagtatatgcagagaaaacaacagacttccgcttttctgcgcgtgttcaccgactccctgcagaactaccttctctctggcagcttccccactccaaacccctcctccgcttccgagtacggacaccttgctgatgtggatccactttccacaagcccagtgcacactttgggtggctggactagcccagccaccagcgagagtcacggacaccccagcagctccacacttcctgaggaagaggaggaagaggacgaggagggttactgcccacgatgccaggagctggagcaggaggtcatatcgttacagcaggaaaacgaggagctgagaagaaagctggaatccatccccgtgccctgccagactgttttggattatctgaagatggtgttgcagcatcacaatcagctactcataccgcagccagcagatcagcctaccgagggctcaaaacagctgttaaacaactacccagtgtatataaccagtaagcagtgggatgaagcggtgaatagctctaaaaaggacggaaggcgcctcttgcgctatctgataaggtttgtgtttaccactgacgaattgaagtattcctgcggcttggggaagcggaaacggagcgtgcagtcgggggaaactggcccagagcggcgacctctcgatccagtgaaagtgacatgtctcagagaattcatccgaatgcactgcaccagtaatccagattggtggatgcctagcgaggagcagattaataaagtcttcagtgatgcggtcggccacgctagacagggcagggctgtcggtaccttccttcacaatggaggcagcttctatgaaggtatcgaccaccaggctagccaggatgaagtattcaataaatcctcacaggacgggagtggagactag

SEQ ID NO: 265387 - DNA, 7883 bp, Artificial Sequence
  derived and/or modified sequence
atgcagccggcagaggaggggcccagcgtccccaaaatctacaagcagcgcagcccctacagcgtcctcaagacgttccccagtttgaatgttgtttcagagagtcgaatgatcttggatgcctttgcccagcagtgcagtcgagttcttagcctcttaaattgtggaggaaaactcctggactccaaccattctcagtccatgatttcttgcgtaaagcaggaaggctcaagttacaacgaaagacaggagcactgtcacattgggaaaggggtccacagtcagacctcagacaatgtagacatagagatgcagtatatgcaaaggaaacaacaaacttctgcctttttgagggttttcactgactctctacaaaattacctgctctcgggaagctttccaactccaaacccctcgtcagccagtgaatatggccatctggccgacgtggatcctctgtcaacctctcctgtgcatacattaggtggctggacttccccagcaacgtccgaatcccatggccacccatcttcatctacactgccagaagaggaggaggaggaggacgaggaaggctattgtcctcgatgccaagagctggagcaggaggttatttcactgcaacaagaaaatgaagagctcagaaggaaattagagagcatcccagtgccctgccagaccgttttagattacttgaagatggttctgcagcaccacaaccaactcctgataccacagccagctgaccagccgacagagggaagcaagcagctgttgaacaactatcctgtctacataacgagcaaacagtgggatgaggctgtaaattcttcaaagaaagatgggagacggctccttcgatacctcatcagatttgttttcacaaccgatgagcttaagtactcatgcggccttgggaaaaggaaaaggtcagtgcagtcaggagagacaggtcccgaaagacgccctctggatccagttaaagtaacatgcctccgagaattcattaggatgcattgtacctccaaccccgattggtggatgccctcggaagagcagataaacaaagtgttcagcgacgctgtcggtcacgcccgacaggggcgggcggtggggactttcctgcacaacggtggctcattttatgaagggatcgatcaccaggcttctcaggatgaagtcttcaataaaagttcccaggatggatctggggattagtggacagaatcttcctgttgtagcagctggtcctctcaagagttccaattgtgaatgtcctgttcctgtcacctgagagtccaaagcctgtcattctgccatagtctacacattctcagctgccacagtacccaaatagaaatccattttagggttgtttgggaagtctgtggcacctacaacagacttttggaatattatattataaaaagaaaaaactacatctgatttttaaatgattactagctagatcatgagggtgaaaaaataggtgagctcctagttacctttctgaaatcttcaaactctgctacctgggcagagatagtccccaaggtaggctggggtagtgtttctgcccatgggagaaggtggagacatggagttgtgttaagggacaagaagcaaacattctcttaattcaaataagttgtctttatgttttccaaagacttgacttcatatttctcggcaaagacataggatagatgacatcatataccattttgacattaataatgtctattactaaaaggaaaccagagaacagaggcaacatctgcagacagtgattaattacaggtcaactgtttttctgttgtttaaaaaccactgtgttgatcaagaaggcactatttgatctctggagtttacaaacagtagtcatttttcattgttagtcaagaaacatccaaagatccaaaaccattttcaaatgctcagttttgtaggttaataaatccgcagtttccatagccttaaatcaggctttgttgacacaatgccaaagtgatgggtagaacaatgaaaatttaaagcaattagttgtttggtgcactgaagaccaaacaagtggtgtgactgatggtattcgctgaattgactagatgttctggcattgtatacacacagcttcaaggcgattctgacaactatgcaatgggcttgtcagtaattgctctgaaatttgagggtctttctctgctgagctgatctttagaatttgtatgaaacttgtttcccattgtccttgatgaaaacatttcatcccctccgtgcctcctttaccccaatgtaccccttagctatggctaagtcagcactgtgccgctatcccctggttaatttgttgagttccatatgtgaaattagtggtatctttggaaactttccatattggcaaatgctatagaggtgctagagtcatcatttctgagggcttcctgtttggactcaggagaggctttctttaccaaactagtccagattactacattctttgtagagcaaagggctaaatggacagcgtttattgaaggctactaatgtcatctacagacatgaccaagggtttttgaaaattggttggagattcaggttaatgagcatccattgataaagggtttttgggctatttttgtcaacataaactcataaattgtcctttagatttaatatttagtttgtattcactatatacaaagtcctagaaacaggtctttctgtagcttttgtttattagcttttttgtattactagaattcatccattgaaaagtttaatgtttatggaggtggtcatctgtcagatctgctcaatgatgtagtgggcactaatatttcaatcctgttttgagaaaattaactaaaatttgtcatatcattcaatggaatagggagaaccaatattcaattctatttggggcaaattagctaaaatttggaagtaaaagaaatgatatgggcaaatgccatgttcttacggcagccatgagaccagtctctttggctctccaaggaagaaagatacctcttaaagcattttttagaggtccgagaagtcagtgtctgtcttataagattctttgacaacatgacatcttcgctagaagaaaaacaccaccatagcctcatctgtttttccatcttaccttaatttttcattggccttaagttgtccttactgctgaatacatcgttctgtttttctaaagcaacaatatttgatcactgcttttaagaaaaacagactagcccttcttgtttttctggaagtttgagagtcctgaatatttcttcatatccaaatatcatcttggagccctatcgtgctggtcttcgctgaggctgatgagagcactttctgcacccctgctccatggccgtacatgacaacgcacctgcaccactgctgcaagggcggggggcagcagcctgtgttttggctgtcactgttacctcctgagaaggctgctgtcccaggtttgcacaccacttttgttccaaagttacacatggtctcttcctccctcgcacccattccaggttaatcatttctctatcagctgtttctccatccacagattctgaatgttgagactaattgttgggcatctcttttgcacaaggctgacagactccatactcagcatcgcacagccagttctaactcctctgctgggtctcggacctacagcttttgcctgagtgaaatgttcctacgacttttgctcctgagtgagatattccattgtacttctactgtttgtgtatctgctgggttcctttagccaagcctagcgtctgacgcaggcactagccgccactgaggccgtgatacagcatcactgtggacactgctggctcctctccttgggacatatccacactgccccttgagcttcacctttaaggctggtatgtacgtaagttcacggtggtcgtctgcatggtctcctcttgtttaaatcaggaccaacaaaggatgttcatttgtattttggcaaggcccattgggcctctgtgtagccaggttaaaagctcactcactaggatcggatgctgtcattgctctgtgagcctttcagttgaaatccttggagacttgaaggtgttgcttattattttgatttgattttctgcatctttatctggcaaatggacagattgctctcacaagaaacttagtcatgtcagcttttagagtccttcttgagtcatgttagcattggtagtgtaaaatagattgagttaaaacagctcaggatgcagctgtgcccccacttaattggtgagaggaggaggtcacggggctggcttgacaacaaagactaaatgtggcttttttgtcggtgactaggtgtggtccataagcagaagagccatacctacaaaaagtgacaactgtcctgtgttttccaaattaaaatcttgttacaaagatcatgccggcttttcgcagtgagttgaagccccaagctcagttccagccaggctcaggatgaccctcaaatgatatgtattggatagtgtaggtcaggagcctgtggaggggaccagtattttgcaagcagttactaaagtcacatttctcactgactcttgacggtgcattgttcaaaatctcatggcttaaccttagtgttaaatgctttcaagaaaaactgtaaccatttcaattttacaagtactttctcattttacttgaacattttacaagtactttctgtatttacttgtaaatatttcctctagcccttgaacccgcgcatcacttttttggttttcctcattccaccacagcatttaggtgaccgttaccatttatgtttcattaagcttcactaggaatgtaaggataatattagagcatttgcagaaaattgttatctccttttgtaggggattcgagacatatttgtagctacttcacggctgtagagttagtgggtgatcgggtattctgcattgttccttatccctttgtcagtgacagacacattgacataagagattcctacaggattataaggagagataaattattaaccatttttttacttgatccaactactccatgtcccatcaactagtggtaactgatgttgataggattttttttaagtccagtaactattcttgcagtatcagatgtttaccccaaattaggcaataacccagacttcgaatctgtaggtttatgattcctacattcccctgccgctctcaatggcttgttgcctcccttctgttgctctcagaaaacagatggagatcaggtaaagatgaaacgtgcactatatgttcagaaaagcaaacatccattgtcctcatttagattccatccttcaatttatgctctagaacctaaacctaatacccattgactacctcctgagtttcttaggtttcaattatttttttgaaatgtcatccatggataatagcttcaattttaggaaagatttaaatgtataactttcctcattcagtgctgtgtcatttcacagtacagatctgcgttaatttttgacagctcatatatacagatttttagaaatgtaatagaaaatgattttgcacatatggtgcaagtcttgctggtgtatgtttaatgtggcaacacgtgccagaactgtttggcaaaacatgtcaaatggagtgcttgagtcagaactctaatgtaaatgtgtctaaacagcagtatgtatcattatgatgtatttttgtaaacatagtgatggctgctttcagtcatgtaagtgctggataaaaataaccacttcagttggagtaatgtaggaaaacgtcacccagcagatgggtagtcctctgcaaagttacactgtcagccagtggcactggttcttttatttatgttgggtttttgttttttttttagaggagagtgaagaattgacatcagacaacatggagtgcaaaaataataacccatcaatatttgccttctaaatgtaaaatgtaaaagtttaactgatctgtgtacacattagagaccactttcacacgccacaatatgttcagttgcaggttaacactgagaggttgagacttccctcatctgatgaccagcttggttaatttgacttctgaaggcactaaattaccaagtatttgcagtaatggggaccggattaattttcctcacaattctctatagctgtctgatataagggctgtgtttttattgaatcacagatcctcaaattacagtgaaagcatgtcttgctagtaagactcatttgaaaacctctttattcttggaataattgggccagtacaagtggccagatgtatcctggccacattggaaaactatttgggcccgttcagaaccacttaactgcaacaacagtagtaactatagttaatatctatctattgagttattgtgtgacagttacttggataagtactttaatgcattctcattttaatcctcacagctaccctatgaggctgttactgttcttatccccattgtattgataaggaaactgcccagggtactcagctaagaagaggattgctttgggcataggaagcagaatgacgagttcagtcttcctcagtagttggagcacagttctcaaagcccatcaacactttggaatggatttgttgttttatttatgccatcaagggagagttgatatttgtgtattgctaaaaactactaaagtatgtcgatgcttaggtaggaacatacaaaccatatatcctctgggatctgcccaggtttctgtataaggcttgacctacgtaagatcctatgatgaagaccagaaaactttttttaaaagtaggtaaattaaaattaaaatcacgagtttgttcacatttgtcccataggttcctagtgcaaaaatgcagggagataaaagcaaacatttgaactcagtgaagtgagagtctttgggaactcctagatgttagaaatagcaccggggcatcaggtagccaacgttcaattcacttttcacgtttgtgtctttgtagctttagagctgatgagtctgattggtttggaagagagagttttaatttatgatgtcactgtgagaactgttgtgaaaattttgtaagaaaatacagtaatctgttgattttttcctgtagttttggctttcacatccctttggctgtgtttaagttcaagagcatgccaaggccatgagggtcctggcttgcacttcttgggaacagggcatgctagaggtgggtcatgaagctttcaaggtcactgttccagcccgaccctgcgcaatttaggcattgcctttatgtctctcctctctggaacttcatgtagcagcctaacaccggggccgagttgcctttactctattttctatgatgaatacttgtggagaaactgtgacaaatccattgatcctgatatttttattgttggagtcttgttgattctctatgaataatttctatttgattgtactgtgtagagttaatacccactagggatatgttaataaagctacaaatgcatagtgtaatatagaatagcaagatttttttgtgaacaatttatatagaagagtaagttgttttttaagtgttaggctcatttcttttagaaacttaaaatgttataaaagttttttaaacattcaatatttttaattataagagacatttgttactagagccaattatttcaggtgttctaattggagtgttgattttattacctcatatacctctagaatgccacgtgttctgttggggataaaattgcacaataaatgtcaagtctctgttaagtgttttaacttggtttttgcatctttctaattcattgtaaatacttttctgtttctttgaatacataacttttctctccctgaa

SEQ ID NO: 265388 - DNA, 8765 bp, Artificial Sequence
  derived and/or modified sequence
gcgatgctcggggaaagcaggaccccaaagccccgtaaacaccgcgcgaccacccgggccaagatcttcaagaggttcttttcagaaggatcggagagcaattcccgattggtagaagaacttgctgtaatacacacgtactctgacgaccccgccccaacgactagcccctcctctgtgcaaccccgagagtttggggtcatgcagggggcgccacgagctcgtttcggaagccggaccccgcccgcagccgcagaagcctcgagtccacatctgggtctctaaagtctcgccgtagccagatcccggatccccaccttcttcaccagttcccgggcgtcctccaggcattggcgaggcagcctgtcaatcaggagctcgggcggcagccccccgcgcgggggctcggcgatgccagcctcagcgacaggcggcggcggcggcggccacggcacagacacacaccctcccacacgcgcgcaccagggcagacccggcgggcaggcggcggaggcaccctcggagcccggcgcccggcggggaggggacgtgctccgagggaccggccccgaggcgccggatggaggaagagatgcagccggcagaggaggggcccagcgtccccaaaatctacaagcagcgcagcccctacagcgtcctcaagacgttccccagcaagagaccggcgctggccaagcgctacgagcgacccaccctggtggagctgccgcacgtgcgggcgcccccgccgcccccgccgcccttcgcgccgcacgccgccgtctccatcagcagcagcgagccgccgccgcagcagttccaggcgcagagctcctacccccccgggcccggccgggccgccgccgccgcttcgtcgtcgtcgccgtcctgcacgcccgccacatcccagggccacttgaggactccggcgcagccgccgcccgcgtcccccgccgcctcctcgtcgtcttcgttcgccgctgtcgtcaggtatggcccaggcgcggcggcggccgccggcaccggcggcacgggtagcgacagcgccagcctggagctcagcgcagagagtcgaatgatcttggatgcctttgcccagcagtgcagtcgagttcttagcctcttaaattgtggaggaaaactcctggactccaaccattctcagtccatgatttcttgcgtaaagcaggaaggctcaagttacaacgaaagacaggagcactgtcacattgggaaaggggtccacagtcagacctcagacaatgtagacatagagatgcagtatatgcaaaggaaacaacaaacttctgcctttttgagggttttcactgactctctacaaaattacctgctctcgggaagctttccaactccaaacccctcgtcagccagtgaatatggccatctggccgacgtggatcctctgtcaacctctcctgtgcatacattaggtggctggacttccccagcaacgtccgaatcccatggccacccatcttcatctacactgccagaagaggaggaggaggaggacgaggaaggctattgtcctcgatgccaagagctggagcaggaggttatttcactgcaacaagaaaatgaagagctcagaaggaaattagagagcatcccagtgccctgccagaccgttttagattacttgaagatggttctgcagcaccacaaccaactcctgataccacagccagctgaccagccgacagagggaagcaagcagctgttgaacaactatcctgtctacataacgagcaaacagtgggatgaggctgtaaattcttcaaagaaagatgggagacggctccttcgatacctcatcagatttgttttcacaaccgatgagcttaagtactcatgcggccttgggaaaaggaaaaggtcagtgcagtcaggagagacaggtcccgaaagacgccctctggatccagttaaagtaacatgcctccgagaattcattaggatgcattgtacctccaaccccgattggtggatgccctcggaagagcagataaacaaagtgttcagcgacgctgtcggtcacgcccgacaggggcgggcggtggggactttcctgcacaacggtggctcattttatgaagggatcgatcaccaggcttctcaggatgaagtcttcaataaaagttcccaggatggatctggggattagtggacagaatcttcctgttgtagcagctggtcctctcaagagttccaattgtgaatgtcctgttcctgtcacctgagagtccaaagcctgtcattctgccatagtctacacattctcagctgccacagtacccaaatagaaatccattttagggttgtttgggaagtctgtggcacctacaacagacttttggaatattatattataaaaagaaaaaactacatctgatttttaaatgattactagctagatcatgagggtgaaaaaataggtgagctcctagttacctttctgaaatcttcaaactctgctacctgggcagagatagtccccaaggtaggctggggtagtgtttctgcccatgggagaaggtggagacatggagttgtgttaagggacaagaagcaaacattctcttaattcaaataagttgtctttatgttttccaaagacttgacttcatatttctcggcaaagacataggatagatgacatcatataccattttgacattaataatgtctattactaaaaggaaaccagagaacagaggcaacatctgcagacagtgattaattacaggtcaactgtttttctgttgtttaaaaaccactgtgttgatcaagaaggcactatttgatctctggagtttacaaacagtagtcatttttcattgttagtcaagaaacatccaaagatccaaaaccattttcaaatgctcagttttgtaggttaataaatccgcagtttccatagccttaaatcaggctttgttgacacaatgccaaagtgatgggtagaacaatgaaaatttaaagcaattagttgtttggtgcactgaagaccaaacaagtggtgtgactgatggtattcgctgaattgactagatgttctggcattgtatacacacagcttcaaggcgattctgacaactatgcaatgggcttgtcagtaattgctctgaaatttgagggtctttctctgctgagctgatctttagaatttgtatgaaacttgtttcccattgtccttgatgaaaacatttcatcccctccgtgcctcctttaccccaatgtaccccttagctatggctaagtcagcactgtgccgctatcccctggttaatttgttgagttccatatgtgaaattagtggtatctttggaaactttccatattggcaaatgctatagaggtgctagagtcatcatttctgagggcttcctgtttggactcaggagaggctttctttaccaaactagtccagattactacattctttgtagagcaaagggctaaatggacagcgtttattgaaggctactaatgtcatctacagacatgaccaagggtttttgaaaattggttggagattcaggttaatgagcatccattgataaagggtttttgggctatttttgtcaacataaactcataaattgtcctttagatttaatatttagtttgtattcactatatacaaagtcctagaaacaggtctttctgtagcttttgtttattagcttttttgtattactagaattcatccattgaaaagtttaatgtttatggaggtggtcatctgtcagatctgctcaatgatgtagtgggcactaatatttcaatcctgttttgagaaaattaactaaaatttgtcatatcattcaatggaatagggagaaccaatattcaattctatttggggcaaattagctaaaatttggaagtaaaagaaatgatatgggcaaatgccatgttcttacggcagccatgagaccagtctctttggctctccaaggaagaaagatacctcttaaagcattttttagaggtccgagaagtcagtgtctgtcttataagattctttgacaacatgacatcttcgctagaagaaaaacaccaccatagcctcatctgtttttccatcttaccttaatttttcattggccttaagttgtccttactgctgaatacatcgttctgtttttctaaagcaacaatatttgatcactgcttttaagaaaaacagactagcccttcttgtttttctggaagtttgagagtcctgaatatttcttcatatccaaatatcatcttggagccctatcgtgctggtcttcgctgaggctgatgagagcactttctgcacccctgctccatggccgtacatgacaacgcacctgcaccactgctgcaagggcggggggcagcagcctgtgttttggctgtcactgttacctcctgagaaggctgctgtcccaggtttgcacaccacttttgttccaaagttacacatggtctcttcctccctcgcacccattccaggttaatcatttctctatcagctgtttctccatccacagattctgaatgttgagactaattgttgggcatctcttttgcacaaggctgacagactccatactcagcatcgcacagccagttctaactcctctgctgggtctcggacctacagcttttgcctgagtgaaatgttcctacgacttttgctcctgagtgagatattccattgtacttctactgtttgtgtatctgctgggttcctttagccaagcctagcgtctgacgcaggcactagccgccactgaggccgtgatacagcatcactgtggacactgctggctcctctccttgggacatatccacactgccccttgagcttcacctttaaggctggtatgtacgtaagttcacggtggtcgtctgcatggtctcctcttgtttaaatcaggaccaacaaaggatgttcatttgtattttggcaaggcccattgggcctctgtgtagccaggttaaaagctcactcactaggatcggatgctgtcattgctctgtgagcctttcagttgaaatccttggagacttgaaggtgttgcttattattttgatttgattttctgcatctttatctggcaaatggacagattgctctcacaagaaacttagtcatgtcagcttttagagtccttcttgagtcatgttagcattggtagtgtaaaatagattgagttaaaacagctcaggatgcagctgtgcccccacttaattggtgagaggaggaggtcacggggctggcttgacaacaaagactaaatgtggcttttttgtcggtgactaggtgtggtccataagcagaagagccatacctacaaaaagtgacaactgtcctgtgttttccaaattaaaatcttgttacaaagatcatgccggcttttcgcagtgagttgaagccccaagctcagttccagccaggctcaggatgaccctcaaatgatatgtattggatagtgtaggtcaggagcctgtggaggggaccagtattttgcaagcagttactaaagtcacatttctcactgactcttgacggtgcattgttcaaaatctcatggcttaaccttagtgttaaatgctttcaagaaaaactgtaaccatttcaattttacaagtactttctcattttacttgaacattttacaagtactttctgtatttacttgtaaatatttcctctagcccttgaacccgcgcatcacttttttggttttcctcattccaccacagcatttaggtgaccgttaccatttatgtttcattaagcttcactaggaatgtaaggataatattagagcatttgcagaaaattgttatctccttttgtaggggattcgagacatatttgtagctacttcacggctgtagagttagtgggtgatcgggtattctgcattgttccttatccctttgtcagtgacagacacattgacataagagattcctacaggattataaggagagataaattattaaccatttttttacttgatccaactactccatgtcccatcaactagtggtaactgatgttgataggattttttttaagtccagtaactattcttgcagtatcagatgtttaccccaaattaggcaataacccagacttcgaatctgtaggtttatgattcctacattcccctgccgctctcaatggcttgttgcctcccttctgttgctctcagaaaacagatggagatcaggtaaagatgaaacgtgcactatatgttcagaaaagcaaacatccattgtcctcatttagattccatccttcaatttatgctctagaacctaaacctaatacccattgactacctcctgagtttcttaggtttcaattatttttttgaaatgtcatccatggataatagcttcaattttaggaaagatttaaatgtataactttcctcattcagtgctgtgtcatttcacagtacagatctgcgttaatttttgacagctcatatatacagatttttagaaatgtaatagaaaatgattttgcacatatggtgcaagtcttgctggtgtatgtttaatgtggcaacacgtgccagaactgtttggcaaaacatgtcaaatggagtgcttgagtcagaactctaatgtaaatgtgtctaaacagcagtatgtatcattatgatgtatttttgtaaacatagtgatggctgctttcagtcatgtaagtgctggataaaaataaccacttcagttggagtaatgtaggaaaacgtcacccagcagatgggtagtcctctgcaaagttacactgtcagccagtggcactggttcttttatttatgttgggtttttgttttttttttagaggagagtgaagaattgacatcagacaacatggagtgcaaaaataataacccatcaatatttgccttctaaatgtaaaatgtaaaagtttaactgatctgtgtacacattagagaccactttcacacgccacaatatgttcagttgcaggttaacactgagaggttgagacttccctcatctgatgaccagcttggttaatttgacttctgaaggcactaaattaccaagtatttgcagtaatggggaccggattaattttcctcacaattctctatagctgtctgatataagggctgtgtttttattgaatcacagatcctcaaattacagtgaaagcatgtcttgctagtaagactcatttgaaaacctctttattcttggaataattgggccagtacaagtggccagatgtatcctggccacattggaaaactatttgggcccgttcagaaccacttaactgcaacaacagtagtaactatagttaatatctatctattgagttattgtgtgacagttacttggataagtactttaatgcattctcattttaatcctcacagctaccctatgaggctgttactgttcttatccccattgtattgataaggaaactgcccagggtactcagctaagaagaggattgctttgggcataggaagcagaatgacgagttcagtcttcctcagtagttggagcacagttctcaaagcccatcaacactttggaatggatttgttgttttatttatgccatcaagggagagttgatatttgtgtattgctaaaaactactaaagtatgtcgatgcttaggtaggaacatacaaaccatatatcctctgggatctgcccaggtttctgtataaggcttgacctacgtaagatcctatgatgaagaccagaaaactttttttaaaagtaggtaaattaaaattaaaatcacgagtttgttcacatttgtcccataggttcctagtgcaaaaatgcagggagataaaagcaaacatttgaactcagtgaagtgagagtctttgggaactcctagatgttagaaatagcaccggggcatcaggtagccaacgttcaattcacttttcacgtttgtgtctttgtagctttagagctgatgagtctgattggtttggaagagagagttttaatttatgatgtcactgtgagaactgttgtgaaaattttgtaagaaaatacagtaatctgttgattttttcctgtagttttggctttcacatccctttggctgtgtttaagttcaagagcatgccaaggccatgagggtcctggcttgcacttcttgggaacagggcatgctagaggtgggtcatgaagctttcaaggtcactgttccagcccgaccctgcgcaatttaggcattgcctttatgtctctcctctctggaacttcatgtagcagcctaacaccggggccgagttgcctttactctattttctatgatgaatacttgtggagaaactgtgacaaatccattgatcctgatatttttattgttggagtcttgttgattctctatgaataatttctatttgattgtactgtgtagagttaatacccactagggatatgttaataaagctacaaatgcatagtgtaatatagaatagcaagatttttttgtgaacaatttatatagaagagtaagttgttttttaagtgttaggctcatttcttttagaaacttaaaatgttataaaagttttttaaacattcaatatttttaattataagagacatttgttactagagccaattatttcaggtgttctaattggagtgttgattttattacctcatatacctctagaatgccacgtgttctgttggggataaaattgcacaataaatgtcaagtctctgttaa

SEQ ID NO: 265389 - DNA, 8692 bp, Artificial Sequence
  derived and/or modified sequence
gcgatgctcggggaaagcaggaccccaaagccccgtaaacaccgcgcgaccacccgggccaagatcttcaagaggttcttttcagaaggatcggagagcaattcccgattggtagaagaacttgctgtaatacacacgtactctgacgaccccgccccaacgactagcccctcctctgtgcaaccccgagagtttggggtcatgcagggggcgccacgagctcgtttcggaagccggaccccgcccgcagccgcagaagcctcgagtccacatctgggtctctaaagtctcgccgtagccagatcccggatccccaccttcttcaccagttcccgggcgtcctccaggcattggcgaggcagcctgtcaatcaggagctcgggcggcagccccccgcgcgggggctcggcgatgccagcctcagcgacaggcggcggcggcggcggccacggcacagacacacaccctcccacacgcgcgcaccagggcagacccggcgggcaggcggcggaggcaccctcggagcccggcgcccggcggggaggggacgtgctccgagggaccggccccgaggcgccggatggaggaagagatgcagccggcagaggaggggcccagcgtccccaaaatctacaagcagcgcagcccctacagcgtcctcaagacgttccccagcaagagaccggcgctggccaagcgctacgagcgacccaccctggtggagctgccgcacgtgcgggcgcccccgccgcccccgccgcccttcgcgccgcacgccgccgtctccatcagcagcagcgagccgccgccgcagcagttccaggcgcagagctcctacccccccgggcccggccgggccgccgccgccgcttcgtcgtcgtcgccgtcctgcacgcccgccacatcccagggccacttgaggactccggcgcagccgccgcccgcgtcccccgccgcctcctcgtcgtcttcgttcgccgctgtcgtcaggtatggcccaggcgcggcggcggccgccggcaccggcggcacgggtagcgacagcgccagcctggagctcagcgcagagagtcgaatgatcttggatgcctttgcccagcagtgcagtcgagttcttagcctcttaaattgtggaggaaaactcctggactccaaccattctcagtccatgatttcttgcgtaaagcaggaaggctcaagttacaacgaaagacaggagcactgtcacattgggaaaggggtccacagtcagacctcagacaatgtagacatagagatgcagtatatgcaaaggaaacaacaaacttctgcctttttgagggttttcactgactctctacaaaattacctgctctcgggaagctttccaactccaaacccctcgtcagccagtgaatatggccatctggccgacgtggatcctctgtcaacctctcctgtgcatacattaggtggctggacttccccagcaacgtccgaatcccatggccacccatcttcatctacactgccagaagaggaggaggaggaggacgaggaaggctattgtcctcgatgccaagagctggagcaggaggttatttcactgcaacaagaaaatgaagagctcagaaggaaattagagagcatcccagtgccctgccagaccgttttagattacttgaagatggttctgcagcaccacaaccaactcctgataccacagccagctgaccagccgacagagggaagcaagcagctgttgaacaactatcctgtctacataacgagcaaacagtgggatgaggctgtaaattcttcaaagaaagatgggagacggctccttcgatacctcatcagatttgttttcacaaccgatgagcttaagtactcatgcggccttgggaaaaggaaaagaattcattaggatgcattgtacctccaaccccgattggtggatgccctcggaagagcagataaacaaagtgttcagcgacgctgtcggtcacgcccgacaggggcgggcggtggggactttcctgcacaacggtggctcattttatgaagggatcgatcaccaggcttctcaggatgaagtcttcaataaaagttcccaggatggatctggggattagtggacagaatcttcctgttgtagcagctggtcctctcaagagttccaattgtgaatgtcctgttcctgtcacctgagagtccaaagcctgtcattctgccatagtctacacattctcagctgccacagtacccaaatagaaatccattttagggttgtttgggaagtctgtggcacctacaacagacttttggaatattatattataaaaagaaaaaactacatctgatttttaaatgattactagctagatcatgagggtgaaaaaataggtgagctcctagttacctttctgaaatcttcaaactctgctacctgggcagagatagtccccaaggtaggctggggtagtgtttctgcccatgggagaaggtggagacatggagttgtgttaagggacaagaagcaaacattctcttaattcaaataagttgtctttatgttttccaaagacttgacttcatatttctcggcaaagacataggatagatgacatcatataccattttgacattaataatgtctattactaaaaggaaaccagagaacagaggcaacatctgcagacagtgattaattacaggtcaactgtttttctgttgtttaaaaaccactgtgttgatcaagaaggcactatttgatctctggagtttacaaacagtagtcatttttcattgttagtcaagaaacatccaaagatccaaaaccattttcaaatgctcagttttgtaggttaataaatccgcagtttccatagccttaaatcaggctttgttgacacaatgccaaagtgatgggtagaacaatgaaaatttaaagcaattagttgtttggtgcactgaagaccaaacaagtggtgtgactgatggtattcgctgaattgactagatgttctggcattgtatacacacagcttcaaggcgattctgacaactatgcaatgggcttgtcagtaattgctctgaaatttgagggtctttctctgctgagctgatctttagaatttgtatgaaacttgtttcccattgtccttgatgaaaacatttcatcccctccgtgcctcctttaccccaatgtaccccttagctatggctaagtcagcactgtgccgctatcccctggttaatttgttgagttccatatgtgaaattagtggtatctttggaaactttccatattggcaaatgctatagaggtgctagagtcatcatttctgagggcttcctgtttggactcaggagaggctttctttaccaaactagtccagattactacattctttgtagagcaaagggctaaatggacagcgtttattgaaggctactaatgtcatctacagacatgaccaagggtttttgaaaattggttggagattcaggttaatgagcatccattgataaagggtttttgggctatttttgtcaacataaactcataaattgtcctttagatttaatatttagtttgtattcactatatacaaagtcctagaaacaggtctttctgtagcttttgtttattagcttttttgtattactagaattcatccattgaaaagtttaatgtttatggaggtggtcatctgtcagatctgctcaatgatgtagtgggcactaatatttcaatcctgttttgagaaaattaactaaaatttgtcatatcattcaatggaatagggagaaccaatattcaattctatttggggcaaattagctaaaatttggaagtaaaagaaatgatatgggcaaatgccatgttcttacggcagccatgagaccagtctctttggctctccaaggaagaaagatacctcttaaagcattttttagaggtccgagaagtcagtgtctgtcttataagattctttgacaacatgacatcttcgctagaagaaaaacaccaccatagcctcatctgtttttccatcttaccttaatttttcattggccttaagttgtccttactgctgaatacatcgttctgtttttctaaagcaacaatatttgatcactgcttttaagaaaaacagactagcccttcttgtttttctggaagtttgagagtcctgaatatttcttcatatccaaatatcatcttggagccctatcgtgctggtcttcgctgaggctgatgagagcactttctgcacccctgctccatggccgtacatgacaacgcacctgcaccactgctgcaagggcggggggcagcagcctgtgttttggctgtcactgttacctcctgagaaggctgctgtcccaggtttgcacaccacttttgttccaaagttacacatggtctcttcctccctcgcacccattccaggttaatcatttctctatcagctgtttctccatccacagattctgaatgttgagactaattgttgggcatctcttttgcacaaggctgacagactccatactcagcatcgcacagccagttctaactcctctgctgggtctcggacctacagcttttgcctgagtgaaatgttcctacgacttttgctcctgagtgagatattccattgtacttctactgtttgtgtatctgctgggttcctttagccaagcctagcgtctgacgcaggcactagccgccactgaggccgtgatacagcatcactgtggacactgctggctcctctccttgggacatatccacactgccccttgagcttcacctttaaggctggtatgtacgtaagttcacggtggtcgtctgcatggtctcctcttgtttaaatcaggaccaacaaaggatgttcatttgtattttggcaaggcccattgggcctctgtgtagccaggttaaaagctcactcactaggatcggatgctgtcattgctctgtgagcctttcagttgaaatccttggagacttgaaggtgttgcttattattttgatttgattttctgcatctttatctggcaaatggacagattgctctcacaagaaacttagtcatgtcagcttttagagtccttcttgagtcatgttagcattggtagtgtaaaatagattgagttaaaacagctcaggatgcagctgtgcccccacttaattggtgagaggaggaggtcacggggctggcttgacaacaaagactaaatgtggcttttttgtcggtgactaggtgtggtccataagcagaagagccatacctacaaaaagtgacaactgtcctgtgttttccaaattaaaatcttgttacaaagatcatgccggcttttcgcagtgagttgaagccccaagctcagttccagccaggctcaggatgaccctcaaatgatatgtattggatagtgtaggtcaggagcctgtggaggggaccagtattttgcaagcagttactaaagtcacatttctcactgactcttgacggtgcattgttcaaaatctcatggcttaaccttagtgttaaatgctttcaagaaaaactgtaaccatttcaattttacaagtactttctcattttacttgaacattttacaagtactttctgtatttacttgtaaatatttcctctagcccttgaacccgcgcatcacttttttggttttcctcattccaccacagcatttaggtgaccgttaccatttatgtttcattaagcttcactaggaatgtaaggataatattagagcatttgcagaaaattgttatctccttttgtaggggattcgagacatatttgtagctacttcacggctgtagagttagtgggtgatcgggtattctgcattgttccttatccctttgtcagtgacagacacattgacataagagattcctacaggattataaggagagataaattattaaccatttttttacttgatccaactactccatgtcccatcaactagtggtaactgatgttgataggattttttttaagtccagtaactattcttgcagtatcagatgtttaccccaaattaggcaataacccagacttcgaatctgtaggtttatgattcctacattcccctgccgctctcaatggcttgttgcctcccttctgttgctctcagaaaacagatggagatcaggtaaagatgaaacgtgcactatatgttcagaaaagcaaacatccattgtcctcatttagattccatccttcaatttatgctctagaacctaaacctaatacccattgactacctcctgagtttcttaggtttcaattatttttttgaaatgtcatccatggataatagcttcaattttaggaaagatttaaatgtataactttcctcattcagtgctgtgtcatttcacagtacagatctgcgttaatttttgacagctcatatatacagatttttagaaatgtaatagaaaatgattttgcacatatggtgcaagtcttgctggtgtatgtttaatgtggcaacacgtgccagaactgtttggcaaaacatgtcaaatggagtgcttgagtcagaactctaatgtaaatgtgtctaaacagcagtatgtatcattatgatgtatttttgtaaacatagtgatggctgctttcagtcatgtaagtgctggataaaaataaccacttcagttggagtaatgtaggaaaacgtcacccagcagatgggtagtcctctgcaaagttacactgtcagccagtggcactggttcttttatttatgttgggtttttgttttttttttagaggagagtgaagaattgacatcagacaacatggagtgcaaaaataataacccatcaatatttgccttctaaatgtaaaatgtaaaagtttaactgatctgtgtacacattagagaccactttcacacgccacaatatgttcagttgcaggttaacactgagaggttgagacttccctcatctgatgaccagcttggttaatttgacttctgaaggcactaaattaccaagtatttgcagtaatggggaccggattaattttcctcacaattctctatagctgtctgatataagggctgtgtttttattgaatcacagatcctcaaattacagtgaaagcatgtcttgctagtaagactcatttgaaaacctctttattcttggaataattgggccagtacaagtggccagatgtatcctggccacattggaaaactatttgggcccgttcagaaccacttaactgcaacaacagtagtaactatagttaatatctatctattgagttattgtgtgacagttacttggataagtactttaatgcattctcattttaatcctcacagctaccctatgaggctgttactgttcttatccccattgtattgataaggaaactgcccagggtactcagctaagaagaggattgctttgggcataggaagcagaatgacgagttcagtcttcctcagtagttggagcacagttctcaaagcccatcaacactttggaatggatttgttgttttatttatgccatcaagggagagttgatatttgtgtattgctaaaaactactaaagtatgtcgatgcttaggtaggaacatacaaaccatatatcctctgggatctgcccaggtttctgtataaggcttgacctacgtaagatcctatgatgaagaccagaaaactttttttaaaagtaggtaaattaaaattaaaatcacgagtttgttcacatttgtcccataggttcctagtgcaaaaatgcagggagataaaagcaaacatttgaactcagtgaagtgagagtctttgggaactcctagatgttagaaatagcaccggggcatcaggtagccaacgttcaattcacttttcacgtttgtgtctttgtagctttagagctgatgagtctgattggtttggaagagagagttttaatttatgatgtcactgtgagaactgttgtgaaaattttgtaagaaaatacagtaatctgttgattttttcctgtagttttggctttcacatccctttggctgtgtttaagttcaagagcatgccaaggccatgagggtcctggcttgcacttcttgggaacagggcatgctagaggtgggtcatgaagctttcaaggtcactgttccagcccgaccctgcgcaatttaggcattgcctttatgtctctcctctctggaacttcatgtagcagcctaacaccggggccgagttgcctttactctattttctatgatgaatacttgtggagaaactgtgacaaatccattgatcctgatatttttattgttggagtcttgttgattctctatgaataatttctatttgattgtactgtgtagagttaatacccactagggatatgttaataaagctacaaatgcatagtgtaatatagaatagcaagatttttttgtgaacaatttatatagaagagtaagttgttttttaagtgttaggctcatttcttttagaaacttaaaatgttataaaagttttttaaacattcaatatttttaattataagagacatttgttactagagccaattatttcaggtgttctaattggagtgttgattttattacctcatatacctctagaatgccacgtgttctgttggggataaaattgcacaataaatgtcaagtctctgtt

SEQ ID NO: 265390 - protein, 223 aa, Artificial Sequence
  derived and/or modified sequence
MRPLGKGLLPAEELIRSNLGVGRSLRDCLSQSGKLAEELGSKRLKPAKFGTEGKERVEQRTERQRTGSSKEPRMQIICRRRWREPPPRLLWGCLMPRAQPLLHVTAYENTGHWERLASVVSSKTQQPTVISHSSISITFSHYPPATLDSFLVLEPIKLFPVSSLRSPLCLNCGSCRESIRISGELIGNAHSPAPPRTPELETLGWDKQAVLSGAQVILVCAEV

SEQ ID NO: 265391 - DNA, 672 bp, Artificial Sequence
  derived and/or modified sequence
atgagacccctgggcaagggcctgctgcccgccgaggagctgatcagaagcaacctgggcgtgggcagaagcctgagagactgcctgagccagagcggcaagctggccgaggagctgggcagcaagagactgaagcccgccaagttcggcaccgagggcaaggagagagtggagcagagaaccgagagacagagaaccggcagcagcaaggagcccagaatgcagatcatctgcagaagaagatggagagagcccccccccagactgctgtggggctgcctgatgcccagagcccagcccctgctgcacgtgaccgcctacgagaacaccggccactgggagagactggccagcgtggtgagcagcaagacccagcagcccaccgtgatcagccacagcagcatcagcatcaccttcagccactacccccccgccaccctggacagcttcctggtgctggagcccatcaagctgttccccgtgagcagcctgagaagccccctgtgcctgaactgcggcagctgcagagagagcatcagaatcagcggcgagctgatcggcaacgcccacagccccgccccccccagaacccccgagctggagaccctgggctgggacaagcaggccgtgctgagcggcgcccaggtgatcctggtgtgcgccgaggtgtag

SEQ ID NO: 265392 - DNA, 2250 bp, Artificial Sequence
  derived and/or modified sequence
aagagatgctcaggtcagggagggaatgagacccctggggaagggactcctcccagctgaggagttgattagaagcaatcttggagttggcaggagccttagagactgcctgagccagtccgggaagctggctgaggagcttgggagcaagagactaaaaccagccaagtttgggacagaagggaaggaaagggttgagcagcgaacagagagacaaagaacaggcagttccaaagagccaagaatgcaaatcatttgcagacgccgctggcgagagcctccaccaaggctgctgtgggggtgcctgatgccacgagcacagccacttctacacgtcacggcttatgagaatacaggccactgggagagactcgcatctgtggtttcttcaaaaacacagcagcccacagtgatctctcattcttccatttctatcacattcagtcattaccctccagccacactggactcctttcttgtcctggaacctatcaaactctttcctgtctcaagcctccgcagtcctctctgcttgaactgtggctcctgcagagaaagcatcagaatctccggggaactgattggaaatgcacattctccagccccgcccagaactcctgaattagaaaccctggggtgggacaagcaagccgtgctttctggggcacaggtgattctggtgtgtgctgaagtttaagaaccactggccgagaacattcttaggtctgctcttcttttgcccggcccctccctcgcggaggaattccttcttattcctctctgaagagtggctgctgccaaaaaacgtttgtgagatggcctgggttttctttgttgatttatcatttagtttggaagaaatcagaagtctctttaagaagccaatttgaaacattcaccccatgggaacagttctggatgaagtcagaagatctggaggcagcgcagtaacacacgtaggttttctggccatatggacatttcagagaaaacaacgcacagaggcctggagcaggtgaactggcttaagtagagagaaactaagtcatttggggatatttagcacctaatgtcaaggcagaaatgtctaagatgtaattaacagttatattctaatctcaatagtagctaagtacagacttaaacataagcctgtatataacaaaataaccccaggagaaccaaagaaaatctagaagttgctgctaaaaacagttatgttagtgatacctaggaaagttttttttcttttaacatgtcattgtggtttacaaatgaaaattgaggccgggcgtggtggctcacgcctgtaatcccagcacttttggaggccaaggtgggcgaatcacaaggtcaggagttcaagaccagtctggccaacatggtgaaaccccatctttactaaaaatacaaaaaattagctgggcgtggtggtgggcgcctgtaatctcagctactagggaggctgaggaaggagaatcgcttgaacctgggaggcggaggttgcagtgagccaagatcatgccaccgcactccagcctgggcaacagtgtgagactccatctcaaaacaaacaaacaaacaaatgaaacaaatgaaaattgaaacttcacccatttatggctattgcctaaagaatttataaatgcctgggtcattgcaagcatattgctgacatgtctctcggtctgcgttaccctggtggacatcacgacactcacctgacaggcagcagcttccttccagtaaaagcaaagaatctgaaaggaatggaaaaggctccacacagtgccattttatagaaggaaatgcaacaaggtcacagaccagaaggacagcagcccaggccggctgggcatggaggaagtcccaagatgctgctgggcatgaacagacctcctcatacagtgtgcctctgaagaaataatgcaattgtgtggggccagaggagccacaaatagaacaaagggaggaaaggaaaaatcaatatgcagtaaagaggaggaagggagcccggcgcgatgtctgaatctcgctggcaagaaaaggaaacaggtggtctaagcaggcaacccttcaccccacattgtaatgctggggcatggacgtgttccatagatcactcactgagaagtcttcacaagaacactccaaggcagacactactatccatcttccacacactgggggattgagagtcagaaggattatacagcttgttcaaattataaataaaagccctgagatttg

SEQ ID NO: 265393 - DNA, 672 bp, Artificial Sequence
  derived and/or modified sequence
atgcgacccctaggaaagggcttactgcctgccgaagagcttatccggagcaacctaggagtgggtaggagtctgcgcgattgcctctcccagtctggcaaactcgcggaggagttgggctctaaacgcctcaaaccggccaaattcgggacagaagggaaggagcgggtggaacaaaggacggagaggcagcggactggatcttctaaagaacccaggatgcagatcatatgtcgaaggaggtggcgagagcccccaccccgcctactctgggggtgcttaatgcccagggcacaaccgctgctgcatgtcaccgcttacgagaacacaggacactgggagcgacttgcatcagtggtgagtagcaaaactcagcagccaaccgtgatcagccactctagcatctctatcacattcagtcactatccccccgcgacactcgacagcttcctggtcctggagccaatcaaactcttcccagtctcatctctgcggagccccctttgcctgaattgcggaagctgccgcgaatctatacgcatttccggtgagctgatcggcaacgcccattctcctgcccccccgagaactcctgagctggagaccctcgggtgggacaaacaggcggtactcagcggggctcaggtgatcttggtctgcgccgaggtgtag

SEQ ID NO: 265394 - DNA, 672 bp, Artificial Sequence
  derived and/or modified sequence
atgaggcccctgggcaagggcctgctgcctgctgaggagctgatccgcagcaacctgggcgtgggccgcagcctgcgggactgcctgagccagagcggcaagctggccgaggagctgggcagcaagaggctgaagccagccaagtttggaacagagggcaaggagcgggtggagcagaggacagagcggcagaggacaggcagcagcaaggagcccaggatgcagatcatctgcagaagacgctggagggagcccccaccccggctgctgtggggctgcctgatgccccgggcccagcccctgctgcacgtgacagcctatgagaacacaggccactgggagcggctggcctctgtggtgagcagcaagacccagcagcccaccgtcatcagccacagcagcatcagcatcaccttcagccactaccccccagccaccctggacagcttcctggtgctggagcccatcaagctgtttcctgtgagcagcctgcggagccccctgtgcctgaactgtggcagctgccgggagagcatccgcatcagcggggagctgattggaaatgcccacagccctgccccacccaggaccccagagctggagaccctgggctgggacaagcaggccgtgctgagcggggcccaggtgatcctggtgtgtgccgaggtgtag

SEQ ID NO: 265395 - DNA, 672 bp, Artificial Sequence
  derived and/or modified sequence
atgcggcccctgggcaagggcctgctgcccgccgaggagctgatccgaagcaatctgggggtggggcggtccctccgcgactgtctaagccaaagcggaaagctcgctgaggaacttgggagcaaaagattgaagcccgccaaattcggaaccgaaggtaaggagcgcgtggagcagaggacagagagacagagaacaggctccagcaaagaacctcgtatgcaaatcatctgcaggagaaggtggcgcgagcctcctccaagactcctttggggatgtcttatgccacgcgcgcagcccctgctgcatgtcaccgcttacgaaaacactggacattgggaaaggcttgcgtccgtcgtttcatccaaaacacagcagccgactgtcatctcacacagctcaattagcatcacatttagccattatccacccgcgaccctggactcatttctggtgctagagccgatcaagctgttccctgttagctctcttagatctccgctatgtttgaactgcgggtcctgtcgcgagagcatccgcatcagcggtgagctgattggtaacgctcattctcctgcccctccaaggactcctgagctagagacgctcggatgggacaagcaggctgtcctgtctggagcccaggtgatcctcgtgtgtgccgaagtatag

SEQ ID NO: 265396 - DNA, 672 bp, Artificial Sequence
  derived and/or modified sequence
atgcgcccattggggaaaggtctgctgcctgcagaggagctgatccgcagtaacttaggtgtgggtagaagcctcagggactgtttgtctcagtcaggaaagcttgccgaagaattaggcagcaagcgcctcaagccagccaagttcggaaccgagggaaaagagcgggtggagcaacgtactgagaggcagaggaccgggagttctaaggaaccccgaatgcagattatctgccgtcgcaggtggagggagcctcccccaagattgctttggggctgtctcatgcccagggcccagcctttgcttcatgtgactgcttacgagaatactggtcactgggagcggctggcctctgttgtatccagcaagacccagcaacccacggtgatttcacacagttctattagcatcactttttcgcactaccctccggctacattggactctttcctcgtcttggagcccattaaattgtttcctgtgtcctctctgcggtctcctttgtgcttgaattgtggctcctgccgtgaatcaatcaggatttccggggagctcatcggcaacgcccatagcccagctcctccgcgaactcctgaacttgagacactggggtgggataaacaggcagtgttgagcggggcacaggttattctggtgtgcgcagaggtttag

SEQ ID NO: 265397 - protein, 320 aa, Artificial Sequence
  derived and/or modified sequence
MPEARSSGPDLTRWRKQQQPVRRTVSQVCPPPRRPLTVADIRSGMENERLGVVRDSMFQNPLIVKAAGPASVGTSYSVYDSSAVQKVIPSLAGHHIKGGPQAELGKPRERSYSLPGINFNYGLYIRGLDGGVPEAIGRWNVFKQQPTCPHELTRNYIAMNRGAVKAGLVTARENLLYRQLNDIRISDQDDRRMKKEPPPLPPNMTFGIRARPSTPFFDLLQHRYLQLWVQEQKATQKAIKLEKKQKVVLGKLYETRSSQLRKYKPPVKLDTLWHMPHFQKVGRHLDTFPTEADRQRALKAHREECAVRQGTLRMGNYTHP

SEQ ID NO: 265398 - DNA, 963 bp, Artificial Sequence
  derived and/or modified sequence
atgcccgaggccagaagcagcggccccgacctgaccagatggagaaagcagcagcagcccgtgagaagaaccgtgagccaggtgtgccccccccccagaagacccctgaccgtggccgacatcagaagcggcatggagaacgagagactgggcgtggtgagagacagcatgttccagaaccccctgatcgtgaaggccgccggccccgccagcgtgggcaccagctacagcgtgtacgacagcagcgccgtgcagaaggtgatccccagcctggccggccaccacatcaagggcggcccccaggccgagctgggcaagcccagagagagaagctacagcctgcccggcatcaacttcaactacggcctgtacatcagaggcctggacggcggcgtgcccgaggccatcggcagatggaacgtgttcaagcagcagcccacctgcccccacgagctgaccagaaactacatcgccatgaacagaggcgccgtgaaggccggcctggtgaccgccagagagaacctgctgtacagacagctgaacgacatcagaatcagcgaccaggacgacagaagaatgaagaaggagcccccccccctgccccccaacatgaccttcggcatcagagccagacccagcacccccttcttcgacctgctgcagcacagatacctgcagctgtgggtgcaggagcagaaggccacccagaaggccatcaagctggagaagaagcagaaggtggtgctgggcaagctgtacgagaccagaagcagccagctgagaaagtacaagccccccgtgaagctggacaccctgtggcacatgccccacttccagaaggtgggcagacacctggacaccttccccaccgaggccgacagacagagagccctgaaggcccacagagaggagtgcgccgtgagacagggcaccctgagaatgggcaactacacccacccctag

SEQ ID NO: 265399 - DNA, 1818 bp, Artificial Sequence
  derived and/or modified sequence
aagcgcgcccaaaccagcccgcgggccggctccccggcgacctcaaggatgccagaggccaggagctccggcccggacctcacgcgatggaggaagcagcagcagcctgtgcgccgcacggtcagccaggtctgcccgcccccgcggcggcccctgaccgtggcggacatccgttccggcatggagaacgagcggctgggggtcgtgcgggactccatgtttcagaaccctctcatcgtcaaggctgccggcccggcctcggtgggaacctcttattctgtttatgactcctcagcggtgcagaaagttattccttcccttgctggacaccacatcaaaggaggcccacaggctgaactcggcaagccccgggaaagaagctacagtctgcccggcattaattttaattatggactctacatccgagggcttgacggaggagtccctgaagccatcggacgctggaacgtgttcaagcagcagcccacctgcccccacgagctgacccggaattatatcgcaatgaaccgcggggcggtgaaagccggcctggtgactgcccgggagaacttgctctaccgtcagctcaatgacatccgcatcagtgaccaggatgaccggcgcatgaagaaagagccgccccctctccctccaaacatgacatttgggatccgggcacggccttccacacccttctttgatctgctgcagcaccggtacctgcagctgtgggtacaggaacaaaaggccacccagaaagccatcaaactggagaagaagcagaaggtggtccttgggaagctgtatgagacccggagcagtcagctgaggaagtacaagccgcccgtgaagctggacaccctctggcacatgcctcacttccagaaggtgggccgccaccttgatacgttccccacggaggccgatcgccagagagcattaaaagcccaccgggaagagtgtgccgtgcgccaggggaccctgcggatgggcaactacacccacccctagcccctccctcccctgccacaagaagccatcttgacatagtggaaaattcccagaaggactccctatcttgccccaaccctgacattcccccatttttatgcaggttctgcttcaaggagctcagattcaagtcttaggctaattgtttttggtaaaagtccccccttttaggttagccaacattagtctccacttagccccagtgaccctctacctggagcctcctcctctcctcctccttctcctcctagggcaggctcaccctgcctcttctcaagccctcacctgccaagacaagcccaaattacaagacaattttttagactccaggctaagggtcgattccatggctctgcccattaagtgttaagaacgacctgtgtatttgctgcagaaagcatgacagtgacgtgctttgaaagccctcattttctattccaaacatgagttttaattgctctttttgggatgcctgatgtctcatcacggcagtattatctctctgggacctctgacagcaggaagagccaatggttcattactcgagcctgcccccgcctcctcagtgctggggccccgtcaatcaagcaggccaagttggactcctcccccaggactgactttggaaggtcaacccactctggaaaaagccttccaggccagcgggtagactgctgaacacaggctgctgagcttctcagccgaattcctggacacttcctcactcggtctttccgtgtgttctttggattctctctgaaaattttatgctgatctattttaaattaaaaatgctatttgtcatcc

SEQ ID NO: 265400 - DNA, 963 bp, Artificial Sequence
  derived and/or modified sequence
atgccggaggccaggagtagcggacctgacctgactcggtggaggaagcagcagcaacccgtgcgccgcacagtaagccaggtctgccctcccccccgccgcccactgacagtggccgacatacgctcaggtatggagaacgagcgcctcggggtggtccgtgacagcatgttccagaacccgctgattgtcaaggcagccgggccggctagcgtggggacatcgtatagcgtttacgatagcagcgcggttcaaaaagtcatacccagtctggcaggccaccacatcaaggggggcccccaggcagagctgggaaaacctcgggaaagaagttatagcctgccgggcatcaatttcaattatggtctctacatcagaggacttgatgggggagtccccgaagccattggtcggtggaacgtgtttaagcagcagccgacttgtccccatgaactgaccagaaattacatcgccatgaatagaggagctgtgaaagcaggactggtgacggcgagagagaacctcctctataggcagctcaatgatatccgcatatcggatcaggacgaccggcggatgaagaaggagcctccccctctgcctcccaacatgaccttcgggatccgtgctcgcccatctacaccgttttttgacctcctccagcataggtatctgcagctctgggttcaggagcaaaaagcaacccagaaggccatcaagctggaaaagaaacagaaggtggtgctcggaaagctctatgagactcgctctagccagctcagaaaatacaaaccacctgttaaactcgacaccctgtggcatatgccgcactttcagaaagtgggtagacacctagacacttttcccacagaggctgacagacagcgcgccctgaaggcgcacagggaggaatgcgcagtccggcaaggaaccctgcgcatgggcaactacactcacccttag

SEQ ID NO: 265401 - DNA, 963 bp, Artificial Sequence
  derived and/or modified sequence
atgcctgaggcccggagcagcggccctgacctgacccgctggaggaagcagcagcagcctgtgcggaggacagtgtcccaggtgtgccccccaccaagaagacccctgactgtggccgacatccgcagcggcatggagaatgaaaggctgggcgtggtgcgggacagcatgttccagaaccccctgattgtgaaggctgctggccctgcctctgtgggcaccagctacagcgtgtatgacagcagcgctgtgcagaaggtgatccccagcctggccggccaccacatcaagggcggcccccaggccgagctgggcaagccccgggagaggagctacagcctgcccggcatcaacttcaactacggcctgtacatccggggcctggatggaggagtgcctgaggccatcggccgctggaatgtgttcaagcagcagcccacctgcccccatgagctgaccaggaactacatcgccatgaacagaggagctgtgaaggccggcctggtgacagcccgggagaacctgctgtaccggcagctgaatgacatccgcatcagtgaccaggatgacaggaggatgaagaaggagcccccacccctgccccccaacatgaccttcggcatccgggcccggcccagcacccccttctttgacctgctgcagcaccgctacctgcagctgtgggtgcaggagcagaaggccacccagaaggccatcaagctggagaagaagcagaaggtggtgctgggcaagctgtatgagaccaggagcagccagctgaggaagtacaagccccctgtgaagctggacaccctgtggcacatgccccacttccagaaggtgggccgccacctggacaccttccccacagaggccgaccggcagagggccctgaaggcccaccgggaggagtgtgctgtgcggcagggcaccctgaggatgggcaactacacccacccctag

SEQ ID NO: 265402 - DNA, 963 bp, Artificial Sequence
  derived and/or modified sequence
atgcccgaggcccggagcagcggccccgacctgacccggtggcggaagcagcagcaacctgtgaggagaacggtctcacaagtctgtccccctcctcggcggccattaactgtcgccgacatcagaagtggtatggagaacgaaagattgggtgtcgtgcgcgacagcatgtttcaaaatcctttgatcgtgaaagccgctggaccagcttccgtcgggacctcctatagcgtgtatgactccagcgccgtgcagaaagtgattccctcactggccggacatcatatcaagggcggcccacaggcagaattgggtaagccccgcgagagaagctactctcttcctggtattaactttaactatggtctatatattcggggactggatggaggggttccagaggccattgggcgatggaacgtttttaaacaacagcctacatgtcctcatgagctgacccggaactacatcgcgatgaacagaggtgccgtcaaagccggactcgtcacagccagagagaacctcttgtacagacagctgaatgatatccgtatctcagatcaggatgataggcgcatgaaaaaggagcctccacctcttccacccaacatgacttttgggattcgtgctagaccatccaccccgtttttcgacctccttcaacacagatatctccagctgtgggtgcaagagcagaaagcgactcagaaggccatcaaacttgagaaaaaacagaaagtggtccttggtaagctttatgaaacacggagcagtcagctgagaaagtataagcctccagtaaagttggacacactctggcatatgccccattttcagaaagtggggcggcacttggataccttcccgactgaagctgatagacaacgggcgctcaaagcccaccgggaggagtgtgccgtccgccagggtacactgcgcatgggaaactatacgcatccgtag

SEQ ID NO: 265403 - DNA, 963 bp, Artificial Sequence
  derived and/or modified sequence
atgcctgaggccagatcttccggccctgatctaactaggtggaggaagcaacagcaacccgtgagaaggacagtgtcccaagtctgcccccctccacgtagacctctgacagttgccgatattagaagtggcatggagaacgagaggctcggagtcgtgagggatagtatgtttcagaaccctctaatcgtcaaggccgcaggccctgcaagtgtcggaacaagctacagtgtgtacgattcttccgcggtccagaaagtgattccgtccttggccggtcaccacattaagggaggcccacaggccgagctgggcaaacctcgtgagcgctcgtactccttacctggaatcaactttaattacgggctctacatcagagggctcgacggaggtgtacctgaggcgataggacgctggaatgttttcaagcagcagccaacgtgccctcacgagttgacccgaaattatatcgctatgaaccgcggagccgtgaaagcgggattagtgactgccagagagaatttactgtacaggcagctgaacgatataagaatatccgatcaggacgatcgccgaatgaaaaaggagccgcctccattgccaccaaacatgacgttcgggattcgagcccgtccaagtactccattcttcgacctcctgcagcatcggtacctccagttgtgggtgcaggaacagaaagccactcagaaagctatcaaactggagaagaaacagaaagtagttttagggaaactgtacgaaactcgatccagtcagctgaggaaatataagcccccagtaaagctggacaccctgtggcatatgccccatttccagaaggtgggccgacatctagacacattcccgacagaagctgataggcagagggctttaaaggcacatcgagaagagtgcgctgttaggcagggtactctccggatgggtaactacacacatccttag

SEQ ID NO: 265404 - protein, 121 aa, Artificial Sequence
  derived and/or modified sequence
MNSPEARLCVAQCRDSYPGCQPLKDTRAWASSLKMDPAGLEGGPRDESRDEPPIRAQAASWDQPQGCLTYKGRRSASGTQKQLQLPDTLSSLLCWRGAIMVYIKVTVQTDDSNKLLSLLYR

SEQ ID NO: 265405 - DNA, 2241 bp, Artificial Sequence
  derived and/or modified sequence
agtatcaaaaacaactgagaaaggggccgcagctccggccttcatctgctattgcaaattcggagcagggtgctactggggggtgggggagtaaagagaacgggccctttcttcgtgtgtccacttcgtaggaacccaggcaagagtacccaagcagacctctgcttaaagcaaaaacagactgaagttgttttcccctcaacacggtgaccatccccaggtttagcagagagaatctaaacaatgacccttgcaaacacagcaaggataccgacaaacgctggaaagctcagctgtggagttttagtcgtggctgagtttaggtggccttgcttcaacgccatcagggttttgaacaccgtcggggggaagacgccagtctgctcaagtggtgcccaaaccagaaatgccagtgtcatgtccacgtttccgcttcttcggagaagggacctgtctcacacgtccagccagagcttctgagctggagatgcaaccctgcgacagagaagccctggtttgtaatcataccgagcttgggcaaggaggccggaaaagaattacacagaagaaaaccaaccattcgatgcctttcttcttccattcccaatcagaaggttgtttctgacccattgaaatattacctacaaagaagacgggagcctcctgcagcagcctctagtgatctgagagctgaaccaaggtttgaggcccatctccaggtggtcctgaatatccgtgcatcctgggaccttgttaggatgaactcaccagaggcgaggctctgcgttgctcaatgcagagactcttacccagggtgtcagcctctgaaagatacacgtgcctgggcctcttccctgaagatggacccggcaggtctggagggaggcccccgtgatgaatcccgtgatgagccgccgatccgagctcaggctgcgtcatgggaccagccacaaggttgcctgacctataaaggtcgcaggagtgcctcagggacacagaagcagttacagctgccagataccctatcatctttactctgttggagaggagctataatggtctatattaaagttactgttcagacagatgattccaacaaattgctttcattactttatcggtaattttaagcactacacaacttagttgtttttttctggaagaaaactggaattaaaatcattgatcctttagagaaataaaacaaaggagaagggagtgtacaaaataaataagaaaagaattcttaccatactttcctgtattcttactgagaaataaaaatgggacattgagaagcaaaattaatcccgattaggctcgctttgggacaagcaaccactttgcatgattacccatcgttaggtgtgaaacggagccaatgatcgctcattgtcgaggagaaaagacctggagaccacggcttatccagtctcgctcctgacctgcatctgaacacctgaaggaagaaactttaacaagaaaaagacttcaagtgacagaggagacaaaagtctcaaaggtgcagaattcaagaactcatggtgtctcaggatgggtgtgaaagtaacaaatatgagatcccctgacaactaaacccaggcatgtccaggaatcccgggatgcggtgaaagttttcacagtggagctcacaggaatccccagatgccgtgaaagttttctcagcggagctcacaccagcattgtctggaatattaaatgttgttatgctttgagattggcacttatgccattcaaatttttttattaagaagtacaatgaaatttaacttattccatttttgacaccaatgtaatgaccaaattaaactagattttcaaaaataatcagaggccctgccccacaaactcctcctgggcacaggaagatgtggggccagtcagtagtgactcctcttgggtgctgatccaccatgctgaattcagaccggcgccagtcccctgagcgcctcccaattcctatgtgatttcctgtccctagtatatgaacatgtcagccttgatgtgatcacacaaattatgggccatgacgcatctaccactcttgcctgttctgaagggctgcctttagttgtcttgcaaagagcacttacacctcttccctacggcacagaagccctgggtctggggtgacaggggcagagacctgcctgtcctccagccacccaagaccatgcttctgtctgtaggttcccccaataaaacaccctttactgacag

SEQ ID NO: 265406 - DNA, 366 bp, Artificial Sequence
  derived and/or modified sequence
atgaacagccccgaggccagactgtgcgtggcccagtgcagagacagctaccccggctgccagcccctgaaggacaccagagcctgggccagcagcctgaagatggaccccgccggcctggagggcggccccagagacgagagcagagacgagccccccatcagagcccaggccgccagctgggaccagccccagggctgcctgacctacaagggcagaagaagcgccagcggcacccagaagcagctgcagctgcccgacaccctgagcagcctgctgtgctggagaggcgccatcatggtgtacatcaaggtgaccgtgcagaccgacgacagcaacaagctgctgagcctgctgtacagatag

SEQ ID NO: 265407 - DNA, 366 bp, Artificial Sequence
  derived and/or modified sequence
atgaattcccccgaagctagactctgtgtcgcacagtgcagggattcctatcctggctgccagccactaaaagataccagggcatgggcttcttcgctcaaaatggatccagccgggctggaaggaggtccacgcgacgagagcagagatgaacctcccatccgtgcgcaagccgccagctgggaccagcctcaagggtgcctcacatacaaaggccgccgctctgccagcggcacacagaagcaactccagttgccagatacattaagctcccttctgtgctggagaggggccataatggtgtatataaaagttactgtgcagacagatgattccaataagctgctgtctctgctgtaccgatag

SEQ ID NO: 265408 - DNA, 366 bp, Artificial Sequence
  derived and/or modified sequence
atgaacagccctgaggcccggctgtgtgtggcccagtgccgggacagctacccaggctgccagcccctgaaggacacccgggcctgggccagcagcctgaagatggaccctgctggcctggagggcggccccagagatgagagcagagatgagccccccatccgggcccaggccgcctcctgggaccagccccagggctgcctgacctacaagggcagaagaagtgccagcggcacccagaagcagctgcagctgcctgacaccctgagcagcctgctgtgctggaggggggccatcatggtgtacatcaaggtgacagtgcagacagatgacagcaacaagctgctgagcctgctgtacagatag

SEQ ID NO: 265409 - DNA, 366 bp, Artificial Sequence
  derived and/or modified sequence
atgaacagccccgaggcccggctgtgcgtggcccagtgccgggactcctaccccggttgccagcctctcaaggataccagagcgtgggccagcagcctgaagatggatccagccggcctggagggagggcctcgtgacgaaagtcgtgatgagccaccaattagagcacaagcagccagttgggatcagcctcaggggtgtctcacttacaaaggtaggcgctccgcatccggtactcagaaacagttgcaactccctgatactttgtcttccctgctctgttggcggggtgctataatggtgtacatcaaggtcactgttcagacggatgattcgaataaactgctgtccctcctataccgatag

SEQ ID NO: 265410 - DNA, 366 bp, Artificial Sequence
  derived and/or modified sequence
atgaacagtcctgaagccaggctctgcgttgcccagtgtcgagacagttaccccggatgtcagcctctcaaagatacaagagcttgggcttctagtctaaaaatggatccagcaggcctggagggaggcccacgcgacgaatcaagagatgagccacctattagggcccaggcggctagctgggaccagccccagggatgtcttacgtacaagggcagacgaagcgctagtggcactcagaaacagttgcagttgcccgatacattatcctctctgctgtgctggagaggcgcaatcatggtctacattaaagtgaccgttcaaacagacgactctaataaactacttagcctgttgtataggtag

SEQ ID NO: 265411 - protein, 179 aa, Artificial Sequence
  derived and/or modified sequence
MELQGAQEDLGISLSSPRRNHETRPGSKAKGRSSICLQASVWMAGGKLRLRASEHLTQGHQQELRDWNLGEDASLLFSKSPFGAGKLIQAPAHVFRQCWVQGNAWISCITKFDSKRSPEVASSPSYLTVPRRSPLPVFLRPSDRCVCGGCYLGKSTRRRACQSLLSDPLGVTFPTQTRP

SEQ ID NO: 265412 - DNA, 2043 bp, Artificial Sequence
  derived and/or modified sequence
ctgttctgatatggagctacaaggggcccaagaggacctgggcatttccctctctagtccccggaggaaccatgaaaccaggccaggaagcaaggctaagggcaggagcagcatctgtctccaggcgtctgtttggatggctggaggaaagctgaggctcagagcaagtgaacatctaacccagggccaccaacaagagctcagggattggaatctgggagaagatgcttcccttctcttctccaagagtccttttggggctggcaagttgatacaagctccagctcatgtcttcagacaatgctgggtccaaggaaatgcatggatctcctgcattacaaagtttgactccaagagaagcccagaagtggcttccagcccctcctacctaactgtgccccgccgttcaccacttcctgtcttcctgcgacccagtgacagatgtgtctgtgggggctgctacttgggaaagtccaccaggaggagagcatgccaatctctcctctcagatcctctgggggttactttccccacccaaactaggccttgatgtcaaggcctagttacagggatgtcaaactaggaggttgatgtcggtgtggtgtgtaagatgttggggagaagctgcaggtgccttcttaccagctcttcctgaaaacttgtctctccctctccttgttagtctgttttataactcacactccagccggggggaagtaaaggagcttatcccgttcacagatcctgtaacccatggtggttattacctcatagctggtgcagtgttctttgagcctagcagtttggtttagactcaagtgtctattctttgcagtctttctggggttggtagcagagaaagagaagagaacaggtaattcgatcactcaggttattcgtgtgtaaaagttgaagccctaccacaaacgtatgagtggatgttatagtgtaataacctggacattgccaagacagcttcctcagggcttttgtttcctcaagcctacctgaaggctctcttctcagtcacgggggatggaattgtttcatccctggcttgctctgggcctcagtttccctattccaggatagtttccctattccctattctgcatcataaaaaaaaaaatacactcctgatagaagtcggttgatgcttttggcctgcagcctccttaaggttaatagtccacataatttcctcaggggccctggctggcctgttgtgggtgtacccatgaagtatcttgatttgctatgataggagccaccttggcttcctgtggagataagccctgcccctcgttcccactttaagcttgaaaagtcccttatccaactttggaatgggaactagaaagactaagcagtgtctctcaggggttccttctggggtcactcagaagaggagaaccaagcagtcttggcggagagacacctgaagttggtcactcggcacattaccaggggctcagcaatgaccagcctgcaaccatcctgcctttccccaggggtctgggctccagccatggagggtggactggagactcctttgcctttcaacactgtctggcctgtctcgggtccggcacgtcttttctctactgattttgtggctgtggttaacttagctaacctttcagtgaaataatgtctagtggcattcctttacattttccatgtgctgttttttccataactccattttcttcagggctgagtttgggtcttcatttttccacccacaggcctagttaagcttggtcttgtgctccaacttacctgccccagacttcttggatggacattgtcaatctggtcatattgagagtgaaactgccacctagtggtcactggaggtgtgcctgccttttcatgagctctcttgctgctggttaccggaaacatcagttgatggttttcttctaagctaactcagaagctgtgatgtgaatcagaccaaacaatttatctgcttcaaatccatattgtaaagaggtttaatataaagacatattttcaaatcaaaataaataatgaagc

SEQ ID NO: 265413 - DNA, 540 bp, Artificial Sequence
  derived and/or modified sequence
atggagctgcagggcgcccaggaggacctgggcatcagcctgagcagccccagaagaaaccacgagaccagacccggcagcaaggccaagggcagaagcagcatctgcctgcaggccagcgtgtggatggccggcggcaagctgagactgagagccagcgagcacctgacccagggccaccagcaggagctgagagactggaacctgggcgaggacgccagcctgctgttcagcaagagccccttcggcgccggcaagctgatccaggcccccgcccacgtgttcagacagtgctgggtgcagggcaacgcctggatcagctgcatcaccaagttcgacagcaagagaagccccgaggtggccagcagccccagctacctgaccgtgcccagaagaagccccctgcccgtgttcctgagacccagcgacagatgcgtgtgcggcggctgctacctgggcaagagcaccagaagaagagcctgccagagcctgctgagcgaccccctgggcgtgaccttccccacccagaccagaccctag

SEQ ID NO: 265414 - DNA, 540 bp, Artificial Sequence
  derived and/or modified sequence
atggagctgcagggcgcacaggaggatctgggtattagcttgtcgagccctcgcaggaatcacgaaactcgccccggctctaaggccaagggaagaagtagtatctgtcttcaggcatcagtgtggatggcggggggcaaactgcggttgcgggctagtgagcatctgacccagggacaccagcaggagctccgggactggaacctcggtgaagacgctagtctgcttttttccaaatcacccttcggagccggcaaactgatccaggcccccgcccacgtgtttaggcaatgctgggtccagggcaacgcctggataagttgcattacaaagtttgattccaaaaggagcccagaagtggcctcttcgccgagctatctgacagttccaaggagatcaccgcttccagtgtttctcagaccttctgaccgatgcgtgtgcgggggttgttaccttgggaaatctacaaggcgccgggcctgtcagtctctgctttccgaccccctgggggttacatttccgacacagaccaggccttag

SEQ ID NO: 265415 - DNA, 540 bp, Artificial Sequence
  derived and/or modified sequence
atggagctgcagggcgcccaggaggacctgggcatcagcctgagcagccccaggagaaatcatgagaccaggcctggcagcaaggccaagggccgcagcagcatctgcctgcaggcctctgtgtggatggccggcggcaagctgcggctgcgggccagcgagcacctgacccagggccaccagcaggagctgcgggactggaacctgggagaagatgccagcctgctcttcagcaagagcccctttggagctgggaagctgatccaggccccagcccacgtgttccggcagtgctgggtgcagggcaatgcctggatcagctgcatcaccaagtttgacagcaagaggagccctgaggtggccagcagccccagctacctgactgtgcccaggaggagccccctgcccgtcttcctgcggcccagcgacagatgtgtgtgtggcggctgctacctgggcaagagcacccggcggcgggcctgccagagcctgctgagtgaccccctgggcgtgaccttccccacccagacccggccctag

SEQ ID NO: 265416 - DNA, 540 bp, Artificial Sequence
  derived and/or modified sequence
atggagctgcagggcgcccaggaggacctgggcatcagcctgagctcccccagacggaaccatgagactaggcccggcagtaaagctaagggccgaagctccatatgtttgcaggcaagcgtgtggatggcaggagggaaattgaggctgcgggcctcagagcatctgacccaagggcatcagcaggagttacgcgactggaacttaggagaggatgcctcacttctgtttagtaaatccccattcggagccggcaaacttatccaggctcccgcccatgtgttcagacagtgttgggtacagggtaacgcctggatatcctgtatcaccaagtttgactcaaagcgctcgccagaggttgcctcatctccatcatatctgacagtcccaagaaggtcgccactgcccgtgtttctgcgtccttccgatagatgcgtctgtggcggctgctaccttggaaagtcaacacggcgcagggcctgtcagagtctgctgagcgaccccctcggtgtaacatttccgacccagacccgcccttag

SEQ ID NO: 265417 - DNA, 540 bp, Artificial Sequence
  derived and/or modified sequence
atggagctgcaaggcgctcaggaggatttgggcattagcctctctagccctagaagaaaccacgagacgaggccgggatctaaggccaaaggacgatctagtatttgccttcaggcttccgtgtggatggccggtggtaaactgcggttacgtgcttccgagcatctcacccaagggcaccaacaggaactgcgcgactggaaccttggagaagatgctagtttacttttcagcaaatcacctttcggcgctggtaaacttatacaggccccagcccatgtgtttaggcagtgctgggtgcaaggtaacgcttggatctcctgcattactaagtttgattcgaagagatcccccgaagtggcttctagccccagctacctcactgtacccaggaggtccccactgcccgtcttcctgaggcctagcgatagatgtgtgtgtgggggttgttatctgggaaagtcaactaggcgacgcgcttgccaaagtctactctcagaccccttaggcgtcactttccctacgcagacccggccatag

SEQ ID NO: 265418 - protein, 158 aa, Artificial Sequence
  derived and/or modified sequence
MEIDGFQQLDLEKSVPSKKTTPKRIIHFVDGDIMEEYSTEEEEEEEKEEQSTNSTLDPSKLSWGPYLRFWAGRIASTSFSTCEFLGGRFAVFFGLTQPKYQYVLNEFYRIQNKKSDNKSERRGSKAQAAEVPNEKCHLEAGVQEYGTIQQDVTEAIPQ

SEQ ID NO: 265419 - protein, 100 aa, Artificial Sequence
  derived and/or modified sequence
MEIDGFQQLDLEKSVPSKKTTPKRIIHFVDGDIMEEYSTEEEEEEEKEEQSTNSTLDPSKLSWGPYLRFWAGRIASTSFSTCEFLGGRFAVFFGLTQPKY

SEQ ID NO: 265420 - protein, 99 aa, Artificial Sequence
  derived and/or modified sequence
MEIDGFQQLDLEKSVPSKKTTPKRIIHFVDGDIMEEYSTEEEEEEEKEEQSTNSTLDPSKLSWGPYLRFWAGRIASTSFSTCEFLGGRFAVFFGLTQPK

SEQ ID NO: 265421 - DNA, 477 bp, Artificial Sequence
  derived and/or modified sequence
atggagatcgacggcttccagcagctggacctggagaagagcgtgcccagcaagaagaccacccccaagagaatcatccacttcgtggacggcgacatcatggaggagtacagcaccgaggaggaggaggaggaggagaaggaggagcagagcaccaacagcaccctggaccccagcaagctgagctggggcccctacctgagattctgggccggcagaatcgccagcaccagcttcagcacctgcgagttcctgggcggcagattcgccgtgttcttcggcctgacccagcccaagtaccagtacgtgctgaacgagttctacagaatccagaacaagaagagcgacaacaagagcgagagaagaggcagcaaggcccaggccgccgaggtgcccaacgagaagtgccacctggaggccggcgtgcaggagtacggcaccatccagcaggacgtgaccgaggccatcccccagtag

SEQ ID NO: 265422 - DNA, 303 bp, Artificial Sequence
  derived and/or modified sequence
atggagatcgacggcttccagcagctggacctggagaagagcgtgcccagcaagaagaccacccccaagagaatcatccacttcgtggacggcgacatcatggaggagtacagcaccgaggaggaggaggaggaggagaaggaggagcagagcaccaacagcaccctggaccccagcaagctgagctggggcccctacctgagattctgggccggcagaatcgccagcaccagcttcagcacctgcgagttcctgggcggcagattcgccgtgttcttcggcctgacccagcccaagtactag

SEQ ID NO: 265423 - DNA, 300 bp, Artificial Sequence
  derived and/or modified sequence
atggagatcgacggcttccagcagctggacctggagaagagcgtgcccagcaagaagaccacccccaagagaatcatccacttcgtggacggcgacatcatggaggagtacagcaccgaggaggaggaggaggaggagaaggaggagcagagcaccaacagcaccctggaccccagcaagctgagctggggcccctacctgagattctgggccggcagaatcgccagcaccagcttcagcacctgcgagttcctgggcggcagattcgccgtgttcttcggcctgacccagcccaagtag

SEQ ID NO: 265424 - DNA, 477 bp, Artificial Sequence
  derived and/or modified sequence
atggagatagatgggttccagcagttggaccttgagaagtccgtgccgtccaaaaaaacaaccccaaaaagaattattcacttcgtggatggggatattatggaggaatattcaactgaggaggaggaggaagaggagaaggaggaacagtcaacaaactctactctcgatccctccaaattgtcctggggcccctatctccgattctgggccgggcggattgctagtacatcattcagtacctgcgaatttttaggcggtagattcgcagtgttttttggcctgacccagcctaaataccagtacgtgttgaacgagttttacaggattcagaacaaaaagtctgataacaaaagcgagcggaggggaagtaaggcccaggctgccgaggtccctaacgagaagtgccacttagaggccggagttcaggagtacggtacaatccagcaggatgtcactgaggctattcctcagtag

SEQ ID NO: 265425 - DNA, 303 bp, Artificial Sequence
  derived and/or modified sequence
atggaaatcgacggtttccagcagctggatctcgaaaaaagtgtaccttcaaagaagacaacacccaaacgaatcattcattttgtggatggtgatataatggaagagtactccaccgaagaagaagaggaagaagaaaaagaagagcagagcaccaatagcaccttggacccaagcaagctgagttggggcccttacctgcgcttctgggccgggcgcattgctagcaccagcttctcaacatgcgaattcctgggcggcaggttcgctgttttcttcgggctcacccagcccaagtattag

SEQ ID NO: 265426 - DNA, 477 bp, Artificial Sequence
  derived and/or modified sequence
atggagatcgacggatttcagcagctcgaccttgagaaatccgtaccatccaaaaagactacccccaagcgcataatccactttgtcgatggcgacattatggaagaatacagcacagaagaggaggaggaggaggagaaagaggagcagagcacgaattctactctggatccatccaaactaagttggggtccatacctgcgtttttgggctggaagaatagcctccacttctttttctacatgcgagttcctgggagggcgtttcgctgtattctttgggctcacccagcctaagtatcagtatgtgctcaacgaattctacagaatccagaacaaaaagagtgataataaatccgaaagacgaggtagcaaggcccaggcggccgaagtgcctaatgaaaagtgccacttggaagctggcgtgcaggaatatgggacaatccaacaggatgtgaccgaggccatccctcagtag

SEQ ID NO: 265427 - DNA, 300 bp, Artificial Sequence
  derived and/or modified sequence
atggaaatagacggatttcagcagctcgatctggagaaatctgtgccttcaaagaaaaccactccaaagcgcattattcattttgtagacggagatattatggaagagtactcgaccgaagaggaggaggaagaggaaaaagaggaacagagcaccaactccacattagacccaagcaagctgtcctgggggccatatctgcgcttttgggcaggcaggatagctagcacctcctttagcacatgtgaatttttaggagggagatttgctgtcttctttggtcttacccagcccaaatag

SEQ ID NO: 265428 - DNA, 764 bp, Artificial Sequence
  derived and/or modified sequence
ggagtgttcagtgttgatttgatgtgaggtgtgattaaagaagaaccaagaatgactttagtgttgttggcctgagcaactggaagaacagagttgccatttattgagatgagaaggctgccagaagagtagagttgttttgtttcattatggagattgacggtttccagcagttagacctagagaagagtgtaccttccaaaaagactactcctaaaaggattatccattttgttgacggagacatcatggaagaatatagcacagaggaggaggaggaagaggaaaaggaggagcagagcacaaattcaacacttgacccttctaaactttcctgggggccctacctacgattttgggcaggacgaatagcaagcacctcattttctacatgtgaattccttggtggaagatttgctgtcttctttggtcttactcaacccaaatatcagtatgtgttaaacgagttctataggatacaaaacaagaaaagtgacaacaaaagtgaaaggagaggatcaaaggcccaggcagctgaggttcctaatgaaaagtgtcacttggaggctggggtccaagagtatggaaccatacaacaggatgtgacagaggccattcctcagtgaagcacctcatccagggagggtctggtggcagatcctagctcatgatggcagcaaagactgcagtttccctggatctgttccttggccattgattaccatggcaacaacaccagaggtagcacttctgagccagatctg

SEQ ID NO: 265429 - DNA, 466 bp, Artificial Sequence
  derived and/or modified sequence
aggggcagaagatacagcagtgaacataacagatttgatgtgaggtgtgattaaagaagaaccaagaatgactttagtgttgttggcctgagcaactggaagaacagagttgccatttattgagatgagaaggctgccagaagagtagagttgttttgtttcattatggagattgacggtttccagcagttagacctagagaagagtgtaccttccaaaaagactactcctaaaaggattatccattttgttgacggagacatcatggaagaatatagcacagaggaggaggaggaagaggaaaaggaggagcagagcacaaattcaacacttgacccttctaaactttcctgggggccctacctacgattttgggcaggacgaatagcaagcacctcattttctacatgtgaattccttggtggaagatttgctgtcttctttggtcttactcaacccaaatatc

SEQ ID NO: 265430 - DNA, 1345 bp, Artificial Sequence
  derived and/or modified sequence
agatacagcagtgaacataacaggtaaaaccctccccctctgccaaggggcaggacagggaggaaagggaagacagagacaggtggaatatggagtgttcagtgttgaaatatccaagacaatttcctggcagatttgatgtgaggtgtgattaaagaagaaccaagaatgactttagtgttgttggcctgagcaactggaagaacagagttgccatttattgagatgagaaggctgccagaagagtagagttgttttgtttcattatggagattgacggtttccagcagttagacctagagaagagtgtaccttccaaaaagactactcctaaaaggattatccattttgttgacggagacatcatggaagaatatagcacagaggaggaggaggaagaggaaaaggaggagcagagcacaaattcaacacttgacccttctaaactttcctgggggccctacctacgattttgggcaggacgaatagcaagcacctcattttctacatgtgaattccttggtggaagatttgctgtcttctttggtcttactcaacccaaatatcagtatgtgttaaacgagttctataggatacaaaacaagaaaagtgacaacaaaagtgaaaggagaggatcaaaggcccaggcagctgaggttcctaatgaaaagtgtcacttggaggctggggtccaagagtatggaaccatacaacaggatgtgacagaggccattcctcagtgaagcacctcatccagggagggtctggtggcagatcctagctcatgatggcagcaaagactgcagtttccctggatctgttccttggccattgattaccatggcaacaacaccagaggtagcacttctgagccagatctgatcctaatctctgtgtgacttagtctcaagcatccaggaattacaagcaataatgagagtaattttggacactttctcagaataatttctatattcaagccaccccacctcaactccacccctgtgatacaagtcccatgagtactgacatttgcacagtagcataaatgccttaaggaactttgggactgggagtttttggctgaaatcctctgtcatgggacgagggtacagtaaagaagctctattcctcagaagaaaatttgggcaccgcaaagtctaaataaatcccctttcaggatttgatatagtgtgtacttccaacaaccatcctggcgtagttggggattgttttacaataagtaaacattgctaataactgtgttacaagatcattatcaagatctttaagaattaggtacatccctccaaattaaaacaattgataaataatataagctcta

SEQ ID NO: 265431 - DNA, 545 bp, Artificial Sequence
  derived and/or modified sequence
agcatatccaagtgcactgtatggcctcagcctacagaacccttaactcttaaatttatcatctattgaacaatttctaacatcaaaatttgtactactttcaacaccaaacatcactaattaatgaaagaaaaatacagaggaattattcataacctaatgatcccagcaagataatgtcctgtcttctaagatgtgcatcaagcctggtacatactgaaaatcctataagttgttttgtttcattatggagattgacggtttccagcagttagacctagagaagagtgtaccttccaaaaagactactcctaaaaggattatccattttgttgacggagacatcatggaagaatatagcacagaggaggaggaggaagaggaaaaggaggagcagagcacaaattcaacacttgacccttctaaactttcctgggggccctacctacgattttgggcaggacgaatagcaagcacctcattttctacatgtgaattccttggtggaagatttgctgtcttctttggtcttactcaacccaaat

SEQ ID NO: 265432 - DNA, 477 bp, Artificial Sequence
  derived and/or modified sequence
atggagattgatggcttccagcagctggacctggagaagtctgtgcccagcaagaagaccacccccaagaggatcatccactttgtggatggagacatcatggaggagtacagcacagaggaggaggaggaggaggagaaggaggagcagagcaccaacagcaccctggaccccagcaagctgtcctggggcccctacctgcgcttctgggccggccgcatcgccagcaccagcttcagcacctgtgagttcctgggcggccgctttgctgtgttcttcggcctgacccagcccaagtaccagtatgtgctgaatgagttctaccgcatccagaacaagaagagtgacaacaagtcagaaagaagaggcagcaaggcccaggccgctgaggtgcccaatgagaagtgccacctggaggccggcgtgcaggagtatggcaccatccagcaggatgtgacagaggccatcccccagtag

SEQ ID NO: 265433 - DNA, 303 bp, Artificial Sequence
  derived and/or modified sequence
atggagattgatggcttccagcagctggacctggagaagtctgtgcccagcaagaagaccacccccaagaggatcatccactttgtggatggagacatcatggaggagtacagcacagaggaggaggaggaggaggagaaggaggagcagagcaccaacagcaccctggaccccagcaagctgtcctggggcccctacctgcgcttctgggccggccgcatcgccagcaccagcttcagcacctgtgagttcctgggcggccgctttgctgtgttcttcggcctgacccagcccaagtactag

SEQ ID NO: 265434 - DNA, 300 bp, Artificial Sequence
  derived and/or modified sequence
atggagattgatggcttccagcagctggacctggagaagtctgtgcccagcaagaagaccacccccaagaggatcatccactttgtggatggagacatcatggaggagtacagcacagaggaggaggaggaggaggagaaggaggagcagagcaccaacagcaccctggaccccagcaagctgtcctggggcccctacctgcgcttctgggccggccgcatcgccagcaccagcttcagcacctgtgagttcctgggcggccgctttgctgtgttcttcggcctgacccagcccaagtag

SEQ ID NO: 265435 - DNA, 477 bp, Artificial Sequence
  derived and/or modified sequence
atggagatcgacggcttccagcagctggacctggagaagagcgtgccctctaagaaaactacccccaaaagaattatccacttcgtggacggagatataatggaggagtacagcacagaggaggaagaggaggaagaaaaggaggaacagagcacaaatagtactctcgacccatctaaattgtcttgggggccctatttaagattctgggccggtcggattgccagcacctccttttccacctgtgaattcctcggagggagattcgccgtgtttttcggtctgactcagcccaaatatcaatacgtcttaaacgagttctatagaatacaaaacaaaaaatccgataacaaatctgagcgcagaggatccaaggcacaggcggcagaagtgccaaatgagaaatgccatctagaagctggagttcaggaatacgggacaatccagcaagacgtaaccgaggctattccccaatag

SEQ ID NO: 265436 - DNA, 303 bp, Artificial Sequence
  derived and/or modified sequence
atggagatcgacggcttccagcagctggacctggagaagagcgtgcccagcaagaaaactacccctaaaaggataatccacttcgtggatggcgacataatggaggaatatagcactgaggaagaggaggaagaagagaaagaagaacagagcacaaacagtaccctggacccgagtaagttgtcctgggggccttacctgaggttctgggcggggagaatcgcttccactagtttcagtacttgcgagttccttggtgggaggttcgccgtattctttggtctgactcagccaaagtactag

SEQ ID NO: 265437 - DNA, 477 bp, Artificial Sequence
  derived and/or modified sequence
atggagatcgacggcttccagcagctggacctggagaagagcgtgccgtcgaaaaaaaccaccccgaagcgtattattcattttgttgacggagacattatggaggagtattccaccgaagaggaggaggaggaagagaaggaagaacagtctacaaactctacgctcgatccttccaagctgagctggggcccctacttacgcttctgggccggtagaattgccagcacatcgttctccacatgcgagttcctggggggccgcttcgctgttttttttgggcttactcagccaaagtatcagtacgttctcaacgagttctatcgcatccaaaacaagaagtccgacaacaaatcagagcgccgcgggtctaaggcccaagctgccgaggtccccaatgagaagtgtcatcttgaggccggcgtgcaggaatatggcacaattcagcaggacgtgaccgaagccattcctcaatag

SEQ ID NO: 265438 - DNA, 300 bp, Artificial Sequence
  derived and/or modified sequence
atggagatcgacggcttccagcagctggacctggagaagagcgtgcccagtaaaaaaactactccaaagaggatcattcatttcgtggacggggacatcatggaagaatactctactgaagaggaggaagaagaggaaaaggaggaacagtcaacaaactccactcttgacccctcaaaactatcctgggggccttacctcagattttgggcagggcggattgcgtctacctctttcagtacatgtgaattccttggcgggcgcttcgccgtgttttttggactgacccagcccaaatag

SEQ ID NO: 265439 - DNA, 477 bp, Artificial Sequence
  derived and/or modified sequence
atggaaatagacgggttccagcagttggatcttgagaagtctgttccaagcaagaagacaactcctaagagaatcatccactttgttgacggcgacatcatggaagagtactctacagaggaggaagaagaggaggagaaggaagaacagtccactaacagcactctggatccaagtaaactgtcgtggggcccttatctgcgcttttgggcaggtaggattgccagtacctccttttccacttgcgagttccttgggggacgctttgcggtcttttttggccttactcaacccaaataccagtacgtgcttaatgagttttacagaatccagaacaaaaaaagtgataataagtcagagcgccgaggttccaaggctcaagcagccgaagtcccaaatgagaaatgccacttggaagctggagtgcaggagtatggcacaattcagcaggacgtgactgaagccatcccacagtag

SEQ ID NO: 265440 - DNA, 303 bp, Artificial Sequence
  derived and/or modified sequence
atggaaattgacggatttcaacagcttgacctcgagaaatcagtgccctcaaagaaaactactcctaagcggattatccactttgtcgacggtgatatcatggaagagtacagcacagaggaggaagaagaagaagagaaagaggagcaaagtacaaactcaacgctagatcctagcaagctaagctggggcccttatctgagattttgggctgggagaatagccagcacctcattcagcacctgtgagttcttgggcggtaggttcgccgtttttttcggcctgactcagcctaagtactag

SEQ ID NO: 265441 - DNA, 477 bp, Artificial Sequence
  derived and/or modified sequence
atggaaatcgacggattccaacagctggatctcgagaagagcgtgccaagcaagaagacaacaccaaaaaggataatccatttcgtggatggagatataatggaggaatactccacagaagaagaagaggaggaggagaaggaagaacaaagcacaaattccactctggacccttcaaagctttcctggggcccttatctacggttttgggctgggcgaatcgcaagcacatcattttccacctgcgagttcctcggcggtcgttttgctgtgttctttggtttaacccagcctaaataccagtacgtgcttaatgagttctacagaattcaaaataaaaagagcgataataaatcagaaagaagaggtagcaaagcacaggctgctgaagttccaaacgaaaaatgccatctggaggccggagtgcaggaatatgggacgatccagcaggatgtcaccgaggcgatcccccagtag

SEQ ID NO: 265442 - DNA, 300 bp, Artificial Sequence
  derived and/or modified sequence
atggagatcgatggttttcagcagctggacctggagaagtccgtgccaagcaaaaaaaccacacctaagcggatcatacattttgtggatggagacatcatggaggagtattcaaccgaagaggaggaagaagaagagaaggaggagcaaagcacaaactccactcttgacccctcaaaattaagctgggggccttatttgcggttctgggcaggcaggatagcctccaccagcttctcaacttgcgaatttctgggaggcagattcgcagtattttttggcctgacccagccaaaatag

SEQ ID NO: 265443 - protein, 590 aa, Artificial Sequence
  derived and/or modified sequence
MEGKRQLEKRDFGKRLSLDSSLVEYMDSNKYIEHLLTQLEEQHRSLWREKLAVARLQREVAQRTSEGAMHEKLIHELEEERHLRLQSEKRLQEVTLESERNRIQMRSLQQQFSRMEETVRNLLQSQGSPEQKKEETVNIMVYQEKLSEEERKHKEALEDLHMVVDEDSRSESSSTDEGKEKTKLLLERLKALEAENSALALENENQREQYERCLDEVANQVVQALLTQKDLREECVKLKTRVFDLEQQNRTLSILFQQRVRPTSDLLLQKLHSRLLDLSSGDLLSEVERNRSLTQSRTDAEVHEHQLNTKSALKCPGLGAVIPGHLCPRNSYSSSSELSLSSTCSEYSSGSSYTWHDGKNLRKRVKEANENLQEDEDDAVADSVFQSHIIESNCQMRTLDSGIGTFPLPDSGNRSTGRYLCQPDSPEDAEPLLPLQSALSAVSSMRAQTLEREVPSSTDGQRPADSAIVHSTSDPIMTARGMRPLQSRLPKPASSGKVSSQKQNEAEPRPQTCSSFGYAEDPMASQPLPDWGSEVAATGTQDKAPRMCTYSASGGSNSDSDLDYGDNGFGAGRGQLVKALKSAAPEIETT

SEQ ID NO: 265444 - protein, 590 aa, Artificial Sequence
  derived and/or modified sequence
MEGKRQLEKRDFGKRLSLDSSLVEYMDSNKYIEHLLTQLEEQHRSLWREKLAVARLQREVAQRTSEGAMHEKLIHELEEERHLRLQSEKRLQEVTLESERNRIQMRSLQQQFSRMEETVRNLLQSQGSPEQKKEETVNIMVYQEKLSEEERKHKEALEDLHMVVDEDSRSESSSTDEGKEKTKLLLERLKALEAENSALALENENQREQYERCLDEVANQVVQALLTQKDLREECVKLKTRVFDLEQQNRTLSILFQQRVRPTSDLLLQKLHSRLLDLSSGDLLSEVERNRSLTQSRTDAEVHEHQLNTKSALKCPGLGAVIPGHLCPRNSYSSSSELSLSSTCSEYSSGSSYTWHDGKNLRKRVKEANENLQEDEDDAVADSVFQSHIIESNCQMRTLDSGIGTFPLPDSGNRSTGRYLCQPDSPEDAEPLLPLQSALSAVSSMRAQTLEREVPSSTDGQRPADSAIVHSTSDPIMTARGMRPLQSRLPKPASSGKVSSQKQNEAEPRPQTCSSFGYAEDPMASQPLPDWGSEVAATGTQDKAPRMCTYSASGGSNSDSDLDYGDNGFGAGRGQLVKALKSAAPEMPIT

SEQ ID NO: 265445 - DNA, 210 bp, Artificial Sequence
  derived and/or modified sequence
atggagggcaagagacagctggagaagagagacttcggcaagagactgagcctggacagcagcctggtggagtacatggacagcaacaagtacatcgagcacctgctgacccagctggaggagcagcacagaagcctgtggagagagaagctggccgtggccagactgcagagagaggtggcccagagaaccagcgagggcgccatgtag

SEQ ID NO: 265446 - DNA, 1773 bp, Artificial Sequence
  derived and/or modified sequence
atggagggcaagagacagctggagaagagagacttcggcaagagactgagcctggacagcagcctggtggagtacatggacagcaacaagtacatcgagcacctgctgacccagctggaggagcagcacagaagcctgtggagagagaagctggccgtggccagactgcagagagaggtggcccagagaaccagcgagggcgccatgcacgagaagctgatccacgagctggaggaggagagacacctgagactgcagagcgagaagagactgcaggaggtgaccctggagagcgagagaaacagaatccagatgagaagcctgcagcagcagttcagcagaatggaggagaccgtgagaaacctgctgcagagccagggcagccccgagcagaagaaggaggagaccgtgaacatcatggtgtaccaggagaagctgagcgaggaggagagaaagcacaaggaggccctggaggacctgcacatggtggtggacgaggacagcagaagcgagagcagcagcaccgacgagggcaaggagaagaccaagctgctgctggagagactgaaggccctggaggccgagaacagcgccctggccctggagaacgagaaccagagagagcagtacgagagatgcctggacgaggtggccaaccaggtggtgcaggccctgctgacccagaaggacctgagagaggagtgcgtgaagctgaagaccagagtgttcgacctggagcagcagaacagaaccctgagcatcctgttccagcagagagtgagacccaccagcgacctgctgctgcagaagctgcacagcagactgctggacctgagcagcggcgacctgctgagcgaggtggagagaaacagaagcctgacccagagcagaaccgacgccgaggtgcacgagcaccagctgaacaccaagagcgccctgaagtgccccggcctgggcgccgtgatccccggccacctgtgccccagaaacagctacagcagcagcagcgagctgagcctgagcagcacctgcagcgagtacagcagcggcagcagctacacctggcacgacggcaagaacctgagaaagagagtgaaggaggccaacgagaacctgcaggaggacgaggacgacgccgtggccgacagcgtgttccagagccacatcatcgagagcaactgccagatgagaaccctggacagcggcatcggcaccttccccctgcccgacagcggcaacagaagcaccggcagatacctgtgccagcccgacagccccgaggacgccgagcccctgctgcccctgcagagcgccctgagcgccgtgagcagcatgagagcccagaccctggagagagaggtgcccagcagcaccgacggccagagacccgccgacagcgccatcgtgcacagcaccagcgaccccatcatgaccgccagaggcatgagacccctgcagagcagactgcccaagcccgccagcagcggcaaggtgagcagccagaagcagaacgaggccgagcccagaccccagacctgcagcagcttcggctacgccgaggaccccatggccagccagcccctgcccgactggggcagcgaggtggccgccaccggcacccaggacaaggcccccagaatgtgcacctacagcgccagcggcggcagcaacagcgacagcgacctggactacggcgacaacggcttcggcgccggcagaggccagctggtgaaggccctgaagagcgccgcccccgagatcgagaccacctag

SEQ ID NO: 265447 - DNA, 1773 bp, Artificial Sequence
  derived and/or modified sequence
atggagggcaagagacagctggagaagagagacttcggcaagagactgagcctggacagcagcctggtggagtacatggacagcaacaagtacatcgagcacctgctgacccagctggaggagcagcacagaagcctgtggagagagaagctggccgtggccagactgcagagagaggtggcccagagaaccagcgagggcgccatgcacgagaagctgatccacgagctggaggaggagagacacctgagactgcagagcgagaagagactgcaggaggtgaccctggagagcgagagaaacagaatccagatgagaagcctgcagcagcagttcagcagaatggaggagaccgtgagaaacctgctgcagagccagggcagccccgagcagaagaaggaggagaccgtgaacatcatggtgtaccaggagaagctgagcgaggaggagagaaagcacaaggaggccctggaggacctgcacatggtggtggacgaggacagcagaagcgagagcagcagcaccgacgagggcaaggagaagaccaagctgctgctggagagactgaaggccctggaggccgagaacagcgccctggccctggagaacgagaaccagagagagcagtacgagagatgcctggacgaggtggccaaccaggtggtgcaggccctgctgacccagaaggacctgagagaggagtgcgtgaagctgaagaccagagtgttcgacctggagcagcagaacagaaccctgagcatcctgttccagcagagagtgagacccaccagcgacctgctgctgcagaagctgcacagcagactgctggacctgagcagcggcgacctgctgagcgaggtggagagaaacagaagcctgacccagagcagaaccgacgccgaggtgcacgagcaccagctgaacaccaagagcgccctgaagtgccccggcctgggcgccgtgatccccggccacctgtgccccagaaacagctacagcagcagcagcgagctgagcctgagcagcacctgcagcgagtacagcagcggcagcagctacacctggcacgacggcaagaacctgagaaagagagtgaaggaggccaacgagaacctgcaggaggacgaggacgacgccgtggccgacagcgtgttccagagccacatcatcgagagcaactgccagatgagaaccctggacagcggcatcggcaccttccccctgcccgacagcggcaacagaagcaccggcagatacctgtgccagcccgacagccccgaggacgccgagcccctgctgcccctgcagagcgccctgagcgccgtgagcagcatgagagcccagaccctggagagagaggtgcccagcagcaccgacggccagagacccgccgacagcgccatcgtgcacagcaccagcgaccccatcatgaccgccagaggcatgagacccctgcagagcagactgcccaagcccgccagcagcggcaaggtgagcagccagaagcagaacgaggccgagcccagaccccagacctgcagcagcttcggctacgccgaggaccccatggccagccagcccctgcccgactggggcagcgaggtggccgccaccggcacccaggacaaggcccccagaatgtgcacctacagcgccagcggcggcagcaacagcgacagcgacctggactacggcgacaacggcttcggcgccggcagaggccagctggtgaaggccctgaagagcgccgcccccgagatgcccatcacctag

SEQ ID NO: 265448 - DNA, 537 bp, Artificial Sequence
  derived and/or modified sequence
atggacagcaacaagtacatcgagcacctgctgacccagctggaggagcagcacagaagcctgtggagagagaagctggccgtggccagactgcagagagaggtggcccagagaaccagcgagggcgccatgcacgagaagctgatccacgagctggaggaggagagacacctgagactgcagagcgagaagagactgcaggaggtgaccctggagagcgagagaaacagaatccagatgagaagcctgcagcagcagttcagcagaatggaggagaccgtgagaaacctgctgcagagccagggcagccccgagcagaagaaggaggagaccgtgaacatcatggtgtaccaggagaagctgagcgaggaggagagaaagcacaaggaggccctggaggacctgcacatggtggtggacgaggacagcagaagcgagagcagcagcaccgacgagggcaaggagaagaccaagctgctgctggagagactgaaggccctggagagaaacggctggaactggcaccccgtgagctag

SEQ ID NO: 265449 - DNA, 210 bp, Artificial Sequence
  derived and/or modified sequence
atggaaggcaagaggcagctggagaagcgagattttggcaaaagactgtccctagatagctctctcgttgaatacatggattcgaataagtacatcgagcacctgttgacacagttggaggagcaacataggagcctgtggcgggagaaacttgccgtcgcacgtctccagagagaagtggcacagcggacgagtgaaggagcgatgtag

SEQ ID NO: 265450 - DNA, 1773 bp, Artificial Sequence
  derived and/or modified sequence
atggaggggaagaggcagctcgaaaaacgagactttgggaagcgcctttcgctggattctagccttgtggaatatatggactcaaacaagtacatagagcatctgctgacgcagctcgaggaacagcacaggtctctgtggcgtgagaaattggccgtggctcgcctgcagcgtgaggtagctcagcggacttcggaaggcgccatgcacgagaagctcatccatgaactcgaggaagagaggcacctgcgcctgcagtccgagaagcgcttacaggaggtgactctggaatctgagcggaaccggatacaaatgcggtcccttcaacaacaattctcccgaatggaagaaacagtgcgaaacttgcttcaatcccaaggctcccccgaacagaaaaaggaagagacagtgaacattatggtataccaagaaaagttgagtgaagaggaaaggaaacacaaggaggccctggaggacctgcatatggtggtggacgaggactcccgcagcgagtcatcttctaccgacgagggaaaggaaaaaactaaactattgctcgagagacttaaagcactcgaggctgaaaactccgcgttggctctcgagaacgaaaaccagcgggaacagtatgagaggtgtttagacgaggtggctaatcaagtggttcaggctcttctgacccaaaaggatctgagggaggaatgtgtaaagctgaagacacgagtattcgacctggagcagcagaacagaaccctttcaatcctgtttcagcagagagtgcgccctactagcgacttgctgttacagaagctccattcgcgattgttagatctatcatctggtgatctgctgtctgaagttgagagaaatagatcattgacgcaatcgaggacagacgccgaagtgcacgagcaccagctgaacaccaaaagtgccttaaaatgtcctgggctcggcgctgtgatcccgggacacctttgcccgcgcaatagctatagcagctcttctgagctaagtctgtcttcgacctgctcagagtactctagtggcagctcttacacatggcacgatggcaagaacttgcggaagcgagttaaagaggccaacgagaacctccaggaggacgaggacgacgcagtagctgacagtgtttttcagtctcacatcatcgagagcaattgccagatgcgtacgcttgatagcgggatagggaccttcccgttacccgatagcggcaaccgctctaccggacgttatttatgtcaacccgatagccctgaagacgccgagccccttctgcctctacaaagcgccctaagcgccgtttcaagtatgcgtgctcagacccttgaaagagaggttccttcaagcactgacgggcagaggcccgcagactctgcgatcgtccacagcactagcgaccccataatgacagccagaggaatgaggccactgcagagcagattgcctaagccagctagttcaggaaaagtgtcgtcccaaaaacagaacgaggcagagccaaggccacagacctgcagtagtttcggctatgctgaggatcctatggcatcccagccacttcccgattgggggtctgaggtggccgcaaccggaacccaggacaaggcacctcggatgtgcacatattcagcctctggtgggagcaatagcgactcagatctggactacggtgacaatggcttcggtgctgggaggggacagctggttaaagctctgaagagcgccgccccggagatcgaaaccacatag

SEQ ID NO: 265451 - DNA, 1773 bp, Artificial Sequence
  derived and/or modified sequence
atggaaggcaagaggcagttggagaaacgcgatttcgggaaacgcctgtccctggactcgagccttgtggaatacatggactccaacaagtatatcgagcatctgcttactcagctagaggagcaacacaggagcctctggcgcgagaagttagctgtcgccagactgcagagagaggtggcccagaggacctctgaaggcgctatgcatgaaaaactaattcatgagcttgaggaggagagacaccttcgcctgcagtctgaaaaacggctgcaggaagtcactctagaatctgagagaaaccgtattcagatgcgctccttacagcagcagttctctcgaatggaagagaccgtgaggaatctgctgcagtcacagggctcaccagagcagaaaaaggaagagactgtcaatatcatggtctaccaagaaaaactcagcgaggaggagaggaaacacaaggaagctttagaagatctgcacatggtcgtggacgaagattccagaagcgagagttcaagtacagacgagggcaaggaaaagaccaaactgcttcttgagaggctgaaggccttggaggcagagaatagcgccctagcactggagaatgagaatcagagggaacagtatgaacgctgtctggacgaagtggctaaccaggttgtccaggccctcttgacccagaaagatctgcgggaagagtgcgtcaagcttaagactagagtgtttgatctagagcagcagaatcgcacattgtctattcttttccaacaaagggtgaggcccacatctgacctgttgctgcagaaattgcactctagactactggacttatcaagcggagacttacttagcgaagtggagaggaaccggagcctgacacagagccgaaccgacgcagaggttcatgagcatcagctcaacactaagagcgctttaaagtgcccaggtcttggcgccgtcataccaggacatctgtgtcccagaaactcttacagttcttcttcagaattgtcacttagctctacgtgcagtgaatattcatccgggtcttcctatacatggcacgatgggaaaaacctcagaaagcgagtcaaagaggccaacgagaacctgcaggaagacgaggatgacgccgtggccgacagcgtattccagtcacacatcattgagtctaactgccagatgaggacactagatagtggaattggcacctttcctttgccggatagcggcaatcgatccaccggacggtatctctgtcagccagattcccccgaagatgccgaaccgctgctcccactgcagtctgcactttccgccgtgtcgtctatgcgggctcagacactcgagagagaagtccccagctccaccgatgggcaacgtcctgctgattccgctatagtgcacagtacatcagaccccattatgactgccagggggatgaggcctctgcaatctaggctgcccaagcctgcatcatctggaaaggtttcatcccagaagcagaacgaggcagagccaagaccccagacctgtagttccttcggatacgcggaagatcccatggcctcccaacctctaccagactgggggtctgaagtcgcagcaactggcacacaggacaaggcgccaagaatgtgtacatattctgcatccggggggagtaatagcgacagcgacctggattatggtgataacggcttcggcgccggaagggggcaactagtcaaagccttaaaaagcgcagccccggagattgagactacgtag

SEQ ID NO: 265452 - DNA, 1773 bp, Artificial Sequence
  derived and/or modified sequence
atggaggggaagcggcagctggagaagagagactttggtaagcgtctgtcgctggactcatcccttgtcgagtatatggacagcaacaagtatattgagcatctcctcacacagttggaggagcagcacaggtccctgtggagagaaaagcttgccgttgcccggctacaaagagaagtcgctcagaggacatctgaaggggccatgcacgagaagctcatccatgagctggaggaggagagacaccttcgattgcaatcagaaaaaagattgcaggaagtcactctcgagtcggagaggaataggattcagatgaggagtcttcagcagcagttctccagaatggaggagacggtccgtaacttgttacagtcgcaagggagcccagagcagaaaaaggaggaaaccgtgaatatcatggtgtaccaagaaaagctgtctgaggaggaacgcaagcataaagaggcactagaggatctgcatatggttgttgatgaggattctaggtctgagtcttcttcgacggatgaaggcaaggaaaaaaccaaactcttactagaaagactgaaagcactagaggctgaaaactctgccctggccctggagaacgagaatcagcgtgagcaatacgagaggtgcctggatgaggttgctaaccaagtagttcaggccctgctgacccagaaggatctccgagaagaatgcgttaagctgaagacgagggtgttcgatttagagcagcagaaccggaccctgagcattcttttccaacaaagggttcgcccaacatcggatttgttgctgcaaaagttacactcgagactactggatcttagcagcggtgacttgctctccgaggtggagcgcaacaggtctttgacacagagccggacggatgcggaggtccacgagcatcagcttaatacaaagtcggccctgaaatgccccggtctcggagccgttattccaggacacctctgcccccgcaattcgtatagctcaagctccgaactctcattgtccagcacttgcagcgagtactccagcggcagcagctacacttggcacgatggaaagaatctgagaaaacgcgttaaggaagccaacgagaatctccaagaggatgaggatgatgctgtcgcagacagcgtgttccagtcgcacattatcgagagcaattgtcaaatgcggacacttgactccgggattggcacattcccgctgcccgacagcggcaaccgctcgacaggtcgctacttatgccaaccagacagtcccgaagatgcggaaccacttctgcccctgcagagcgccttatcagccgtatcatccatgcgcgcgcaaactctggaacgggaggtgccaagcagcactgacgggcagaggccagccgatagcgcaattgtgcattctacatccgatcctattatgaccgctcgcggcatgcgtccgctccaaagtagactgcccaagccggccagctcaggcaaggtctctagtcagaagcaaaacgaggcagaaccccgtccacaaacatgctcttccttcggatacgccgaggatcctatggctagccagcccctgcccgactggggttccgaggtggccgccacaggaacgcaggacaaagcacctcggatgtgcacttattctgcgtcaggaggatctaacagcgacagcgatctggactacggcgataacggattcggggccgggcgtggccagctcgtaaaggcgctgaaatctgccgctcctgaaatgccgattacatag

SEQ ID NO: 265453 - DNA, 537 bp, Artificial Sequence
  derived and/or modified sequence
atggactccaacaagtatatagaacacttgctaacacagctcgaggagcaacataggtcactgtggcgcgagaagctggccgtggctcgacttcagagagaggttgcccagcgaacatcagagggcgctatgcacgaaaagctcatccacgagctagaagaggaaaggcatcttcgtttgcaatcagagaaacgcctgcaggaggtcactctggaaagcgagcggaatagaatacagatgcggagcttgcagcagcagttttctcgaatggaggagacagtgagaaacctactgcagagccaggggtctcctgagcagaaaaaggaagagacagtgaatatcatggtgtaccaggagaagttaagtgaagaggaaaggaaacataaagaagccctggaggacctacatatggtagtggacgaagactctagatccgagtcatcgagcactgacgaagggaaagagaaaacaaagctgctgctggagaggctcaaggccttagagaggaatggatggaactggcaccccgtgagctag

SEQ ID NO: 265454 - DNA, 210 bp, Artificial Sequence
  derived and/or modified sequence
atggagggcaagaggcagctggagaagagggactttgggaagaggctgagcctggacagcagcctggtggagtacatggacagcaacaagtacatcgagcacctgctgacccagctggaggagcagcacaggagcctgtggagggagaagctggccgtggcccggctgcagcgggaggtggcccagaggaccagcgagggcgccatgtag

SEQ ID NO: 265455 - DNA, 1773 bp, Artificial Sequence
  derived and/or modified sequence
atggagggcaagaggcagctggagaagagggactttgggaagaggctgagcctggacagcagcctggtggagtacatggacagcaacaagtacatcgagcacctgctgacccagctggaggagcagcacaggagcctgtggagggagaagctggccgtggcccggctgcagcgggaggtggcccagaggaccagcgagggcgccatgcatgagaagctgattcatgagctggaggaggagcggcacctgcggctgcagagcgagaagaggctgcaggaggtgaccctggagagcgagaggaaccgcatccagatgaggagcctgcagcagcagttcagcaggatggaggagaccgtgaggaacctgctgcagagccagggcagccctgagcagaagaaggaggagaccgtgaacatcatggtgtaccaggagaagctgtctgaggaggagaggaagcacaaggaggccctggaggacctgcacatggtggtggatgaggacagccgctctgagagcagcagcacagatgagggcaaggagaagaccaagctgctgctggagcggctgaaggccctggaggctgaaaattctgccctggccctggagaatgaaaaccagcgggagcagtatgagcgctgcctggatgaggtggccaaccaggtggtgcaggccctgctgacccagaaggacctgcgggaggagtgtgtgaagctgaagaccagggtgtttgacctggagcagcagaacagaaccctgagcatcctcttccagcagagggtgcggcccaccagtgacctgctgctgcagaagctgcacagccggctgctggacctgagcagcggggacctgctgtctgaggtggagaggaacagaagcctgacccagagcaggacagatgctgaggtgcatgagcaccagctgaacaccaagagcgccctgaagtgccccggcctgggcgccgtcatccctggccacctgtgccccagaaattcctacagcagcagcagcgagctgagcctgagcagcacctgcagcgagtacagcagcggcagcagctacacctggcatgatggcaagaacctgaggaagagggtgaaggaggccaatgaaaacctgcaggaggatgaagatgatgctgtggccgacagcgtcttccagagccacatcatcgagagcaactgccagatgaggaccctggacagcggcatcggcaccttccccctgcctgattctggcaacagaagcacaggccgctacctgtgccagcctgacagcccagaagatgctgagcccctgctgcccctgcagagcgccctgtctgctgtgtcctccatgagggcccagaccctggagcgggaggtgcccagcagcacagatggccagaggcctgctgacagcgccatcgtgcacagcaccagtgaccccatcatgacagcccggggcatgaggcccctgcagagccggctgcccaagccagccagcagcggcaaggtgagcagccagaagcagaatgaggccgagccccggccccagacctgcagcagctttggctatgcagaggaccccatggccagccagcccctgcctgactggggcagcgaggtggccgccaccggcacccaggacaaggcccccaggatgtgcacctacagcgccagcggcggcagcaacagcgacagcgacctggactatggagacaatggatttggagctggccggggccagctggtgaaggccctgaagtctgctgcccctgagattgagaccacctag

SEQ ID NO: 265456 - DNA, 1773 bp, Artificial Sequence
  derived and/or modified sequence
atggagggcaagaggcagctggagaagagggactttgggaagaggctgagcctggacagcagcctggtggagtacatggacagcaacaagtacatcgagcacctgctgacccagctggaggagcagcacaggagcctgtggagggagaagctggccgtggcccggctgcagcgggaggtggcccagaggaccagcgagggcgccatgcatgagaagctgattcatgagctggaggaggagcggcacctgcggctgcagagcgagaagaggctgcaggaggtgaccctggagagcgagaggaaccgcatccagatgaggagcctgcagcagcagttcagcaggatggaggagaccgtgaggaacctgctgcagagccagggcagccctgagcagaagaaggaggagaccgtgaacatcatggtgtaccaggagaagctgtctgaggaggagaggaagcacaaggaggccctggaggacctgcacatggtggtggatgaggacagccgctctgagagcagcagcacagatgagggcaaggagaagaccaagctgctgctggagcggctgaaggccctggaggctgaaaattctgccctggccctggagaatgaaaaccagcgggagcagtatgagcgctgcctggatgaggtggccaaccaggtggtgcaggccctgctgacccagaaggacctgcgggaggagtgtgtgaagctgaagaccagggtgtttgacctggagcagcagaacagaaccctgagcatcctcttccagcagagggtgcggcccaccagtgacctgctgctgcagaagctgcacagccggctgctggacctgagcagcggggacctgctgtctgaggtggagaggaacagaagcctgacccagagcaggacagatgctgaggtgcatgagcaccagctgaacaccaagagcgccctgaagtgccccggcctgggcgccgtcatccctggccacctgtgccccagaaattcctacagcagcagcagcgagctgagcctgagcagcacctgcagcgagtacagcagcggcagcagctacacctggcatgatggcaagaacctgaggaagagggtgaaggaggccaatgaaaacctgcaggaggatgaagatgatgctgtggccgacagcgtcttccagagccacatcatcgagagcaactgccagatgaggaccctggacagcggcatcggcaccttccccctgcctgattctggcaacagaagcacaggccgctacctgtgccagcctgacagcccagaagatgctgagcccctgctgcccctgcagagcgccctgtctgctgtgtcctccatgagggcccagaccctggagcgggaggtgcccagcagcacagatggccagaggcctgctgacagcgccatcgtgcacagcaccagtgaccccatcatgacagcccggggcatgaggcccctgcagagccggctgcccaagccagccagcagcggcaaggtgagcagccagaagcagaatgaggccgagccccggccccagacctgcagcagctttggctatgcagaggaccccatggccagccagcccctgcctgactggggcagcgaggtggccgccaccggcacccaggacaaggcccccaggatgtgcacctacagcgccagcggcggcagcaacagcgacagcgacctggactatggagacaatggatttggagctggccggggccagctggtgaaggccctgaagtctgctgcccctgagatgcccatcacctag

SEQ ID NO: 265457 - DNA, 537 bp, Artificial Sequence
  derived and/or modified sequence
atggacagcaacaagtacatcgagcacctgctgacccagctggaggagcagcacaggagcctgtggagggagaagctggccgtggcccggctgcagcgggaggtggcccagaggaccagcgagggcgccatgcatgagaagctgatccacgagctggaggaggagcggcacctgcggctgcagagcgagaagaggctgcaggaggtgaccctggagagcgagaggaaccgcatccagatgaggagcctgcagcagcagttcagcaggatggaggagaccgtgaggaacctgctgcagagccagggcagccctgagcagaagaaggaggagaccgtgaacatcatggtgtaccaggagaagctgtctgaggaggagaggaagcacaaggaggccctggaggacctgcacatggtggtggatgaggacagccgctctgagagcagcagcacagatgagggcaaggagaagaccaagctgctgctggagcggctgaaggccctggagagaaatggctggaactggcaccctgtgtcctag

SEQ ID NO: 265458 - DNA, 210 bp, Artificial Sequence
  derived and/or modified sequence
atggagggcaagcggcagctggagaagcgggacttcggcaagcggctgtcgctggactctagcttggtggaatatatggactccaacaagtacatcgagcacctgctgactcagctcgaagaacagcaccgaagcctttggcgagagaagctagccgtagctaggctccagcgcgaagtggcccagaggactagcgagggcgcgatgtag

SEQ ID NO: 265459 - DNA, 1773 bp, Artificial Sequence
  derived and/or modified sequence
atggagggcaagcggcagctggagaagcgggacttcggcaagcggctgtccctcgacagcagcttagtggaatacatggattctaataaatatattgaacatttgctcacccaattagaggaacaacacagaagcctgtggcgggagaaactcgccgtcgctcggctgcagcgcgaggtcgcacagcgcacatccgaaggagccatgcacgaaaagctcatacacgaactcgaagaagagcggcacctaagacttcagtctgaaaaacgcctgcaggaagtaaccctggagagcgagcggaacagaattcagatgagaagtttgcagcaacaattctcgagaatggaagaaacagtccgtaacctcctgcaatcacagggctcacctgagcagaaaaaagaagagactgtcaacatcatggtctaccaggaaaagctgagcgaagaagaaaggaagcacaaagaagccttggaggatctgcatatggtggttgatgaagactctaggagcgagtcatcctctactgacgaaggaaaggagaagacgaagctgctgctggagcggcttaaggccttagaggccgaaaactccgcactagctttagagaacgaaaatcagcgtgagcaatatgagcgctgtctcgatgaggtcgccaaccaggtggttcaggcgctactgacacaaaaagacctgagggaggagtgcgttaagctaaaaacgagggtcttcgacctcgagcagcagaatcgaaccttatctattctgtttcagcagagagtgcggcctacatccgacctgcttctccagaaactgcacagccgcctgctggacttgagttctggcgacctcctctctgaggttgagcgtaacaggagcctgacgcagagtcggaccgacgctgaggtacacgagcaccaactgaatactaagtcagcccttaagtgccccggactcggcgcagtgattccaggacatttgtgtccccgaaactcttatagttctagttccgagctgtccctatcaagcacatgcagcgagtacagcagcgggtcatcttatacatggcatgacgggaagaatctgaggaagcgcgtgaaggaggccaatgagaacttgcaggaggatgaagacgacgctgtggccgacagcgtattccagtcccatattatagagtccaactgtcagatgagaacgctggactctgggatcggcacatttcccctcccagactcagggaaccgcagcacaggccgctacctttgccagcccgactcccccgaagatgccgaacctctgcttcctcttcagtcagccctgagtgctgtgtctagcatgagagcccagaccctagagcgcgaagtgccgtccagtaccgacgggcagcggcccgccgattctgcaatagtacactccaccagtgatccgattatgaccgctcgaggaatgcggcccctgcagtcccggctgcccaagcctgcgtccagcgggaaggtctcctcacaaaagcagaacgaggccgaaccaaggcctcagacttgttcaagttttggctatgccgaagatcctatggcgtcacagccgctgcctgattgggggtccgaggtggccgcaaccggaacacaggacaaggccccaagaatgtgtacctacagcgcctctggagggagcaattccgatagcgatttagactacggagataatggttttggggcaggtcgggggcagcttgtcaaggcccttaaatcagcagcgcctgagatcgagacaacgtag

SEQ ID NO: 265460 - DNA, 1773 bp, Artificial Sequence
  derived and/or modified sequence
atggagggcaagcggcagctggagaagcgggacttcggcaagcggctctcactagacagctctttggtggagtacatggacagcaacaaatacatcgagcacctgctcacccagctggaagagcaacatagaagcctatggcgtgagaagctggccgttgccagattacagagagaggtcgctcaaaggacttctgaaggggctatgcatgaaaaattaatccacgagctggaggaggaacggcatctgaggctgcagagtgagaaaagattacaagaagtgacacttgaatccgagcgcaatcgcatccagatgcggtcacttcagcagcagtttagccgtatggaagagaccgtcaggaacctgttgcagagccaagggtcacctgaacaaaagaaggaggagaccgtgaacatcatggtttaccaggaaaaactaagcgaagaagaacgtaaacacaaagaagcgctcgaagacctgcatatggtggtagacgaggacagcaggtccgagtcatctagtaccgacgaagggaaagaaaaaaccaagctacttctggagaggctgaaagcactggaggcggagaattccgcacttgccctggaaaacgagaatcagcgggagcaatatgaacgttgtttagacgaggtcgccaaccaggtagtgcaggcgctgctgacccagaaggacctgagagaggagtgtgtcaaactcaagacacgggtgttcgatctggaacaacaaaacagaaccctcagtatattgttccaacagcgcgtgcgccctactagcgacctgctgttacagaaactccactcacggctattagatctgtcgtccggcgatctgctttcagaagtagaacgcaaccgttcattgacccagagcagaactgatgctgaggtgcatgagcatcagctgaacactaaaagtgccctgaagtgcccaggactgggagcggttatcccaggccacttatgtcctaggaatagttactcttctagcagcgaactgtcccttagcagtacttgctctgagtactcgagcggatctagctatacttggcatgacgggaagaatctgaggaagcgagttaaagaggccaacgaaaacttgcaggaagatgaagatgacgccgtcgcggattctgtgttccagtcccatataatcgaatccaattgccaaatgcggaccttagactcgggaattggaacctttcctctcccagacagcggcaacagatctaccggccgctatctctgccagcccgactctccagaggatgctgagccactccttccactacagtccgccctctcagccgtctcctcaatgagggcccagaccttagagcgagaagtgcctagctccacagatggacagaggcccgcggacagtgcaattgtccattccacgagtgacccgattatgacagcaaggggcatgcggccactgcagagcaggcttccaaagcctgcctcatctggaaaagtgtcgtctcagaagcagaacgaagccgagccaaggcctcagacttgcagctcctttgggtacgccgaggaccctatggcttcacaacctctgcccgactggggctctgaagtggccgctacagggacgcaggacaaagctccaagaatgtgcacctactctgcaagtggaggatctaatagtgatagtgacctggattacggagataacggttttggcgctggccgggggcaattggtcaaggccctaaagagtgccgctcctgaaatcgaaactacctag

SEQ ID NO: 265461 - DNA, 1773 bp, Artificial Sequence
  derived and/or modified sequence
atggagggcaagcggcagctggagaagcgggacttcggcaagcggctcagccttgattcctcccttgtggagtacatggactccaataaatacattgaacacttattgacccagctggaagaacagcacagatctctctggcgggaaaagctcgccgttgctcgtctgcagagagaggtcgcgcagcggacctctgaaggagctatgcatgagaagctgattcacgaactggaagaggagagacatctgcgattgcagtccgaaaagaggctacaggaggtcactctggaaagtgaacgaaatagaatccagatgaggagtctgcaacagcagttttcccgaatggaagagaccgtgagaaaccttctccagtctcagggatcaccagaacagaaaaaagaggaaaccgttaatataatggtgtatcaggagaagctcagcgaggaggagcgaaaacataaagaagctctggaagatttgcatatggtcgtggacgaggacagccgtagcgaaagctcttctacagatgaaggaaaggagaagacaaagttgttgctcgaaagactcaaggctctggaggccgagaactccgcgctggccttagagaacgagaatcaacgggagcagtacgaacgctgtctggatgaagtcgcaaatcaggtggtccaggccctgctcacccagaaagatcttagagaagaatgtgtgaaactgaaaacaagggtctttgacctggagcagcagaatcggactctgtcaattctatttcagcagagagtacgaccgacctctgacctcctcctccagaagctccacagcaggctgttggacctcagttctggtgacctgttatccgaagtcgaacgcaatagatcccttacacagtcaagaacagacgccgaggtgcatgaacaccagttgaacaccaagtccgcactgaagtgcccaggtcttggggctgtcatccctgggcatttatgcccaagaaactcttactcaagtagttccgaactgtccctgtcctctacttgctcagagtacagttccggtagctcctacacgtggcatgatggtaagaacctccgaaaaagagtgaaggaggccaatgagaacctgcaggaagacgaggacgacgccgttgccgattcagtgtttcagtcgcacattatcgagtcaaattgccagatgcgaaccctcgacagcggcatcggtacgtttcccttgcccgattcgggaaaccggtccacgggaagatacctatgtcagccagattcaccagaggacgcggaacctttgttaccgctgcagtcagcgctttctgcggtgtctagcatgcgtgcccagacactcgaaagagaggtgccatcctctacggacgggcaacgacctgcggattccgctattgtccattcaacttctgatcccattatgacggcccggggaatgcgccccctccaatcccgactgccaaagcctgctagctcaggcaaggtgagtagccagaaacagaatgaggcagagccccgaccccagacgtgttcgtcattcgggtacgccgaggacccaatggctagtcagcccctgcccgactggggttctgaggtggccgccaccggcacgcaggacaaggcgccaaggatgtgtacctactctgccagcggcgggagcaattctgactctgacctcgattacggggataacgggtttggtgcaggaagagggcagctggtcaaagctctgaaatctgccgcccccgagatgcccattacatag

SEQ ID NO: 265462 - DNA, 537 bp, Artificial Sequence
  derived and/or modified sequence
atggacagcaacaagtacatcgagcacctgctgacccagctggaggagcaacacaggagcctatggcgtgagaaactggctgtggcccgcctgcaaagggaggtggcccaacgaacttcagagggcgcaatgcatgaaaagctcattcacgagttggaggaggagaggcacctgcgcctccagtcagagaaacggttacaggaagtgaccttagaaagtgagagaaatagaatccagatgcggtctctgcaacagcaattctctcgaatggaagaaacagtgcgaaacttgcttcagtctcagggcagcccggagcaaaagaaggaagaaactgttaacatcatggtttaccaggagaagctctcagaagaggaacggaaacacaaggaggctttggaggacttgcacatggtagtggatgaggattccagatcagagagttcaagtacggatgaaggcaaagaaaagactaaactgctcctggaaaggctcaaggccctggaaaggaatgggtggaactggcacccagtgtcatag

SEQ ID NO: 265463 - DNA, 388 bp, Artificial Sequence
  derived and/or modified sequence
caggctttgcagagtttagagcatattctacccaactggccccagatggaaaatactgtcttgaaattggatggctttttaagtgtagctctccacagcctgctcaaagaaaaaaaaaaatgaccctggaaacagacgggggattcttataagtcacaaaagaaaataaataacttcatccatggagggaaagagacagcttgagaaaagggactttggaaaaaggctgtctctagacagcagtcttgtggaatacatggactccaataaatacattgagcatctgctgactcagcttgaggagcaacacaggagtctctggagggagaagttggcagtggcccgactacagcgagaagttgcccaaagaacaagtgagggggccatg

SEQ ID NO: 265464 - DNA, 1773 bp, Artificial Sequence
  derived and/or modified sequence
atggagggaaagagacagcttgagaaaagggactttggaaaaaggctgtctctagacagcagtcttgtggaatacatggactccaataaatacattgagcatctgctgactcagcttgaggagcaacacaggagtctctggagggagaagttggcagtggcccgactacagcgagaagttgcccaaagaacaagtgagggggccatgcatgagaagctgatacatgaactggaagaggagagacacttacgtcttcaaagcgagaagcggttgcaggaggtgaccctagagtctgaacgcaacagaattcagatgcgtagcttgcagcagcagttctccaggatggaagaaacagtacgaaatctattgcagagtcaaggatctccagagcagaaaaaagaagaaactgttaatataatggtctatcaggaaaagctgtcagaggaagagagaaaacataaggaagctttggaagatcttcacatggtggttgatgaggattcgaggagtgaaagcagcagtacagatgagggaaaagaaaagaccaaattgctattagagagattgaaagctctagaggcagagaattcagcgttggctttggagaatgaaaatcaaagggaacaatatgagcgatgtcttgatgaggtagccaaccaagttgttcaagctctgcttactcaaaaggatctaagagaggaatgtgtgaagttgaaaacaagagtgtttgatttggaacagcagaatcgaacactaagcatcctattccaacagcgagtcagacccacttctgatctgctcctccagaaacttcactcacgtctcttggatctttcatctggagatttgctttcagaggtggaaagaaaccgaagtctgacacagtcacgaactgatgctgaggtgcacgaacaccaactaaatacaaaatcggccttgaaatgccctggcttgggggctgtcatccctggtcatctctgtcctcgaaacagctacagtagcagcagtgaactgtctctttcaagcacctgcagcgagtactccagtggctcctcctacacgtggcacgatgggaagaacctcaggaaaagggtaaaagaggcaaatgaaaacttgcaagaggatgaagacgatgcagttgcagattctgtatttcagagccacatcatagaatccaactgccagatgagaacattggacagtgggatcggaacctttccactcccagactcgggaaatcgctcgacaggacgctacctatgccagccagactccccagaggacgctgagcctctcctgcctctccagtcagccctttctgcagtttcttccatgagagcccaaacccttgaacgtgaagtgccttcctccacagacggccagcgccctgcagatagcgccattgttcattccacatccgaccccatcatgaccgccagagggatgaggcctcttcagagccgcctccccaaaccagcttcctcaggaaaagtcagttcccaaaagcagaatgaagcagagccaaggcctcagacatgctcatcattcggatatgctgaagacccaatggcaagccagccgcttccagactgggggagtgaagttgctgccaccgggacccaggacaaggcacccagaatgtgtacgtactctgccagcggtggcagtaatagtgacagtgacctggactatggagataatggttttggagctggaaggggacagttagtgaaagcactgaagagcgctgccccagaaattgagacaacttga

SEQ ID NO: 265465 - DNA, 2390 bp, Artificial Sequence
  derived and/or modified sequence
gaagcaactacggagccgcagcccagggagcaagtctccgcaaacttgctccgcattcacggcaggacttcccagccgctgtggatgttcaggaaaaccgagtctgttctgttagcgtggcctttgaatgcttcaaaaataaacagaggataaccaaccgcgggaggaaatttttagctggagagagttgtagttcctgtgtctgtctccaggactgtgatatgtgttgactgaagagctaactacaagttcatcgtgaagaataaatgagataagctacctcaagtgcctgtaccaaaatagactcacaatacattgaccctggaaacagacgggggattcttataagtcacaaaagaaaataaataacttcatccatggagggaaagagacagcttgagaaaagggactttggaaaaaggctgtctctagacagcagtcttgtggaatacatggactccaataaatacattgagcatctgctgactcagcttgaggagcaacacaggagtctctggagggagaagttggcagtggcccgactacagcgagaagttgcccaaagaacaagtgagggggccatgcatgagaagctgatacatgaactggaagaggagagacacttacgtcttcaaagcgagaagcggttgcaggaggtgaccctagagtctgaacgcaacagaattcagatgcgtagcttgcagcagcagttctccaggatggaagaaacagtacgaaatctattgcagagtcaaggatctccagagcagaaaaaagaagaaactgttaatataatggtctatcaggaaaagctgtcagaggaagagagaaaacataaggaagctttggaagatcttcacatggtggttgatgaggattcgaggagtgaaagcagcagtacagatgagggaaaagaaaagaccaaattgctattagagagattgaaagctctagaggcagagaattcagcgttggctttggagaatgaaaatcaaagggaacaatatgagcgatgtcttgatgaggtagccaaccaagttgttcaagctctgcttactcaaaaggatctaagagaggaatgtgtgaagttgaaaacaagagtgtttgatttggaacagcagaatcgaacactaagcatcctattccaacagcgagtcagacccacttctgatctgctcctccagaaacttcactcacgtctcttggatctttcatctggagatttgctttcagaggtggaaagaaaccgaagtctgacacagtcacgaactgatgctgaggtgcacgaacaccaactaaatacaaaatcggccttgaaatgccctggcttgggggctgtcatccctggtcatctctgtcctcgaaacagctacagtagcagcagtgaactgtctctttcaagcacctgcagcgagtactccagtggctcctcctacacgtggcacgatgggaagaacctcaggaaaagggtaaaagaggcaaatgaaaacttgcaagaggatgaagacgatgcagttgcagattctgtatttcagagccacatcatagaatccaactgccagatgagaacattggacagtgggatcggaacctttccactcccagactcgggaaatcgctcgacaggacgctacctatgccagccagactccccagaggacgctgagcctctcctgcctctccagtcagccctttctgcagtttcttccatgagagcccaaacccttgaacgtgaagtgccttcctccacagacggccagcgccctgcagatagcgccattgttcattccacatccgaccccatcatgaccgccagagggatgaggcctcttcagagccgcctccccaaaccagcttcctcaggaaaagtcagttcccaaaagcagaatgaagcagagccaaggcctcagacatgctcatcattcggatatgctgaagacccaatggcaagccagccgcttccagactgggggagtgaagttgctgccaccgggacccaggacaaggcacccagaatgtgtacgtactctgccagcggtggcagtaatagtgacagtgacctggactatggagataatggttttggagctggaaggggacagttagtgaaagcactgaagagcgctgccccagaaattgagacaacttgaagaaacaaaagacgatcccgagaatagattatcgaaaatttccctagagtcattcaataaatttaacagcaatactgtgattttattagaaaaagagaagaactctctgaacaaggttgaaggacagaaggaagaaaaagaaaaaaatgaagagacatctttgagtagttcagataggcctggggtagacaacttggaatctttgagtgattctttatatgatagcttctcttcctgtgc

SEQ ID NO: 265466 - DNA, 1770 bp, Artificial Sequence
  derived and/or modified sequence
atggagggaaagagacagcttgagaaaagggactttggaaaaaggctgtctctagacagcagtcttgtggaatacatggactccaataaatacattgagcatctgctgactcagcttgaggagcaacacaggagtctctggagggagaagttggcagtggcccgactacagcgagaagttgcccaaagaacaagtgagggggccatgcatgagaagctgatacatgaactggaagaggagagacacttacgtcttcaaagcgagaagcggttgcaggaggtgaccctagagtctgaacgcaacagaattcagatgcgtagcttgcagcagcagttctccaggatggaagaaacagtacgaaatctattgcagagtcaaggatctccagagcagaaaaaagaagaaactgttaatataatggtctatcaggaaaagctgtcagaggaagagagaaaacataaggaagctttggaagatcttcacatggtggttgatgaggattcgaggagtgaaagcagcagtacagatgagggaaaagaaaagaccaaattgctattagagagattgaaagctctagaggcagagaattcagcgttggctttggagaatgaaaatcaaagggaacaatatgagcgatgtcttgatgaggtagccaaccaagttgttcaagctctgcttactcaaaaggatctaagagaggaatgtgtgaagttgaaaacaagagtgtttgatttggaacagcagaatcgaacactaagcatcctattccaacagcgagtcagacccacttctgatctgctcctccagaaacttcactcacgtctcttggatctttcatctggagatttgctttcagaggtggaaagaaaccgaagtctgacacagtcacgaactgatgctgaggtgcacgaacaccaactaaatacaaaatcggccttgaaatgccctggcttgggggctgtcatccctggtcatctctgtcctcgaaacagctacagtagcagcagtgaactgtctctttcaagcacctgcagcgagtactccagtggctcctcctacacgtggcacgatgggaagaacctcaggaaaagggtaaaagaggcaaatgaaaacttgcaagaggatgaagacgatgcagttgcagattctgtatttcagagccacatcatagaatccaactgccagatgagaacattggacagtgggatcggaacctttccactcccagactcgggaaatcgctcgacaggacgctacctatgccagccagactccccagaggacgctgagcctctcctgcctctccagtcagccctttctgcagtttcttccatgagagcccaaacccttgaacgtgaagtgccttcctccacagacggccagcgccctgcagatagcgccattgttcattccacatccgaccccatcatgaccgccagagggatgaggcctcttcagagccgcctccccaaaccagcttcctcaggaaaagtcagttcccaaaagcagaatgaagcagagccaaggcctcagacatgctcatcattcggatatgctgaagacccaatggcaagccagccgcttccagactgggggagtgaagttgctgccaccgggacccaggacaaggcacccagaatgtgtacgtactctgccagcggtggcagtaatagtgacagtgacctggactatggagataatggttttggagctggaaggggacagttagtgaaagcactgaagagcgctgccccagaaatgcccataact

SEQ ID NO: 265467 - DNA, 658 bp, Artificial Sequence
  derived and/or modified sequence
agaaagaggaaagtaagggctgactgaggctgtcagatcagagagctgaggctggaagtggctacagtggtcctgatgacccagctgaggtcactggttggctcttgcttcagtagaggaatacatggactccaataaatacattgagcatctgctgactcagcttgaggagcaacacaggagtctctggagggagaagttggcagtggcccgactacagcgagaagttgcccaaagaacaagtgagggggccatgcatgagaagctgatacatgaactggaagaggagagacacttacgtcttcaaagcgagaagcggttgcaggaggtgaccctagagtctgaacgcaacagaattcagatgcgtagcttgcagcagcagttctccaggatggaagaaacagtacgaaatctattgcagagtcaaggatctccagagcagaaaaaagaagaaactgttaatataatggtctatcaggaaaagctgtcagaggaagagagaaaacataaggaagctttggaagatcttcacatggtggttgatgaggattcgaggagtgaaagcagcagtacagatgagggaaaagaaaagaccaaattgctattagagagattgaaagctctagagagaaatggctggaattggcatcctgtttct

SEQ ID NO: 265468 - DNA, 210 bp, Artificial Sequence
  derived and/or modified sequence
atggaaggcaagcgtcagctcgagaagcgagactttgggaaaagactcagcctggactccagcctggtggaatacatggactctaataagtacatcgaacacttactaacccaactggaggagcagcaccgcagcctgtggcgcgagaagctcgccgtcgccaggctgcagcgcgaggtggcccaacgcaccagcgaaggagcgatgtag

SEQ ID NO: 265469 - DNA, 1773 bp, Artificial Sequence
  derived and/or modified sequence
atggaggggaaacgtcagctggagaagagagactttggaaaacgactgtccctagactccagtctcgtggagtacatggactccaataagtacattgaacacttgctgacacagcttgaggagcagcatcgatctctgtggagggaaaaactggccgtcgccaggctgcagcgcgaagtcgcacagagaacctcagaaggcgcaatgcatgaaaagctaatccatgagttggaagaggaacgtcacctccggctccagtccgagaaaagattacaggaagttacactggaatccgagcggaaccgcatccagatgaggtcactccagcagcagttctctcggatggaggagaccgtccgcaaccttttacagagccaaggctcgcccgagcaaaagaaagaggaaaccgtcaacattatggtgtaccaggaaaaactgagtgaagaagagaggaagcacaaggaagccctggaggatctgcatatggttgtggacgaagacagtcgcagtgagagctcttccacagacgagggaaaggaaaagaccaaacttctgcttgagcgactcaaggccttggaggcagaaaatagtgcgttggcgctggagaatgaaaaccagcgcgagcagtatgagcggtgcctggatgaagtggcaaaccaggtggtccaggctctcctgactcagaaggacctccgcgaagagtgcgtgaagctaaagacgcgggtctttgatctggaacagcaaaatagaactctatcgatactctttcagcaacgagtcaggccaactagtgaccttcttctgcaaaaactgcatagcagacttctggatcttagttcaggagacttgttgtctgaagtcgaacgcaatcgttctctaacccagagcaggaccgacgccgaagtccatgagcatcaacttaacacaaaaagtgcactcaagtgccccggattgggtgccgtgattcctgggcatctttgtcctcgtaattcctactcatcttcatctgagctgagcctgagctccacctgctccgagtatagcagcggcagctcctacacttggcacgacggcaagaacttgcggaaacgtgtgaaagaggccaacgagaatctgcaggaggacgaagacgatgcagtggctgattctgtgttccagagccacatcatcgagtcaaattgccagatgaggactctcgactccggcatcgggacctttccacttcccgactctgggaacaggagtaccggccgatacctgtgtcagcctgactccccggaagatgccgagccacttctcccactgcagtctgctctatccgcagtttctagcatgcgtgcccagactctggaacgcgaggtgccctctagcacagacggccagcgccctgcagattccgccatcgtccattctacatccgaccctattatgaccgccagggggatgcgccctctacaaagccggcttccaaaaccagcttccagcggtaaggtgtccagtcaaaaacagaacgaagctgagccacgccctcagacgtgttctagctttggctacgccgaggatcccatggcgtcgcagcctctccccgattgggggagtgaagtggctgctactggcacacaggacaaggccccaaggatgtgtacttactctgccagcggtggctccaactctgacagcgacctggattatggggataatggttttggagcaggcagaggacagctggtcaaagctctgaaaagcgctgcccctgagatcgaaactacatag

SEQ ID NO: 265470 - DNA, 1773 bp, Artificial Sequence
  derived and/or modified sequence
atggagggaaagcgccaactcgagaaacgagacttcggtaaacgcctgtcactcgacagtagcttggtcgagtatatggattccaataagtacatagaacatctcttaactcagcttgaggagcagcaccggagtttgtggagagagaagctggctgtggcgcgactgcagcgcgaagtggctcagcgcacttccgagggtgccatgcatgaaaagttaatccatgaattagaggaggaacggcacttgaggctgcagagtgaaaaacgactgcaagaggtgaccttggaaagcgagagaaaccgtatccagatgcgcagccttcagcagcagttcagccggatggaagaaactgtgcgtaacctgctccaatcgcaaggaagccccgagcagaagaaagaagagacagtgaacatcatggtctatcaagaaaagctgtctgaggaagaacggaagcataaggaggcgcttgaagatctgcacatggtagtggacgaggactctagaagtgagagcagctctacggacgaaggcaaggagaaaaccaaactgttactggaaagattgaaggctctcgaggccgagaatagtgctctggcactcgaaaatgagaaccaacgagaacagtacgaaaggtgtctggacgaagtggcgaaccaggtggtacaggccctgctgacccaaaaggacctaagggaagaatgtgttaaactaaagactcgagtgtttgacttggagcagcagaatcgcaccctgtcaattctcttccaacagcgagtacgtcctacaagtgacttgctgttacagaagctccacagtagactgttggatctatcctctggcgatctcttgtcagaagtggagcgcaatagatctctgactcaatcccggacggacgccgaagtgcatgagcatcagcttaataccaagagcgcgttgaagtgtccgggtctgggagcagttatacccggacatttatgcccgcgaaattcctactcaagttcatccgagctctccctgagctctacttgttctgaatatagctcagggtccagctacacatggcacgatgggaaaaatctcagaaagagggtcaaagaagccaatgagaacctgcaggaggacgaggatgatgcggtggctgactcagtgttccagtcacacatcattgagtccaactgtcagatgcggacactcgactcaggaatcggaacctttccactccctgattcaggtaatcgtagtaccggcagatatctgtgtcaacccgacagcccggaagacgctgaaccgctcttgccgctgcagtcggcgttatccgcagtgtcctcaatgcgtgctcaaacacttgagagggaggtcccaagtagcacagatggtcagagaccagccgatagtgctatagtgcattcgacatccgatcccattatgaccgcgagaggcatgcggccactgcagtcccggctgcccaaacccgctagtagcggcaaggtgtcctcccagaaacaaaacgaagccgagccgagaccccagacttgttcctccttcggctatgccgaggatcctatggcatcccaaccgctgccagactggggaagcgaagtcgctgccaccggcactcaagacaaggcgcctagaatgtgtacctattccgcgtccggcggatcaaactctgactctgatttagattacggagataatggcttcggggcaggcagggggcaactggtgaaggccctgaaatcagcggcaccagagattgagaccacctag

SEQ ID NO: 265471 - DNA, 1773 bp, Artificial Sequence
  derived and/or modified sequence
atggagggaaagaggcaactggagaagagagactttgggaaaaggctttccctcgactcatctcttgtagagtacatggattctaacaagtatatcgagcacctgttgactcagctggaagaacagcatcggtccctgtggcgcgagaagctggctgtcgctaggctccagcgagaagtcgcccaacgcacttcggaaggcgcaatgcacgagaaattgatacatgaactcgaggaggagaggcacttaagactccagagtgagaagagacttcaagaggtcaccctggaatcagaaaggaaccggatccaaatgcgaagtcttcagcagcagttttcgcgtatggaagaaacggtgcgtaacttgctgcagtcacaaggtagtccagagcaaaagaaagaagagacagtgaatatcatggtttatcaagagaagttgtctgaggaagagcgaaagcataaggaagcactggaagatttgcacatggtcgtggacgaagatagtagaagcgagtcatcaagtaccgatgaggggaaggaaaagacaaaacttctgcttgaacggctcaaagcattggaagccgagaacagcgcactggcgcttgagaatgagaatcagcgggagcagtatgagcggtgcctggatgaggtggcgaaccaggttgtgcaggctctgcttacccaaaaggaccttagagaggagtgcgttaagcttaagacgcgggtctttgacttggagcagcagaaccggacactgagcatattattccagcaacgcgtccggcctacctcggacctgcttctacaaaaactacatagcagactgctcgacctgtctagcggggacctgttgtctgaggtggaacgcaaccgttcccttactcaatccaggactgatgctgaggtccatgagcatcaacttaatacgaaatctgccctgaagtgtcctggactaggtgctgtgattcctggccacctctgtcccaggaattcatacagctctagctcggagctctctttgtcttcaacctgcagcgagtacagttccggatcatcatacacatggcatgacggcaagaacctgcgcaagcgtgtgaaggaggcgaatgagaatctgcaggaagacgaagacgatgccgtagcggattctgtgttccagagtcatataatcgaatccaactgtcagatgcggactctcgattccgggattgggacttttcctcttccagatagcggtaacagatccactggacggtatttatgtcaacccgattccccagaggatgcagaacccctcttacctctgcagtccgcgcttagtgcagtgtcctctatgagggcccaaacactggagcgcgaggttcccagttccaccgatggccagcgacccgctgattctgccatagtgcactccacctccgatcctatcatgaccgcccgaggcatgcggcctctgcaatctcgcttaccaaaacccgcatcatccgggaaggtgtcatctcagaaacagaacgaggctgaaccccgaccgcaaacctgttccagcttcggttatgctgaagatcccatggctagtcagccgcttcccgactggggttctgaggtcgcagcgacaggaactcaggacaaagccccaagaatgtgcacttattccgcaagcggcggtagcaactcagactcagacttggactacggggacaatgggttcggggctggacgaggacagctggttaaggccctcaagtctgcagcaccagagatgccgattacctag

SEQ ID NO: 265472 - DNA, 537 bp, Artificial Sequence
  derived and/or modified sequence
atggatagcaacaaatatatcgagcacttactgacgcagctcgaggaacagcaccggagtctctggcgcgagaaactggcagtggcccgactgcagcgtgaggtagctcaacgtactagcgagggggcaatgcacgagaaactgatccacgagttggaagaagagcggcacttgcggctgcaatctgagaagcggctacaagaagtgacattggagagtgaacgcaatagaattcagatgcgatccctacagcagcaatttagccgaatggaagaaacagtgagaaacctgctccaaagccaaggctccccagagcagaagaaagaggaaactgtgaacatcatggtctaccaggaaaaactctctgaagaggagagaaaacacaaggaagcccttgaagacttacatatggtggtggacgaggattcacggtccgagtcttcttcaacggatgaggggaaagaaaaaacaaaactcctgcttgagaggctgaaggccctggagaggaacggatggaactggcaccccgttagctag

SEQ ID NO: 265473 - protein, 677 aa, Artificial Sequence
  derived and/or modified sequence
MGDSGSRRSTLVSRLPIFRRSINRRHDSLPSSPSSSNTVGVHSSSPSSTNSSSGSTGKRRSIFRTPSISFHHKKGSEPKQEPTNQNLSISNGAQPGHSNMQKLSLEEHIKTRGRHSVGFSSSRNKKITRSLTEDFEREKEHSTNKNVFINCLSSGKSEGDDSGFTEDQTRRSVKQSTRKLLPKSFSSHYKFSKPVLQSQSISLVQQSEFSLEVTQYQEREPVLVRASPSCSVDVTERAGSSLQSPLLSADLTTAQTPSEFLALTEDSVSEMDAFSKSGSMASHCDNFGHNDSTSQMSLNSAAVTKTTTELTGTVPCAIMSPGKYRLEGQCSTESNSLPETSAANQKEVLLQIAELPATSVSHSESNLPADSEREENIGLQNGETMLGTNSPRKLGFYEQHKAIAEHVKGIHPISDSKIIPTSGDHHIFNKTSHGYEANPAKVLASSLSPFREGRFIERRLRSSSEGTAGSSRMILKPKDGNIEEVNSLRKQRAGSSSSKMNSLDVLNNLGSCELDEDDLMLDLEFLEEQSLHPSVCREDSYHSVVSCAAVVLTPMEPMIEMKKREEPEFPEPSKQNLSLKLTKDVDQEARCSHISRMPNSPSADWPLQGVEENGGIDSLPFRLMLQDCTAVKTLLLKMKRVLQESADMSPASSTTSLPVSPLTEEPVPFKTTYPREF

SEQ ID NO: 265474 - DNA, 2034 bp, Artificial Sequence
  derived and/or modified sequence
atgggcgacagcggcagcagaagaagcaccctggtgagcagactgcccatcttcagaagaagcatcaacagaagacacgacagcctgcccagcagccccagcagcagcaacaccgtgggcgtgcacagcagcagccccagcagcaccaacagcagcagcggcagcaccggcaagagaagaagcatcttcagaacccccagcatcagcttccaccacaagaagggcagcgagcccaagcaggagcccaccaaccagaacctgagcatcagcaacggcgcccagcccggccacagcaacatgcagaagctgagcctggaggagcacatcaagaccagaggcagacacagcgtgggcttcagcagcagcagaaacaagaagatcaccagaagcctgaccgaggacttcgagagagagaaggagcacagcaccaacaagaacgtgttcatcaactgcctgagcagcggcaagagcgagggcgacgacagcggcttcaccgaggaccagaccagaagaagcgtgaagcagagcaccagaaagctgctgcccaagagcttcagcagccactacaagttcagcaagcccgtgctgcagagccagagcatcagcctggtgcagcagagcgagttcagcctggaggtgacccagtaccaggagagagagcccgtgctggtgagagccagccccagctgcagcgtggacgtgaccgagagagccggcagcagcctgcagagccccctgctgagcgccgacctgaccaccgcccagacccccagcgagttcctggccctgaccgaggacagcgtgagcgagatggacgccttcagcaagagcggcagcatggccagccactgcgacaacttcggccacaacgacagcaccagccagatgagcctgaacagcgccgccgtgaccaagaccaccaccgagctgaccggcaccgtgccctgcgccatcatgagccccggcaagtacagactggagggccagtgcagcaccgagagcaacagcctgcccgagaccagcgccgccaaccagaaggaggtgctgctgcagatcgccgagctgcccgccaccagcgtgagccacagcgagagcaacctgcccgccgacagcgagagagaggagaacatcggcctgcagaacggcgagaccatgctgggcaccaacagccccagaaagctgggcttctacgagcagcacaaggccatcgccgagcacgtgaagggcatccaccccatcagcgacagcaagatcatccccaccagcggcgaccaccacatcttcaacaagaccagccacggctacgaggccaaccccgccaaggtgctggccagcagcctgagccccttcagagagggcagattcatcgagagaagactgagaagcagcagcgagggcaccgccggcagcagcagaatgatcctgaagcccaaggacggcaacatcgaggaggtgaacagcctgagaaagcagagagccggcagcagcagcagcaagatgaacagcctggacgtgctgaacaacctgggcagctgcgagctggacgaggacgacctgatgctggacctggagttcctggaggagcagagcctgcaccccagcgtgtgcagagaggacagctaccacagcgtggtgagctgcgccgccgtggtgctgacccccatggagcccatgatcgagatgaagaagagagaggagcccgagttccccgagcccagcaagcagaacctgagcctgaagctgaccaaggacgtggaccaggaggccagatgcagccacatcagcagaatgcccaacagccccagcgccgactggcccctgcagggcgtggaggagaacggcggcatcgacagcctgcccttcagactgatgctgcaggactgcaccgccgtgaagaccctgctgctgaagatgaagagagtgctgcaggagagcgccgacatgagccccgccagcagcaccaccagcctgcccgtgagccccctgaccgaggagcccgtgcccttcaagaccacctaccccagagagttctag

SEQ ID NO: 265475 - DNA, 2034 bp, Artificial Sequence
  derived and/or modified sequence
atgggcgacagcggcagcagaagaagcaccctggtgagcagactgcccatcttcagaagaagcatcaacagaagacacgacagcctgcccagcagccccagcagcagcaacaccgtgggcgtgcacagcagcagccccagcagcaccaacagcagcagcggcagcaccggcaagagaagaagcatcttcagaacccccagcatcagcttccaccacaagaagggcagcgagcccaagcaggagcccaccaaccagaacctgagcatcagcaacggcgcccagcccggccacagcaacatgcagaagctgagcctggaggagcacatcaagaccagaggcagacacagcgtgggcttcagcagcagcagaaacaagaagatcaccagaagcctgaccgaggacttcgagagagagaaggagcacagcaccaacaagaacgtgttcatcaactgcctgagcagcggcaagagcgagggcgacgacagcggcttcaccgaggaccagaccagaagaagcgtgaagcagagcaccagaaagctgctgcccaagagcttcagcagccactacaagttcagcaagcccgtgctgcagagccagagcatcagcctggtgcagcagagcgagttcagcctggaggtgacccagtaccaggagagagagcccgtgctggtgagagccagccccagctgcagcgtggacgtgaccgagagagccggcagcagcctgcagagccccctgctgagcgccgacctgaccaccgcccagacccccagcgagttcctggccctgaccgaggacagcgtgagcgagatggacgccttcagcaagagcggcagcatggccagccactgcgacaacttcggccacaacgacagcaccagccagatgagcctgaacagcgccgccgtgaccaagaccaccaccgagctgaccggcaccgtgccctgcgccatcatgagccccggcaagtacagactggagggccagtgcagcaccgagagcaacagcctgcccgagaccagcgccgccaaccagaaggaggtgctgctgcagatcgccgagctgcccgccaccagcgtgagccacagcgagagcaacctgcccgccgacagcgagagagaggagaacatcggcctgcagaacggcgagaccatgctgggcaccaacagccccagaaagctgggcttctacgagcagcacaaggccatcgccgagcacgtgaagggcatccaccccatcagcgacagcaagatcatccccaccagcggcgaccaccacatcttcaacaagaccagccacggctacgaggccaaccccgccaaggtgctggccagcagcctgagccccttcagagagggcagattcatcgagagaagactgagaagcagcagcgagggcaccgccggcagcagcagaatgatcctgaagcccaaggacggcaacatcgaggaggtgaacagcctgagaaagcagagagccggcagcagcagcagcaagatgaacagcctggacgtgctgaacaacctgggcagctgcgagctggacgaggacgacctgatgctggacctggagttcctggaggagcagagcctgcaccccagcgtgtgcagagaggacagctaccacagcgtggtgagctgcgccgccgtggtgctgacccccatggagcccatgatcgagatgaagaagagagaggagcccgagttccccgagcccagcaagcagaacctgagcctgaagctgaccaaggacgtggaccaggaggccagatgcagccacatcagcagaatgcccaacagccccagcgccgactggcccctgcagggcgtggaggagaacggcggcatcgacagcctgcccttcagactgatgctgcaggactgcaccgccgtgaagaccctgctgctgaagatgaagagagtgctgcaggagagcgccgacatgagccccgccagcagcaccaccagcctgcccgtgagccccctgaccgaggagcccgtgcccttcaaggactactacaagagacccttctag

SEQ ID NO: 265476 - DNA, 2034 bp, Artificial Sequence
  derived and/or modified sequence
atgggcgattcaggatccaggcgtagcaccctcgtgtccagactacctatcttccgacgcagtatcaacagacgccacgattccctccctagttcgcctagcagttccaacacagtcggcgtgcacagcagcagcccgtcgtccaccaacagtagctcaggtagcaccgggaagaggcggagtatcttcaggacaccgagtatcagctttcatcataagaagggatccgaaccaaagcaggaacctaccaaccagaatctgagcatcagcaacggggcccaaccaggacacagtaacatgcagaaactctcgttggaggaacacatcaagacgcgcggcaggcactccgtcggtttttccagctctcggaataagaaaattaccagatccttgactgaggattttgaaagagaaaaggaacattcaacgaataaaaacgtcttcattaattgcctaagcagcggaaagagtgagggggatgattccgggttcaccgaggaccaaaccaggcggtccgtgaagcaatccactaggaagcttttgcccaaatcatttagctcccattacaagttctcaaagccagtgttacagagccagtctatctccctggtgcagcagtctgagttctcactggaggtgactcagtaccaagaacgggaacccgtcctggttagagcttctccgtcatgttctgtcgacgtaaccgagagggccggctcctccctgcagagtccacttctgtccgcagatctgacaactgcccagactccctccgagtttcttgccctgacggaagattcggtatccgaaatggacgccttttcaaagtcaggatcaatggcgtcccattgcgacaattttgggcacaatgatagtacctctcaaatgagtctgaactcggccgccgtgacaaagacaacaaccgagttgaccgggactgtgccctgcgctataatgagtcctgggaagtaccgcctcgagggacaatgtagcacagagtccaatagcctgcccgaaaccagtgctgcaaaccagaaagaagtgctacttcagatcgccgaacttcctgccacctcagtctcccactctgaaagtaatctgccggcagactcggaaagagaggaaaacatcggtctccagaatggtgaaaccatgctcggtacaaattctccacgaaagctgggcttttatgagcagcataaagccatcgccgaacacgtcaagggtatccacccgattagcgactccaaaattattccaaccagcggtgatcatcacatttttaacaagactagccacggatacgaggcaaaccccgccaaggtcttggccagcagcctgtcccccttccgagaaggccgttttattgagagacgcctccggagctcaagcgaaggaaccgccggatcttcacggatgattctgaagcctaaggatggaaacatcgaagaagtaaacagtctaagaaagcagagggctggaagcagttcatctaaaatgaacagtctggacgtgctgaacaatctcgggagctgtgagttggatgaggacgacctgatgctcgatctagagtttcttgaggagcagagtttgcacccaagcgtgtgcagagaggattcgtatcattctgtcgtgtcctgtgccgccgtagtactgactcccatggaacctatgatcgagatgaaaaagagagaagagccagagttccccgaaccatctaaacagaacctgtccctgaaattgactaaagacgtggaccaagaagccagatgcagtcacatatcgcggatgcccaattccccaagcgccgattggcctctgcagggagtggaggagaacggtggcattgatagtctgccattccggttaatgctgcaagattgcactgccgtcaaaactctcctcctgaagatgaaaagagtcctgcaggaaagcgcagacatgagcccagcgtcttccaccaccagtttgcctgtttccccattgactgaagaacccgtcccttttaagactacgtacccccgcgagttttag

SEQ ID NO: 265477 - DNA, 2034 bp, Artificial Sequence
  derived and/or modified sequence
atgggcgacagcggaagccgccggagcacattggtctcccggttgccgattttcaggcgttcgatcaatcgcaggcatgactcactgccatcttcaccaagtagttctaatactgtgggagtgcatagttcaagccccagttccaccaacagcagtagcggctcaaccggaaagcgacgctccatcttcaggacgccatctatatcttttcatcacaagaagggatctgaacccaaacaggagcctaccaaccagaatctgtcaatttcgaacggggctcagccgggccactcgaatatgcagaaactttctcttgaggagcacattaagacaagagggcggcacagcgtcggcttctcttcatctcgcaacaaaaagatcacacggtcactgacggaagactttgagcgggagaaggagcatagtacaaacaaaaacgtcttcatcaattgcttaagctccgggaaatcggagggtgatgattccggttttacagaagatcaaacccgtaggtcggtgaaacagtccacccgaaagctcctccccaagtctttcagctcacattacaaattctccaagcccgtccttcaatctcagtcaatctctcttgttcagcaaagtgaattcagtctggaagttacccagtaccaggaaagggaaccggtgctggtgcgagcctcacctagctgctctgtcgatgtcacagaaagggcaggcagcagtctccagtcgccactgttgtcagctgatctcacaacggcccagaccccatcagagttccttgccctgactgaagacagcgtatcagagatggatgcgttttccaaatccggatccatggcttcccattgtgacaactttggccacaacgattcgactagccaaatgtccttgaatagcgctgctgtaaccaagaccaccacggagcttaccggcaccgttccctgcgccattatgagcccagggaagtaccgcctagagggtcagtgcagcaccgagagcaacagcctgccggaaacctcagctgctaatcaaaaggaagtactgctgcaaattgctgagctgcccgctacttccgtctctcacagcgaaagtaatttacctgccgattctgagcgtgaggagaatattgggctgcagaatggcgaaaccatgcttggaactaacagcccaaggaaattagggttctacgagcagcacaaagcaatcgccgagcacgtgaaaggaatccatccgatttctgacagcaagattatccccacaagcggagaccatcatatattcaataagactagccatggatatgaggccaacccggcaaaagtgctggcctcttccctgtcaccatttcgcgagggacgttttattgagcgaagactgcggtcctccagcgaagggacagccggatctagtagaatgattctaaaaccaaaggacggaaacattgaggaggtgaactccctgcgcaaacagcgggcgggaagctcgtcatcgaaaatgaatagcctggatgtgctgaacaatctggggtcctgcgagcttgacgaggacgacctgatgcttgaccttgaattcctggaagagcagagtttgcacccatctgtttgcagagaagactcctaccacagcgttgtgagttgtgcagctgtggtactcacaccaatggagcccatgatcgagatgaagaagcgcgaggaacccgagtttccagaaccctccaagcaaaacctgtcccttaaactcactaaggatgtagaccaggaggcccgctgtagtcacataagccggatgcccaattctccctccgccgattggccgctccaaggggtcgaggagaacgggggtatcgatagcttacccttcagattgatgctccaggactgtactgccgttaagacattactgctgaagatgaagagggtactgcaggaatctgccgacatgtcccccgcttcgtcaaccacttccctccctgtgagcccattgacagaggaacctgtcccattcaaagattactacaaacggcctttttag

SEQ ID NO: 265478 - DNA, 3927 bp, Artificial Sequence
  derived and/or modified sequence
gttaccatcgagaccggggctgtgtatgctcgaggtgcagggagctaatgtataaggagttaaatgaactcttgctgctgccaaatatgttgttatcactaactgcaccgctgctgtcattagtgctgctgccaacactgcaagccctgctgctgccagtgccaattctgctgatgccttgggctctccatgtcccagggtgattccatagacaagcagctgcttttagatttcacttgctcattacctgtagatcctttgccttaggactcaagcttaagcccatgaagcctgggatagaagacaattggaggctgcaaagttggctttcacagtgcaagcctttgattcccaatgggggactcaggatcaagacgatctaccctggtctcccggttgccaatattcagaagaagtattaacagaagacatgattctcttccttcttcaccttcttccagtaatacagttggtgtccacagttcctctccttccagcactaactcaagctcaggtagcacaggtaaacggaggagcatattccgtactccttccattagcttccaccataagaaggggagtgagcctaagcaagagcctaccaaccagaaccttagtatttcaaatggtgctcaacctggtcacagcaatatgcagaaactgagtttggaagaacatattaagaccaggggaagacattctgttggttttagtagttcacgaaataagaagataacaagatctttgacagaggattttgaaagggaaaaagagcactcaactaacaagaatgtctttataaattgtctaagttctggcaaaagtgaaggggatgattctggtttcacagaagaccaaactcgtcgttctgttaagcagtcaacaaggaagctactccctaaatctttttcatctcactataaattttctaagccagttctacagagccaatccatttcattggtacaacagtctgaattctcattggaagttacacagtaccaagagagagaacctgtattagtaagagcttcgccatcctgttctgtggatgtaacagaacgggcaggaagctctttacaatctcctttgctttctgctgatcttaccacagctcagacaccttcagaatttttagccttgactgaagattctgtgtctgaaatggatgcattttctaaaagtggaagcatggcatcccactgtgacaactttggccacaatgattctacctctcagatgtccctcaattctgctgctgttacaaagacaacaacagaacttacgggaactgttccctgtgcaattatgtctcctgggaaatataggttagagggtcaatgtagcactgaatctaattcattaccggaaacctctgctgctaatcagaaggaagtgttattacaaattgctgaactacctgctacaagtgtgagccactcagagagtaacctaccagcagatagtgaaagagaagaaaatatagggttacaaaatggtgaaacaatgctggggacaaactccccaaggaaacttggattttatgagcaacataaagcaatagcggaacatgtaaaagggatccatcctatttcagattcaaagataatacctacttctggtgatcatcatatttttaacaaaacatcacatggatatgaagcaaatcctgccaaagttcttgccagtagtctcagtccatttcgtgaaggaagatttatagagaggagactgcgatcctcgtcagaaggcactgcagggagtagcagaatgattttgaaaccgaaagatggaaatatagaagaagttaatagtttaagaaagcaaagagcaggttcttcatcttcaaaaatgaacagtttggatgttttgaataatttgggatcttgtgaactggatgaagatgatctaatgcttgatcttgaatttttagaggaacagagtcttcacccttctgtttgccgggaggactcatatcactctgtcgtctcatgtgccgcagtagttcttactcctatggaaccaatgatagaaatgaagaaaagagaagaaccagaatttcctgagccttccaaacagaatctttccctgaaattaacaaaggacgttgatcaagaagccaggtgttcccacatcagccgaatgcccaacagtccatctgcggattggcctctacaaggtgtggaagaaaacggaggcatagattctctgccattcagactgatgttacaggactgcacggcagtcaagacgttattattaaagatgaagagagttcttcaagagagtgcagacatgagtccagcaagcagtaccacgtcacttcctgttagtcctcttactgaagagccagtgcctttcaagaccacataccctagggaattctgaaaacctgactaacatcaattgaagattggggttcaggaggcctagatgatccaccatgacttattcaaaagttgaagatgaaaggaaagaataaagactctttccatccagttctctagtctgaaaggaaaagaaataggcaaaggacagtaggcttttctatatcattatattcattcaaatgattctcttaaaataataatgaactaaggaggctctgtaagcaagacaaacggtcaggaggcctccttgctccaagaatactccctttttactttattaaaatggtttgtaaaggtaaactaaattgactaaagtatcaatatttccatatatgcgtgatcttttagagaccataaactgtcagtgtattaggctgttcttgcatggctataaagaaatacctgagactaggtgatttataagaaaaggggtataattggcccacagttctgcagactgtacaggaagcatagtagcatgtgcttctggggaggcctcaggaagcttccaatcgtggcggaaggcaaagggaagcaggcacattgcatggtgagaacagaaacaagaacaaggaagggtggctgggaggcgccacataattttaaattaccagatctcacaagaactcactatccggaagacagcacccagccatgagggatccaccctcatgattcaaacacctcccaccaagccccacctccagcactggggatcacaactcgacatgagatttgagcagagacaaatttccaaactatatcactcagaatctggaatagaaagagtatgcaccataacacttttattctctacagaaacagacactgtgctgagctcaaaaaatagtgattcatcaaatatgaatgtgcaaacctcttttgtactgtatctgtggaatcctggttactggggctttgagcccctgtcccataaaatctctgtaatactaacctaactcatggcatttctttaaaatcaaatttaatgaaatgatggacataaagcccatggaactgagtgtgtaatcttctcttatttgattagatgttaaacttgaaacacttttttttgataaaatatgaaatacataaatgagttaaattgttgtgactttccttataagattgaaaacaataaggtgtttttaatactttttttctgtgttctcttgaaagtagctttacatgtattaagcaatcctggctttagatattagggacaataaaaatatctgcaattttcccagttttatatagccattgtttgcaagtatgaaaacctgtcttttgttactgaaatattatcttttattttggcttttttgataacttttatgtttgccttgagcaagtcacttatcttttctatttgtgttttctatttcagtttatttatgaaagacagtaataatgattgtgatgtaccttacaaaaaaagataaaatcgtattgaagagactgttgaatatgaacgcagtgtattaaatgcccgatataggaacaaaaataaaatgaagaacatttctattataaa

SEQ ID NO: 265479 - DNA, 2385 bp, Artificial Sequence
  derived and/or modified sequence
gttaccatcgagaccggggctgtgtatgctcgaggtgcagggagctaatgtataaggagttaaatgaactcttgctgctgccaaatatgttgttatcactaactgcaccgctgctgtcattagtgctgctgccaacactgcaagccctgctgctgccagtgccaattctgctgatgccttgggctctccatgtcccagggtgattccatagacaagcagctgcttttagatttcacttgctcattacctgtagatcctttgccttaggactcaagcttaagcccatgaagcctgggatagaagacaattggaggctgcaaagttggctttcacagtgcaagcctttgattcccaatgggggactcaggatcaagacgatctaccctggtctcccggttgccaatattcagaagaagtattaacagaagacatgattctcttccttcttcaccttcttccagtaatacagttggtgtccacagttcctctccttccagcactaactcaagctcaggtagcacaggtaaacggaggagcatattccgtactccttccattagcttccaccataagaaggggagtgagcctaagcaagagcctaccaaccagaaccttagtatttcaaatggtgctcaacctggtcacagcaatatgcagaaactgagtttggaagaacatattaagaccaggggaagacattctgttggttttagtagttcacgaaataagaagataacaagatctttgacagaggattttgaaagggaaaaagagcactcaactaacaagaatgtctttataaattgtctaagttctggcaaaagtgaaggggatgattctggtttcacagaagaccaaactcgtcgttctgttaagcagtcaacaaggaagctactccctaaatctttttcatctcactataaattttctaagccagttctacagagccaatccatttcattggtacaacagtctgaattctcattggaagttacacagtaccaagagagagaacctgtattagtaagagcttcgccatcctgttctgtggatgtaacagaacgggcaggaagctctttacaatctcctttgctttctgctgatcttaccacagctcagacaccttcagaatttttagccttgactgaagattctgtgtctgaaatggatgcattttctaaaagtggaagcatggcatcccactgtgacaactttggccacaatgattctacctctcagatgtccctcaattctgctgctgttacaaagacaacaacagaacttacgggaactgttccctgtgcaattatgtctcctgggaaatataggttagagggtcaatgtagcactgaatctaattcattaccggaaacctctgctgctaatcagaaggaagtgttattacaaattgctgaactacctgctacaagtgtgagccactcagagagtaacctaccagcagatagtgaaagagaagaaaatatagggttacaaaatggtgaaacaatgctggggacaaactccccaaggaaacttggattttatgagcaacataaagcaatagcggaacatgtaaaagggatccatcctatttcagattcaaagataatacctacttctggtgatcatcatatttttaacaaaacatcacatggatatgaagcaaatcctgccaaagttcttgccagtagtctcagtccatttcgtgaaggaagatttatagagaggagactgcgatcctcgtcagaaggcactgcagggagtagcagaatgattttgaaaccgaaagatggaaatatagaagaagttaatagtttaagaaagcaaagagcaggttcttcatcttcaaaaatgaacagtttggatgttttgaataatttgggatcttgtgaactggatgaagatgatctaatgcttgatcttgaatttttagaggaacagagtcttcacccttctgtttgccgggaggactcatatcactctgtcgtctcatgtgccgcagtagttcttactcctatggaaccaatgatagaaatgaagaaaagagaagaaccagaatttcctgagccttccaaacagaatctttccctgaaattaacaaaggacgttgatcaagaagccaggtgttcccacatcagccgaatgcccaacagtccatctgcggattggcctctacaaggtgtggaagaaaacggaggcatagattctctgccattcagactgatgttacaggactgcacggcagtcaagacgttattattaaagatgaagagagttcttcaagagagtgcagacatgagtccagcaagcagtaccacgtcacttcctgttagtcctcttactgaagagccagtgcctttcaaggattattataaaaggcccttt

SEQ ID NO: 265480 - DNA, 2034 bp, Artificial Sequence
  derived and/or modified sequence
atgggagacagcggcagcagaagaagcaccctggtgtcccggctgcccatcttcagaagaagcatcaacagaagacatgacagcctgcccagcagccccagcagcagcaacacagtgggcgtgcacagcagcagccccagcagcaccaacagcagcagcggcagcacaggcaagagaagaagcatcttccgcacccccagcatctccttccaccacaagaagggcagcgagcccaagcaggagcccaccaaccagaacctgagcatcagcaatggagcccagcccggccacagcaacatgcagaagctgagcctggaggagcacatcaagacccggggccgccacagcgtgggcttcagcagcagcaggaacaagaagatcaccaggagcctgacagaagattttgagcgggagaaggagcacagcaccaacaagaatgtgttcatcaactgcctgagcagcggcaagtcagaaggagatgacagcggcttcacagaggaccagacccggcgctctgtgaagcagagcaccaggaagctgctgcccaagagcttcagcagccactacaagttcagcaagcctgtgctgcagagccagagcatcagcctggtgcagcagagcgagttcagcctggaggtgacccagtaccaggagcgggagcctgtgctggtgcgggccagccccagctgcagcgtggatgtgacagagcgggccggcagcagcctgcagagccccctgctgtctgctgacctgaccacagcccagacccccagcgagttcctggccctgacagaagattctgtgtctgagatggatgccttcagcaagagcggctccatggccagccactgtgacaactttggccacaatgacagcaccagccagatgagcctgaacagcgctgctgtgaccaagaccaccacagagctgactggaacagtgccctgtgccatcatgagccctgggaagtaccgcctggagggccagtgcagcacagagagcaacagcctgcctgagaccagcgctgccaaccagaaggaggtgctgctgcagattgctgagctgcctgccacctctgtgagccacagcgagagcaacctgcctgctgacagcgagcgggaggagaacatcggcctgcagaatggagagaccatgctgggcaccaacagccccaggaagctgggcttctatgagcagcacaaggccatcgccgagcacgtgaagggcatccaccccatcagtgacagcaagatcatccccaccagcggggaccaccacatcttcaacaagaccagccacggctatgaggccaacccagccaaggtgctggccagcagcctgagccccttccgggagggccgcttcatcgagcggcggctgcggagcagcagcgagggcacagctggcagcagcaggatgatcctgaagcccaaggatggcaacatcgaggaggtgaacagcctgaggaagcagagagctggcagcagcagcagcaagatgaacagcctggatgtgctgaacaacctgggcagctgtgagctggatgaagatgacctgatgctggacctggagttcctggaggagcagagcctgcaccccagcgtgtgccgggaggacagctaccacagcgtggtgtcctgtgccgctgtggtgctgacccccatggagcccatgattgagatgaagaagcgggaggagcctgagttccctgagcccagcaagcagaacctgagcctgaagctgaccaaggatgtggaccaggaggcccgctgcagccacatcagcaggatgcccaacagccccagcgctgactggcccctgcagggcgtggaggagaatggaggcatcgacagcctgcccttccggctgatgctgcaggactgcacagctgtgaagaccctgctgctgaagatgaagagggtgctgcaggagagcgctgacatgagccctgccagcagcaccaccagcctgcctgtgagccccctgacagaggagcctgtgcccttcaagaccacctacccccgggagttctag

SEQ ID NO: 265481 - DNA, 2034 bp, Artificial Sequence
  derived and/or modified sequence
atgggagacagcggcagcagaagaagcaccctggtgtcccggctgcccatcttcagaagaagcatcaacagaagacatgacagcctgcccagcagccccagcagcagcaacacagtgggcgtgcacagcagcagccccagcagcaccaacagcagcagcggcagcacaggcaagagaagaagcatcttccgcacccccagcatctccttccaccacaagaagggcagcgagcccaagcaggagcccaccaaccagaacctgagcatcagcaatggagcccagcccggccacagcaacatgcagaagctgagcctggaggagcacatcaagacccggggccgccacagcgtgggcttcagcagcagcaggaacaagaagatcaccaggagcctgacagaagattttgagcgggagaaggagcacagcaccaacaagaatgtgttcatcaactgcctgagcagcggcaagtcagaaggagatgacagcggcttcacagaggaccagacccggcgctctgtgaagcagagcaccaggaagctgctgcccaagagcttcagcagccactacaagttcagcaagcctgtgctgcagagccagagcatcagcctggtgcagcagagcgagttcagcctggaggtgacccagtaccaggagcgggagcctgtgctggtgcgggccagccccagctgcagcgtggatgtgacagagcgggccggcagcagcctgcagagccccctgctgtctgctgacctgaccacagcccagacccccagcgagttcctggccctgacagaagattctgtgtctgagatggatgccttcagcaagagcggctccatggccagccactgtgacaactttggccacaatgacagcaccagccagatgagcctgaacagcgctgctgtgaccaagaccaccacagagctgactggaacagtgccctgtgccatcatgagccctgggaagtaccgcctggagggccagtgcagcacagagagcaacagcctgcctgagaccagcgctgccaaccagaaggaggtgctgctgcagattgctgagctgcctgccacctctgtgagccacagcgagagcaacctgcctgctgacagcgagcgggaggagaacatcggcctgcagaatggagagaccatgctgggcaccaacagccccaggaagctgggcttctatgagcagcacaaggccatcgccgagcacgtgaagggcatccaccccatcagtgacagcaagatcatccccaccagcggggaccaccacatcttcaacaagaccagccacggctatgaggccaacccagccaaggtgctggccagcagcctgagccccttccgggagggccgcttcatcgagcggcggctgcggagcagcagcgagggcacagctggcagcagcaggatgatcctgaagcccaaggatggcaacatcgaggaggtgaacagcctgaggaagcagagagctggcagcagcagcagcaagatgaacagcctggatgtgctgaacaacctgggcagctgtgagctggatgaagatgacctgatgctggacctggagttcctggaggagcagagcctgcaccccagcgtgtgccgggaggacagctaccacagcgtggtgtcctgtgccgctgtggtgctgacccccatggagcccatgattgagatgaagaagcgggaggagcctgagttccctgagcccagcaagcagaacctgagcctgaagctgaccaaggatgtggaccaggaggcccgctgcagccacatcagcaggatgcccaacagccccagcgctgactggcccctgcagggcgtggaggagaatggaggcatcgacagcctgcccttccggctgatgctgcaggactgcacagctgtgaagaccctgctgctgaagatgaagagggtgctgcaggagagcgctgacatgagccctgccagcagcaccaccagcctgcctgtgagccccctgacagaggagcctgtgcccttcaaggactactacaagaggcccttctag

SEQ ID NO: 265482 - DNA, 2034 bp, Artificial Sequence
  derived and/or modified sequence
atgggcgacagcggcagccggcggagcaccctggtgagccggctgcccatcttccggcgctcaatcaatagacggcacgattctttaccatctagtccatcctcaagtaacaccgtcggagtccactctagtagccctagctccactaactctagttcaggtagtacaggaaaacgccgcagcatctttcgaaccccctccatcagcttccatcacaagaaaggcagcgaaccgaagcaggagcccaccaatcagaacctttccatttccaatggcgcccagcccggccacagtaatatgcagaaattgtccttagaagagcacatcaaaacgcgggggcggcactccgtggggttttcttcctcccgcaacaagaaaattactcggtcactgacagaggacttcgaaagagaaaaggaacattcaacaaataagaatgtttttattaattgcttgtcttctggaaagagcgaaggcgatgattcggggtttactgaggatcagacaagaagaagcgtgaaacagtccactaggaaattgctgcctaaaagcttcagctctcactataagttttccaagcccgtactgcaatcccagtcaatttcactggtgcagcagagcgagtttagccttgaggttacacagtaccaggaacgagaaccagtcctagtgagagccagtcctagttgctctgtggacgtcacagagagagccggttcatctcttcagagtccactgctgtctgcagacctcacaactgcccagacgccgtcagagttcttagcactaaccgaagattcagtgagtgagatggacgcctttagcaaatcaggaagtatggccagccactgtgacaatttcggacacaacgactcaacctcacagatgagcctgaactctgccgccgtgaccaagactaccacagaactgacaggcaccgtgccatgtgcaataatgagtccagggaaataccggctggagggacagtgctccactgaatctaacagcctccccgaaaccagcgcggctaaccagaaagaagtactgctacagatcgcggagttacctgccacaagtgtgagccatagcgaaagcaatcttcctgccgattctgaacgggaggagaatattgggctccaaaacggagaaaccatgctgggaactaacagcccgcggaagttggggttctatgaacagcataaggccatcgcggaacatgtcaaggggatccaccctataagcgactccaaaatcattccgacctcgggagaccatcatatctttaacaaaacatctcacggatacgaagctaaccccgccaaagttctggctagttcgctttctccatttagggagggccggttcatagaacggcggttacggagtagctctgaggggacggccgggtcaagtaggatgattctcaaaccgaaagacggaaacattgaggaggtaaactcccttagaaagcagagagccggatcttcatcctctaagatgaattccttggatgtgctgaacaacctgggctcctgtgagctggacgaagatgatctaatgctcgaccttgaatttctcgaagaacagagtctccaccctagcgtgtgtcgcgaggattcttaccactccgtggtctcgtgtgccgccgtagtccttacaccaatggagccaatgattgaaatgaaaaagcgagaggagcccgagtttccagagccttctaagcagaatttgagcctgaagctcactaaagatgtggaccaggaggctagatgcagccacattagtcgtatgcctaacagcccatcggccgactggcctctgcagggcgtggaggaaaatgggggcatagactcactgcccttccgtctgatgttgcaggactgtaccgcagtgaagactctgcttctgaaaatgaagcgggtcctccaggaaagcgccgatatgagtccagcttcgagtactacatcactgcccgtgagcccactgacagaagagccagtgccttttaagaccacctatccgagggaattctag

SEQ ID NO: 265483 - DNA, 2034 bp, Artificial Sequence
  derived and/or modified sequence
atgggcgacagcggcagccggcggagcaccctggtgagccggctgccaatcttcagaagatcaatcaatcgaagacacgattccctgcctagtagcccctcctcctccaacacagtgggcgtgcattcgtccagcccttcatctaccaatagctctagcggtagcactggcaagcggcggtctatctttagaactccttcgataagctttcaccacaagaagggctccgaaccgaagcaggaaccgacgaatcagaatttgtctatatccaacggcgctcagcctgggcacagcaacatgcagaaactgagcttggaggaacacataaagacccgaggaaggcattcggtcgggttttcgtcctctcggaacaagaagattacaagatcccttaccgaagacttcgaacgcgaaaaagagcactccaccaacaagaatgtgttcattaactgtctcagttctggtaagtctgaaggtgacgactcagggttcacagaggaccagacccggagatccgtaaagcaatctacacgtaagctcctccctaagtctttttccagtcattataagtttagcaagcccgtgctgcaatcccagtcaatcagcttagtgcaacaatcagagtttagtctggaggtaacacagtaccaggagcgagagccggtccttgttcgggcctctcctagctgttcggtggatgtgacagagcgagccggaagctcacttcaatctcctctcttgagcgctgatctgaccacagcccagacgccctctgagttcctggctttgaccgaggacagcgtgtcagaaatggacgccttctcaaagtctggatccatggcttcacattgcgataacttcggccataacgactcgactagccagatgtccctaaacagtgccgctgttaccaaaaccaccactgaactgacaggcaccgtgccatgcgctataatgagcccgggcaagtaccggctggaagggcaatgttcgaccgaaagtaattcattgccggagacaagcgccgcgaatcagaaagaggtgcttctgcagatcgccgagctgccggcaacttcagtcagccactcagagtccaacttgcccgccgatagtgaaagagaggaaaacatcggccttcagaacggagagaccatgctcggaacaaattcccccaggaaacttggcttctacgaacaacataaggccatagctgagcacgtgaagggtattcaccccattagcgactccaaaataattcctacttccggcgaccaccacatctttaataaaacaagtcacggttatgaggccaaccctgccaaggtgttggcaagctcactttccccgtttcgggagggcaggtttatagagcgcaggcttcgcagcagcagcgagggaaccgccggaagtagccgaatgatactgaagcctaaagacgggaatatcgaagaagtgaacagcctacgcaagcagcgcgccggaagctcttcgtctaagatgaactccctggacgttcttaataatctcggctcttgtgagcttgacgaggacgacctgatgctcgacctagagtttttggaagagcagagtcttcatccctccgtctgtcgcgaagacagttaccattccgtggtaagctgcgcggccgtcgttctgacaccaatggagcctatgatcgagatgaagaaacgggaggagcccgagtttccagaaccttccaagcagaacctcagcctaaaattaacaaaggatgtggaccaggaggccaggtgtagccacattagccgcatgcctaacagccccagcgccgattggcctcttcaaggggtcgaagagaacggaggtatcgactcactgccgtttcgactgatgctccaggactgtactgccgttaagactctccttctgaagatgaaaagggtgctccaggagagtgcagacatgtcccccgcttctagtaccaccagcctgcccgtttcacccctgacagaggagcctgtccctttcaaagactactacaaacgcccattttag

SEQ ID NO: 265484 - DNA, 2034 bp, Artificial Sequence
  derived and/or modified sequence
atgggtgattctgggagccggagatctacactcgtatctcgccttccaatcttcagacgttccatcaatcgaagacatgattccctcccatcgagtcctagttcctccaacaccgtcggggtgcactcctcaagcccctcctccacaaactcctctagcggttccacaggcaaacggcgttccatctttagaaccccaagcatctcctttcaccataagaaaggctctgagcccaagcaggagccaacaaatcaaaatctatccattagcaatggagctcaaccagggcattctaatatgcagaaactttcactggaggaacatataaagactaggggtagacactccgtgggtttcagctcatcccgtaataaaaaaattacaaggagtctgacagaagacttcgagcgggagaaggaacactctacaaacaagaatgtctttatcaattgtctctcatctggcaagtctgagggcgatgattctggtttcacagaggatcaaacgcggagatcggttaagcagtcaactcgaaaactgttaccgaagagcttcagtagccattataaattcagtaagccggtgcttcagtctcagtctatatcccttgtacagcagagcgagttctcattggaggtgactcaataccaagaacgcgagccggtactcgtaagggcttccccaagttgttcagtggatgtgacagaaagggccggatcatcactgcagtctccactcctctctgctgatctcaccacagcccagacaccttccgagttcctcgccctgactgaggacagtgtgagtgagatggacgccttctcaaagtccggaagtatggcatcacattgtgacaatttcggccacaatgattcaacatcacagatgagcttgaactctgctgcagtgaccaaaactacaaccgagttgactggaacagtgccatgtgcaattatgtcacctgggaagtaccgcctcgagggccagtgctctacagaatccaatagcctccccgagacttccgcagcaaaccagaaagaggttctgttgcagatcgccgagctgcctgccacatccgtgtcacacagcgagtccaatctgcccgcagactccgagcgggaggagaacattggtcttcagaacggggagacgatgctcggaactaattctcctagaaagctcggtttttatgagcagcataaagcaattgcggagcacgtgaaggggatccaccccattagtgacagcaagattattcctacctctggcgaccaccacatctttaacaagacttcacacggctatgaagcaaaccccgctaaggtgttggcctcttccctgagcccttttcgagagggcagattcattgagcgccgtctgcgcagctcttctgaaggcactgcaggcagctctcgcatgattttaaagccaaaggacggcaatattgaagaggtgaacagtttacggaaacagagagccggaagctcctctagcaaaatgaatagcttggatgtgcttaacaacctgggatcctgcgagctcgacgaagacgatctgatgcttgacctcgagttcctagaggaacagagcctgcacccgtccgtttgtcgggaggactcataccattctgttgtaagttgtgctgcggtggttcttacaccaatggaaccaatgattgaaatgaaaaaacgggaggaaccagagtttcccgaaccctccaagcagaatctaagcctgaaactaacaaaggatgtagatcaggaggcccgatgctctcacattagcaggatgcccaatagcccatcagctgactggcccctgcaaggtgtggaggagaacgggggaatagattccttgcccttccgactgatgctgcaggactgcaccgctgttaaaaccctattattgaagatgaaaagagtccttcaggaaagcgccgacatgtcaccagcttcaagcacaacaagtcttcccgtgtctccgctcacggaagaacccgtgcctttcaagacaacctacccccgagagttttag

SEQ ID NO: 265485 - DNA, 2034 bp, Artificial Sequence
  derived and/or modified sequence
atgggcgactctggttcacggaggtctacgcttgtgtctcgccttccaatcttcagaagatctatcaatagacggcacgatagtctcccatcatccccgtcctcttctaatacagtgggggttcatagtagtagcccctcttccactaacagttcatctggaagtacgggcaaacgacgttccatcttcaggactccttccatttccttccaccataagaaaggcagcgagcccaagcaggaaccaaccaaccagaatctgtctatatccaacggtgctcagcccggacatagtaatatgcagaaactcagtctggaggagcatattaagaccaggggtcgacatagcgtgggattctccagtagtcggaacaagaagatcactaggagtctgacggaggacttcgaaagggagaaggagcattccaccaacaagaacgtctttatcaactgcctaagctccggaaagtcagaaggggatgatagcgggtttacagaggaccaaaccagaagatccgtgaaacagagtacaagaaaactattgcccaaatctttttcctctcactacaagtttagcaaacctgttctacagagtcaatctattagtcttgttcagcagagcgaatttagcctcgaagtgacccagtaccaggagcgtgagcccgtgctggtaagagcctctccttcttgcagcgttgacgtgacagaacgggcaggtagcagccttcagagtcccctgttgtctgcagatctaacgacggctcagacaccttccgaattcttagctctgacagaagactccgtctcagagatggacgcgttctctaaaagtggcagtatggcgtcccattgcgataactttggccacaacgactccacatcccagatgtcccttaattccgccgctgtgaccaagactactaccgagctcacaggaaccgtaccatgtgcaatcatgtctcctgggaagtatcgcctcgagggccagtgtagtactgaaagtaatagtctgcccgagacctcagcagcgaaccaaaaagaggtgctactgcagatcgctgaactgccggctactagcgtgagtcactcagaatctaatctcccggctgattcggaaagggaagaaaatataggccttcagaacggagagacaatgctggggaccaattctcctcgaaaactgggcttctacgaacagcataaggctatcgccgagcacgtaaaagggatacaccctatcagcgattccaagatcataccaacaagtggcgatcaccacatctttaacaagacttcccacggatacgaggctaatcctgcgaaggtgctcgccagttcattgtccccatttcgcgagggacgtttcattgagaggaggctaagaagttctagtgagggaactgcaggttcgagcagaatgatactgaagcccaaagacggtaatatcgaagaagtgaattcactgcgcaagcagcgggcaggcagcagcagttcaaaaatgaatagcctggacgtgttgaacaatctgggcagttgtgagttggacgaagacgacctcatgctggatttagagttcctcgaggagcagtctctgcacccgtctgtttgtcgggaggacagttaccatagcgttgtctcttgcgctgccgtcgttcttaccccaatggagcccatgatcgagatgaagaagcgagaggaaccggagtttccggagccgagcaagcagaatctgagcttgaaactgactaaagatgtcgaccaggaagcccgatgctctcatatcagcagaatgccgaactcacctagtgccgactggcccctgcagggtgtggaggaaaatggaggaatcgatagtctgccattcagactgatgctacaggactgtactgcagttaagactctcctattaaaaatgaagcgcgtattacaggaatccgctgacatgagtccagcatcgtcgaccacatcattgcctgtttcgccacttacagaggaacccgttcctttcaaggattattacaagagacctttctag

SEQ ID NO: 265486 - protein, 311 aa, Artificial Sequence
  derived and/or modified sequence
  misc_feature (1)..(1): Xaa can be any naturally occurring amino acid
XCFLRRPGAPASWIWWRMLRQVLRRGLQSFCHRLGLCVSRHPVFFLTVPAVLTITFGLSALNRFQPEGDLERLVAPSHSLAKIERSLASSLFPLDQSKSQLYSDLHTPGRYGRVILLSPTGDNILLQAEGILQTHRAVLEMKDGRNSFIGHQLGGVVEVPNSKDQRVKSARAIQITYYLQTYGSATQDLIGEKWENEFCKLIRKLQEEHQELQLYSLASFSLWRDFHKTSILARSKVLVSLVLILTTATLSSSMKDCLRSKPFLGLLGVLTVCISIITAAGIFFITDGKYNSTLLGIPFFAMGISTEFTSS

SEQ ID NO: 265487 - protein, 294 aa, Artificial Sequence
  derived and/or modified sequence
MLRQVLRRGLQSFCHRLGLCVSRHPVFFLTVPAVLTITFGLSALNRFQPEGDLERLVAPSHSLAKIERSLASSLFPLDQSKSQLYSDLHTPGRYGRVILLSPTGDNILLQAEGILQTHRAVLEMKDGRNSFIGHQLGGVVEVPNSKDQRVKSARAIQITYYLQTYGSATQDLIGEKWENEFCKLIRKLQEEHQELQLYSLASFSLWRDFHKTSILARSKVLVSLVLILTTATLSSSMKDCLRSKPFLGLLGVLTVCISIITAAGIFFITDGKYNSTLLGIPFFAMGISTEFTSS

SEQ ID NO: 265488 - DNA, 3232 bp, Artificial Sequence
  derived and/or modified sequence
gtgctttttaagacggccgggagcgcctgcgagctggatctggtggaggatgctgcggcaggtgcttcgcagagggctccagtcgttctgccacaggctgggtttgtgcgtgagccggcacccggtctttttcctcaccgtgcccgcagtcctgacaatcaccttcggcctcagcgcgctcaaccgcttccagcccgagggcgacctggagcgcctggtcgctcccagccacagcctggccaagatcgagcgcagcctggccagcagccttttccccctggaccagtccaaaagccagctctattcggacttacacacccctgggaggtatggcagggtgatcctcctctccccaaccggggacaatattttgctccaggctgaggggatcctgcagacccaccgagccgtgctggaaatgaaggatgggaggaacagttttattggacaccaactgggcggggtagtggaagtgccaaacagcaaagatcagcgggtcaagtcagccagagccattcaaatcacctactacctccagacctatggctctgccacccaagacctcataggggagaagtgggagaatgagttctgtaagcttataaggaagctccaggaggagcatcaagaactccagctctactctttagcatcctttagcctctggagggactttcataagaccagcatcctggccagaagcaaggtcctggtgagcctcgtgctgatcctgaccacagccaccctctccagctccatgaaggactgcttgcgcagtaagcccttcctgggcctcctgggggtgctcacagtatgcatctccatcatcacagcagcagggatcttcttcatcaccgatggaaagtacaactccaccctgctgggaatcccgttcttcgccatgggcatctccactgaatttacctcaagctagaaacaaatttagtttggaagaaagaaaggagagaaggaaggagagaaaaaactggagaggagaaaaatatcacatttggaagattatatgtgaagactcctaggatacaataaaatcatcatcatcgtcatcatcatcatcatcaccaccaataccatcagagcaatctgagagttcattctagtctaagaacccagccctctattttttggaggttaagtatcctccaggtatttctttcctccctgtgcttaacagctgtgtgtctgtaacccatactgtcttttctatctcccacctgactcctctcatgggaaactaaattggtttaaatcatatggaagcattataagtactgtttagtgatgaaaataaattgattccaatcatataggtactttcctaaatactgactgatgaagtttagatgtgctgtaatttataaataaaatgaaggaggttacctggcaatatgtgagagggaggaacaattatcgtgtttgagatttaaaggaaagagtaatgaacacttcccaaataattctatgagataaatattaccctgatactaaaaccagacaaaaacatcacaaggaaggaaaactacaggttaataactttatgaacttgagtgtaaaaattctcaataaaatactagcaagccaaattcaatgaacaaatgaggtttatttctatttatttttatttttttttatttttattttattttattattttttttttttgagacggagtcttgctctgtcgcccaggccggactgcggactgcagtggcgcaatctcggctcactgcaagctccgcctcccaggttcacgccattctcctgcctcagcctcccgagtagctgggactacaggcgcccgccaccgcgcccggctaattttttgtatttttagtagagacggggtttcaccttgttagccaggatggtctcgatctcctgacctcatgatccacccgcctcggcctcccaaagtgctgggattacaggcgtgagccaccatgcccggcccaaatgaggtttattttataaatgcaagagtggtttaacatttgaaaatcattaacataatataccatcaatagaattaaggtcaaaaaccgcatggtcatctcaatagacaaagaaagggcatttgacaaactctaacaacattttatgacaacaaaataactctcaacaaactagtaatagaagggaacttgcttaatctgatacagatatccataaaaacccaaagctaatatcatatttaatggagaaagaatgaacttaaaagttgtacttcaatgaataccatcaagaaagtgaaaaacaaactcacagaatgggagaaaatattttcaaattatctatcttataagagacttgtatacagaatatttaaaggactattacagcttaataataaaaacacaacccaatttcaaagtggacagaagattcgaatagacatttattctaagaagataaacaagtggccaaaagtatatttaaaatgctcaaaataattagttattaaagaaatgcaaatcaaaaccacattgagcacatcatatccattaggatgactaaaatcaagaagtaaggcaataacaagtattgatgaggtaggttaggaactctttacacattgctgatgaaaatgtaaatgatgcagctcttttggaaaatagtctgacagttcctaaaaatgctaaacttagtattagcattttgattcagtaattccactgctaggtatatactcaagagaaatgaaaatatttatccacacaaaactgtacaaatgttcatagcaatattattcataatggcaaaaggtagacacaatccaaatgtccatcaactgatgaatggaaacataaaaagtggtatatgcatacaatggaatattattcagccattaaaaaggaaacaagtactgatacatgctccaatatggatgagcattgaaaatattttgataagtgaaagaagtcatgaaagtgtacataattgcatgattctatatatatgaaatgttcagagtaggcaaatatgtagagacaggaagtagatgagtagttgctgaggattggtgggttaggggatgaagccagggaatggagtcactgctaatgatacagaagttctttcaggttgatgaaatgttctgaaattgattatggcaatcattgcacaactttgtagtatactagaaacttttaaattgtacacttttaatcaatgaattgcttggcattatatcacaataaagctgttaaaaacaaac

SEQ ID NO: 265489 - DNA, 3053 bp, Artificial Sequence
  derived and/or modified sequence
aagacggccgggagcgcctgcgagctggatctggtggaggatgctgcggcaggtgcttcgcagagggctccagtcgttctgccacaggctgggtttgtgcgtgagccggcacccggtctttttcctcaccgtgcccgcagtcctgacaatcaccttcggcctcagcgcgctcaaccgcttccagcccgagggcgacctggagcgcctggtcgctcccagccacagcctggccaagatcgagcgcagcctggccagcagccttttccccctggaccagtccaaaagccagctctattcggacttacacacccctgggaggtatggcagggtgatcctcctctccccaaccggggacaatattttgctccaggctgaggggatcctgcagacccaccgagccgtgctggaaatgaaggatgggaggaacagttttattggacaccaactgggcggggtagtggaagtgccaaacagcaaagatcagcgggtcaagtcagccagagccattcaaatcacctactacctccagacctatggctctgccacccaagacctcataggggagaagtgggagaatgagttctgtaagcttataaggaagctccaggaggagcatcaagaactccagctctactctttagcatcctttagcctctggagggactttcataagaccagcatcctggccagaagcaaggtcctggtgagcctcgtgctgatcctgaccacagccaccctctccagctccatgaaggactgcttgcgcagtaagcccttcctgggcctcctgggggtgctcacagtatgcatctccatcatcacagcagcagggatcttcttcatcaccgatggaaagtacaactccaccctgctgggaatcccgttcttcgccatgggcatctccactgaatttacctcaagctagaaacaaatttagtttggaagaaagaaaggagagaaggaaggagagaaaaaactggagaggagaaaaatatcacatttggaagattatatgtgaagactcctaggatacaataaaatcatcatcatcgtcatcatcatcatcatcaccaccaataccatcagagcaatctgagagttcattctagtctaagaacccagccctctattttttggaggttaagtatcctccaggtatttctttcctccctgtgcttaacagctgtgtgtctgtaacccatactgtcttttctatctcccacctgactcctctcatgggaaactaaattggtttaaatcatatggaagcattataagtactgtttagtgatgaaaataaattgattccaatcatataggtactttcctaaatactgactgatgaagtttagatgtgctgtaatttataaataaaatgaaggaggttacctggcaatatgtgagagggaggaacaattatcgtgtttgagatttaaaggaaagagtaatgaacacttcccaaataattctatgagataaatattaccctgatactaaaaccagacaaaaacatcacaaggaaggaaaactacaggttaataactttatgaacttgagtgtaaaaattctcaataaaatactagcaagccaaattcaatgaacaaatgaggtttatttctatttatttttatttttttttatttttattttattttattattttttttttttgagacggagtcttgctctgtcgcccaggccggactgcggactgcagtggcgcaatctcggctcactgcaagctccgcctcccaggttcacgccattctcctgcctcagcctcccgagtagctgggactacaggcgcccgccaccgcgcccggctaattttttgtatttttagtagagacggggtttcaccttgttagccaggatggtctcgatctcctgacctcatgatccacccgcctcggcctcccaaagtgctgggattacaggcgtgagccaccatgcccggcccaaatgaggtttattttataaatgcaagagtggtttaacatttgaaaatcattaacataatataccatcaatagaattaaggtcaaaaaccgcatggtcatctcaatagacaaagaaagggcatttgacaaactctaacaacattttatgacaacaaaataactctcaacaaactagtaatagaagggaacttgcttaatctgatacagatatccataaaaacccaaagctaatatcatatttaatggagaaagaatgaacttaaaagttgtacttcaatgaataccatcaagaaagtgaaaaacaaactcacagaatgggagaaaatattttcaaattatctatcttataagagacttgtatacagaatatttaaaggactattacagcttaataataaaaacacaacccaatttcaaagtggacagaagattcgaatagacatttattctaagaagataaacaagtggccaaaagtatatttaaaatgctcaaaataattagttattaaagaaatgcaaatcaaaaccacattgagcacatcatatccattaggatgactaaaatcaagaagtaaggcaataacaagtattgatgaggtaggttaggaactctttacacattgctgatgaaaatgtaaatgatgcagctcttttggaaaatagtctgacagttcctaaaaatgctaaacttagtattagcattttgattcagtaattccactgctaggtatatactcaagagaaatgaaaatatttatccacacaaaactgtacaaatgttcatagcaatattattcataatggcaaaaggtagacacaatccaaatgtccatcaactgatgaatggaaacataaaaagtggtatatgcatacaatggaatattattcagccattaaaaaggaaacaagtactgatacatgctccaatatggatgagcattgaaaatattttgataagtgaaagaagtcatgaaagtgtacataattgcatgattctatatatatgaaatgttcagagtaggcaaatatgtagagacaggaagtagatgagtagttgctgaggattggtgggttaggggatgaagccaggga

SEQ ID NO: 265490 - DNA, 936 bp, Artificial Sequence
  derived and/or modified sequence
tgatgcttcctgagaagacccggcgcccccgccagctggatctggtggagaatgctgagacaggtgctgagaagaggcctgcagagcttctgccacagactgggcctgtgcgtgagcagacaccccgtgttcttcctgaccgtgcccgccgtgctgaccatcaccttcggcctgagcgccctgaacagattccagcccgagggcgacctggagagactggtggcccccagccacagcctggccaagatcgagagaagcctggccagcagcctgttccccctggaccagagcaagagccagctgtacagcgacctgcacacccccggcagatacggcagagtgatcctgctgagccccaccggcgacaacatcctgctgcaggccgagggcatcctgcagacccacagagccgtgctggagatgaaggacggcagaaacagcttcatcggccaccagctgggcggcgtggtggaggtgcccaacagcaaggaccagagagtgaagagcgccagagccatccagatcacctactacctgcagacctacggcagcgccacccaggacctgatcggcgagaagtgggagaacgagttctgcaagctgatcagaaagctgcaggaggagcaccaggagctgcagctgtacagcctggccagcttcagcctgtggagagacttccacaagaccagcatcctggccagaagcaaggtgctggtgagcctggtgctgatcctgaccaccgccaccctgagcagcagcatgaaggactgcctgagaagcaagcccttcctgggcctgctgggcgtgctgaccgtgtgcatcagcatcatcaccgccgccggcatcttcttcatcaccgacggcaagtacaacagcaccctgctgggcatccccttcttcgccatgggcatcagcaccgagttcaccagcagctag

SEQ ID NO: 265491 - DNA, 885 bp, Artificial Sequence
  derived and/or modified sequence
atgctgagacaggtgctgagaagaggcctgcagagcttctgccacagactgggcctgtgcgtgagcagacaccccgtgttcttcctgaccgtgcccgccgtgctgaccatcaccttcggcctgagcgccctgaacagattccagcccgagggcgacctggagagactggtggcccccagccacagcctggccaagatcgagagaagcctggccagcagcctgttccccctggaccagagcaagagccagctgtacagcgacctgcacacccccggcagatacggcagagtgatcctgctgagccccaccggcgacaacatcctgctgcaggccgagggcatcctgcagacccacagagccgtgctggagatgaaggacggcagaaacagcttcatcggccaccagctgggcggcgtggtggaggtgcccaacagcaaggaccagagagtgaagagcgccagagccatccagatcacctactacctgcagacctacggcagcgccacccaggacctgatcggcgagaagtgggagaacgagttctgcaagctgatcagaaagctgcaggaggagcaccaggagctgcagctgtacagcctggccagcttcagcctgtggagagacttccacaagaccagcatcctggccagaagcaaggtgctggtgagcctggtgctgatcctgaccaccgccaccctgagcagcagcatgaaggactgcctgagaagcaagcccttcctgggcctgctgggcgtgctgaccgtgtgcatcagcatcatcaccgccgccggcatcttcttcatcaccgacggcaagtacaacagcaccctgctgggcatccccttcttcgccatgggcatcagcaccgagttcaccagcagctag

SEQ ID NO: 265492 - DNA, 936 bp, Artificial Sequence
  derived and/or modified sequence
tgatgcttcctacgcaggcctggggcaccggccagctggatctggtggaggatgctgaggcaggtgctgcggagggggttacagagcttttgccatcgattggggctgtgtgtcagtcgccacccagtattctttctgacagtaccagcagtactcactattacttttgggttgtcagctcttaacagattccagcccgagggggatttggagcgattagtggctccatcccacagtctggccaagatcgagcggtcactagcttcatcacttttccccctggatcagtccaagagtcagttgtattctgacctacatacccccggcagatatggcagggtcattctgctgtctcccacaggggacaacatcctccttcaggcggagggcatcctgcagactcatcgggccgtattagaaatgaaggacggcaggaactcatttatcggacatcaacttgggggcgtcgtagaggtcccaaattcaaaggatcagcgcgtaaagtcggcccgcgcgattcagatcacttattatttacagacctatggctctgcaacccaagatctgattggagagaaatgggaaaatgagttttgcaagctcatacggaagctgcaagaagagcatcaggaactgcagctctacagcctagccagcttttctctgtggagggattttcataaaacatctatattagcacgaagtaaggtcctggttagcctggtgctgatactaacgacagccaccctatccagttctatgaaggactgccttagatccaaaccttttctcggattactaggcgtgctgacggtctgcatttccatcattacagcggccggcatcttttttattaccgacggaaagtacaatagtaccctactaggcattccattctttgcaatgggcatttctacagaattcacctctagttag

SEQ ID NO: 265493 - DNA, 885 bp, Artificial Sequence
  derived and/or modified sequence
atgctccggcaggttcttaggcgtgggctccagtccttctgccaccggctcggcctctgtgtcagcaggcaccccgtcttttttttgacagtgccagcagtgctcacgatcacatttggtctttcagcgctgaataggttccagccagaaggagatcttgaaagactcgtcgccccatcccacagtttggccaaaatcgagcgatctcttgccagcagcctgtttcccctggaccagtctaaatctcagttatatagcgacctgcacacaccggggcggtacggcagggtgatcttgttgtccccgacgggggataatatcctgttgcaggctgagggaattctgcagacccatcgcgctgtcctggagatgaaggatggcagaaactcattcatcgggcatcagcttggtggtgtggtggaagttcccaacagtaaagatcagagggtgaagagtgctcgcgcgattcagatcacttactacctacagacctatggatcggcaacacaggacctgattggggagaaatgggaaaatgagttctgcaagctcatccgaaagctgcaggaagaacaccaggaactccaactgtacagcctggccagctttagtttgtggcgggatttccacaaaacctccattctggcccgtagtaaggtcctcgttagtttggttctgattttgacgactgctacactctcctcttctatgaaagactgcctgcgatccaaacccttccttggactcctgggtgtgttgaccgtctgtataagcattattaccgccgccgggatctttttcatcacggacggaaaatataatagcacattgttgggcatcccatttttcgcaatgggtattagcaccgaattcacatcgtcctag

SEQ ID NO: 265494 - DNA, 936 bp, Artificial Sequence
  derived and/or modified sequence
tgatgcttcctgcggcggcctggggccccagcctcctggatctggtggaggatgctgcggcaggtgctgcggcggggcctgcagagcttctgccaccggctgggcctgtgtgtgagccgccaccctgtgttcttcctgactgtgcctgctgtgctgaccatcaccttcggcctgagcgccctgaaccgcttccagcctgagggggacctggagcggctggtggcccccagccacagcctggccaagattgaaagaagcctggccagcagcctcttccccctggaccagagcaagagccagctgtacagcgacctgcacaccccaggccgctatggccgggtcatcctgctgagccccaccggggacaacatcctgctgcaggccgagggcatcctgcagacccacagagctgtgctggagatgaaggatggaagaaattccttcatcggccaccagctgggcggcgtggtggaggtgcccaacagcaaggaccagagggtgaagagcgcccgggccatccagatcacctactacctgcagacctacggcagcgccacccaggacctgattggagagaagtgggagaatgagttctgcaagctgatcaggaagctgcaggaggagcaccaggagctgcagctgtacagcctggccagcttcagcctgtggagggacttccacaagaccagcatcctggcccggagcaaggtgctggtgtccctggtgctgatcctgaccacagccaccctgagcagctccatgaaggactgcctgcggagcaagcccttcctgggcctgctgggcgtgctgactgtgtgcatcagcatcatcacagctgctggcatcttcttcatcacagatggcaagtacaacagcaccctgctgggcatccccttctttgccatgggcatcagcacagagttcaccagcagctag

SEQ ID NO: 265495 - DNA, 885 bp, Artificial Sequence
  derived and/or modified sequence
atgctgcggcaggtgctgcggcggggcctgcagagcttctgccaccggctgggcctgtgtgtgagccgccaccctgtgttcttcctgactgtgcctgctgtgctgaccatcaccttcggcctgagcgccctgaaccgcttccagcctgagggggacctggagcggctggtggcccccagccacagcctggccaagattgaaagaagcctggccagcagcctcttccccctggaccagagcaagagccagctgtacagcgacctgcacaccccaggccgctatggccgggtcatcctgctgagccccactggagacaacatcctgctgcaggccgagggcatcctgcagacccacagagctgtgctggagatgaaggatggcaggaacagcttcatcggccaccagctgggcggcgtggtggaggtgcccaacagcaaggaccagagggtgaagagcgcccgggccatccagatcacctactacctgcagacctacggcagcgccacccaggacctgattggagagaagtgggagaatgagttctgcaagctgatcaggaagctgcaggaggagcaccaggagctgcagctgtacagcctggccagcttcagcctgtggagggacttccacaagaccagcatcctggcccggagcaaggtgctggtgtccctggtgctgatcctgaccacagccaccctgagcagctccatgaaggactgcctgcggagcaagcccttcctgggcctgctgggcgtgctgactgtgtgcatcagcatcatcacagctgctggcatcttcttcatcacagatggcaagtacaacagcaccctgctgggcatccccttctttgccatgggcatcagcacagagttcaccagcagctag

SEQ ID NO: 265496 - DNA, 936 bp, Artificial Sequence
  derived and/or modified sequence
tgatgcttcctgcggcggcccggcgcccccgccagctggatctggtggcgcatgttgcgccaagtcctacgcaggggacttcagtcattctgccataggcttggactttgcgtgtcccgacacccggtgtttttcctcactgtccctgctgtgctgactatcacattcggccttagtgctctgaacagatttcagcccgagggcgacctggagcggctggtggctccatcccacagtttagcgaagatagagcgcagcttagcaagttccctttttccactcgatcagagcaagtcccagctttacagtgacctgcatacccccggcagatacggaagggtgattcttctcagcccaacaggcgataacatcctgttgcaggccgagggaattttacaaacccatagggccgttctggagatgaaggacggcagaaactcgttcataggccaccagctaggaggggtggtggaggtcccgaatagcaaggaccaacgagtgaagtcagcaagggccattcagatcacatattaccttcagacatacggctctgccacgcaggatttaattggtgagaagtgggaaaatgagttttgtaaactgatccgcaagctgcaagaagaacatcaggaattgcaattgtattccctggcatcattctccctgtggagggactttcacaagacctccatcctagccaggagcaaggtcctggtgtcattggtgctgattctgactacagccacactgtccagttcaatgaaagattgccttcgatccaagcctttcctgggactcctgggtgtcctgaccgtgtgcatttcgataattactgcggccggaattttcttcattacagacggcaagtataactcaacactgctggggatccccttttttgccatgggaatttctaccgaattcacaagtagctag

SEQ ID NO: 265497 - DNA, 885 bp, Artificial Sequence
  derived and/or modified sequence
atgctgcggcaggtgctgcggcggggcctgcagagcttctgccacaggctcggtctctgcgtatcccgtcaccccgttttcttcctgaccgtacctgccgtgcttacaatcacctttggactttctgcgttgaaccggtttcagcctgagggtgacctggaaagactggtcgcacccagtcactctctcgcgaaaatcgagaggagcttagccagcagtctttttcctttggatcagtctaaaagccagctatattccgacttacacacccccgggaggtacgggcgcgtgatactgttatctcctaccggagacaatatactactgcaggccgagggcattctccagactcaccgggctgtgttggagatgaaggatgggcgcaactcttttatcgggcaccagctgggtggtgtcgttgaagtaccaaacagtaaggatcaacgcgttaaaagtgcgagagccattcagattacctactatttacagacttatggaagcgcaacccaggatctgattggggaaaagtgggagaatgaattttgcaagctcattaggaaattgcaagaggaacaccaagaactgcaactgtactctcttgcgagtttttccttgtggagggatttccataagactagtatactggccagaagtaaagtactggtaagcctggtgttgatcttgaccaccgctactctttcgtcgtcaatgaaagattgcctaaggtctaaaccattcctaggcctgcttggcgttctcactgtttgcatatctatcatcaccgcggccgggatctttttcataacagacggcaagtataattccacactgctcgggattccttttttcgctatggggatcagtaccgaatttacgagcagttag

SEQ ID NO: 265498 - DNA, 936 bp, Artificial Sequence
  derived and/or modified sequence
taatgcttcctccgtaggcctggtgctccggctagctggatttggtggaggatgctccgtcaggttttgcgaagaggcttgcagagcttttgccaccggctggggctgtgtgtgtcaagacatcctgtgttttttctgaccgtccccgcagttttgacgattacgttcgggctcagtgcgctgaaccggttccaacctgagggagatctggagagacttgtcgcaccttcacactcactagctaagatcgagaggagtttagcttcatccctgtttcctctggaccagagtaagtctcagctgtacagcgacttacacacccccggaagatatgggagggtgattcttttgagcccaacgggggataatattctgcttcaggccgaagggattctccagacccaccgggctgtactggagatgaaagacggcaggaacagctttatcggccaccagctggggggtgtcgtggaggtgcccaatagtaaggatcagcgtgtcaaaagtgccagagccatacagattacatactacctgcaaacctacggatcagccacccaagatctgatcggcgagaagtgggaaaacgaattctgcaaacttatccggaagcttcaggaggagcaccaagagttacaactttattccctagcaagcttcagtctttggcgcgacttccacaagacatcaattttggcaagatcaaaggtgctggtgtctttggtattaatcctgactacggcaaccctgtcatcaagcatgaaggactgtcttcggagcaaacctttcctgggtttactgggcgtactgaccgtgtgcataagcatcattacagccgcaggaatcttctttattacagatggcaagtataatagcactcttctcggtattcccttctttgcaatgggcatttcaacagaattcacgtcctcttag

SEQ ID NO: 265499 - DNA, 885 bp, Artificial Sequence
  derived and/or modified sequence
atgcttcggcaagtgctccgcagaggcctgcagagcttctgtcaccggctgggcctgtgtgtttcacgccaccctgtgttctttctgaccgtccctgccgtacttactatcacatttgggttgtctgccctgaataggttccagcctgagggggatttagaaaggctggttgccccatcccacagtctggccaagatcgagagatcccttgcttccagcttgttccctctggatcagagtaaatcacagttgtactctgatctccatacccctggacgttatggtcgagtaatccttttgtcaccgaccggtgataatatactcctgcaggccgaaggcattttgcaaacacaccgggcagtcctcgaaatgaaggatggacgcaatagcttcataggacaccagttgggtggggtagtggaagtgcctaactctaaggatcaaagagtgaaatcggccagggccatccagattacctattaccttcagacctatggtagtgcaacccaggacctgataggcgagaaatgggagaacgagttttgtaagctgatccgcaaattgcaagaggaacaccaggaactgcagctttactcactcgctagtttctcactgtggagggacttccacaaaacatccatcttagccagaagcaaggtgttggtgtcactggtcctgatcttaacaacggccacactgtcgtcttccatgaaagactgcctccgatctaagccatttcttggccttctgggagtgctgaccgtgtgcatttctattattactgcagccggtatattctttatcacagacggtaagtacaactctaccctcttgggcatcccttttttcgcaatgggcatcagcaccgaatttactagctcctag

SEQ ID NO: 265500 - protein, 1691 aa, Artificial Sequence
  derived and/or modified sequence
MASWTSPWWVLIGMVFMHSPLPQTTAEKSPGAYFLPEFALSPQGSFLEDTTGEQFLTYRYDDQTSRNTRSDEDKDGNWDAWGDWSDCSRTCGGGASYSLRRCLTGRNCEGQNIRYKTCSNHDCPPDAEDFRAQQCSAYNDVQYQGHYYEWLPRYNDPAAPCALKCHAQGQNLVVELAPKVLDGTRCNTDSLDMCISGICQAVGCDRQLGSNAKEDNCGVCAGDGSTCRLVRGQSKSHVSPEKREENVIAVPLGSRSVRITVKGPAHLFIESKTLQGSKGEHSFNSPGVFLVENTTVEFQRGSERQTFKIPGPLMADFIFKTRYTAAKDSVVQFFFYQPISHQWRQTDFFPCTVTCGGGYQLNSAECVDIRLKRVVPDHYCHYYPENVKPKPKLKECSMDPCPSSDGFKEIMPYDHFQPLPRWEHNPWTACSVSCGGGIQRRSFVCVEESMHGEILQVEEWKCMYAPKPKVMQTCNLFDCPKWIAMEWSQCTVTCGRGLRYRVVLCINHRGEHVGGCNPQLKLHIKEECVIPIPCYKPKEKSPVEAKLPWLKQAQELEETRIATEEPTFIPEPWSACSTTCGPGVQVREVKCRVLLTFTQTETELPEEECEGPKLPTERPCLLEACDESPASRELDIPLPEDSETTYDWEYAGFTPCTATCVGGHQEAIAVCLHIQTQQTVNDSLCDMVHRPPAMSQACNTEPCPPRWHVGSWGPCSATCGVGIQTRDVYCLHPGETPAPPEECRDEKPHALQACNQFDCPPGWHIEEWQQCSRTCGGGTQNRRVTCRQLLTDGSFLNLSDELCQGPKASSHKSCARTDCPPHLAVGDWSKCSVSCGVGIQRRKQVCQRLAAKGRRIPLSEMMCRDLPGLPLVRSCQMPECSKIKSEMKTKLGEQGPQILSVQRVYIQTREEKRINLTIGSRAYLLPNTSVIIKCPVRRFQKSLIQWEKDGRCLQNSKRLGITKSGSLKIHGLAAPDIGVYRCIAGSAQETVVLKLIGTDNRLIARPALREPMREYPGMDHSEANSLGVTWHKMRQMWNNKNDLYLDDDHISNQPFLRALLGHCSNSAGSTNSWELKNKQFEAAVKQGAYSMDTAQFDELIRNMSQLMETGEVSDDLASQLIYQLVAELAKAQPTHMQWRGIQEETPPAAQLRGETGSVSQSSHAKNSGKLTFKPKGPVLMRQSQPPSISFNKTINSRIGNTVYITKRTEVINILCDLITPSEATYTWTKDGTLLQPSVKIILDGTGKIQIQNPTRKEQGIYECSVANHLGSDVESSSVLYAEAPVILSVERNITKPEHNHLSVVVGGIVEAALGANVTIRCPVKGVPQPNITWLKRGGSLSGNVSLLFNGSLLLQNVSLENEGTYVCIATNALGKAVATSVLHLLERRWPESRIVFLQGHKKYILQATNTRTNSNDPTGEPPPQEPFWEPGNWSHCSATCGHLGARIQRPQCVMANGQEVSEALCDHLQKPLAGFEPCNIRDCPARWFTSVWSQCSVSCGEGYHSRQVTCKRTKANGTVQVVSPRACAPKDRPLGRKPCFGHPCVQWEPGNRCPGRCMGRAVRMQQRHTACQHNSSDSNCDDRKRPTLRRNCTSGACDVCWHTGPWKPCTAACGRGFQSRKVDCIHTRSCKPVAKRHCVQKKKPISWRHCLGPSCDRDCTDTTHYCMFVKHLNLCSLDRYKQRCCQSCQEG

SEQ ID NO: 265501 - DNA, 7336 bp, Artificial Sequence
  derived and/or modified sequence
cccagccccatttaacttcgcggcggcggcggcgactgcggcgccgcgggctggaggccggcgtcggggaaggtcctggtgccggattccgcacgaggtgttgacgggcggcttctgccaacttctccccagcgcgcgccgagcccgcgcggccccggggctgcacgtcccagatacttctgcggcgcaaggctacaactgagacccggaggagactagaccccatggcttcctggacgagcccctggtgggtgctgatagggatggtcttcatgcactctcccctcccgcagaccacagctgagaaatctcctggagcctatttccttcccgagtttgcactttctcctcagggaagttttctggaagacacaacaggggagcagttcctcacttatcgctatgatgaccagacctcaagaaacactcgttcagatgaagacaaagatggcaactgggatgcttggggcgactggagtgactgctcccggacctgtgggggaggagcatcatattctctgcggagatgtttgactggaaggaattgtgaagggcagaacattcggtacaagacatgcagcaatcatgactgccctccagatgcagaagatttcagagcccagcagtgctcagcctacaatgatgtccagtatcaggggcattactatgaatggcttccacgatataatgatcctgctgccccgtgtgcactcaagtgtcatgcacaaggacaaaacttggtggtggagctggcacctaaggtactggatggaactcgttgcaacacggactccttggacatgtgtatcagtggcatctgtcaggcagtgggctgcgatcggcaactgggaagcaatgccaaggaggacaactgtggagtctgtgccggcgatggctccacctgcaggcttgtacggggacaatcaaagtcacacgtttctcctgaaaaaagagaagaaaatgtaattgctgttcctttgggaagtcgaagtgtgagaattacagtgaaaggacctgcccacctctttattgaatcaaaaacacttcaaggaagcaaaggagaacacagctttaacagccccggcgtctttctcgtagaaaacacaacagtggaatttcagaggggctccgagaggcaaacttttaagattccaggacctctgatggctgatttcatcttcaagaccaggtacactgcagccaaagacagcgtggttcagttcttcttttaccagcccatcagtcatcagtggagacaaactgacttctttccctgcactgtgacgtgtggaggaggttatcagctcaattctgctgaatgtgtggatatccgcttgaagagggtagttcctgaccattattgtcactactaccctgaaaatgtaaaaccaaaaccaaaactgaaggaatgcagcatggatccctgcccatcaagtgatggatttaaagagataatgccctatgaccacttccaacctcttcctcgctgggaacataatccttggactgcatgttccgtgtcctgtggaggagggattcagagacggagctttgtgtgtgtagaggaatccatgcatggagagatattgcaggtggaagaatggaagtgcatgtacgcacccaaacccaaggttatgcaaacttgtaatctgtttgattgccccaagtggattgccatggagtggtctcagtgcacagtgacttgtggccgagggttacggtaccgggttgttctgtgtattaaccaccgcggagagcatgttgggggctgcaatccacaactgaagttacacatcaaagaagaatgtgtcattcccatcccgtgttataaaccaaaagaaaaaagtccagtggaagcaaaattgccttggctgaaacaagcacaagaactagaagagaccagaatagcaacagaagaaccaacgttcattccagaaccctggtcagcctgcagtaccacgtgtgggccgggtgtgcaggtccgtgaggtgaagtgccgtgtgctcctcacattcacgcagactgagactgagctgcccgaggaagagtgtgaaggccccaagctgcccaccgaacggccctgcctcctggaagcatgtgatgagagcccggcctcccgagagctagacatccctctccctgaggacagtgagacgacttacgactgggagtacgctgggttcaccccttgcacagcaacatgcgtgggaggccatcaagaagccatagcagtgtgcttacatatccagacccagcagacagtcaatgacagcttgtgtgatatggtccaccgtcctccagccatgagccaggcctgtaacacagagccctgtccccccaggtggcatgtgggctcttgggggccctgctcagctacctgtggagttggaattcagacccgagatgtgtactgcctgcacccaggggagacccctgcccctcctgaggagtgccgagatgaaaagccccatgctttacaagcatgcaatcagtttgactgccctcctggctggcacattgaagaatggcagcagtgttccaggacttgtggcgggggaactcagaacagaagagtcacctgtcggcagctgctaacggatggcagctttttgaatctctcagatgaattgtgccaaggacccaaggcatcgtctcacaagtcctgtgccaggacagactgtcctccacatttagctgtgggagactggtcgaagtgttctgtcagttgtggtgttggaatccagagaagaaagcaggtgtgtcaaaggctggcagccaaaggtcggcgcatccccctcagtgagatgatgtgcagggatctaccagggctccctcttgtaagatcttgccagatgcctgagtgcagtaaaatcaaatcagagatgaagacaaaacttggtgagcagggtccgcagatcctcagtgtccagagagtctacattcagacaagggaagagaagcgtattaacctgaccattggtagcagagcctatttgctgcccaacacatccgtgattattaagtgccccgtgcgacgattccagaaatctctgatccagtgggagaaggatggccgttgcctgcagaactccaaacggcttggcatcaccaagtcaggctcactaaaaatccatggtcttgctgcccccgacatcggcgtgtaccggtgcattgcaggctctgcacaggaaacagttgtgctcaagctcattggtactgacaaccggctcatcgcacgcccagccctcagggagcctatgagggaatatcctgggatggaccacagcgaagccaatagtttgggagtcacatggcacaaaatgaggcaaatgtggaataacaaaaatgacctttatctggatgatgaccacattagtaaccagcctttcttgagagctctgttaggccactgcagcaattctgcaggaagcaccaactcctgggagttgaagaataagcagtttgaagcagcagttaaacaaggagcatatagcatggatacagcccagtttgatgagctgataagaaacatgagtcagctcatggaaaccggagaggtcagcgatgatcttgcgtcccagctgatatatcagctggtggccgaattagccaaggcacagccaacacacatgcagtggcggggcatccaggaagagacacctcctgctgctcagctcagaggggaaacagggagtgtgtcccaaagctcgcatgcaaaaaactcaggcaagctgacattcaagccgaaaggacctgttctcatgaggcaaagccaacctccctcaatttcatttaataaaacaataaattccaggattggaaatacagtatacattacaaaaaggacagaggtcatcaatatactgtgtgaccttattacccccagtgaggccacatatacatggaccaaggatggaaccttgttacagccctcagtaaaaataattttggatggaactgggaagatacagatacagaatcctacaaggaaagaacaaggcatatatgaatgttctgtagctaatcatcttggttcagatgtggaaagttcttctgtgctgtatgcagaggcacctgtcatcttgtctgttgaaagaaatatcaccaaaccagagcacaaccatctgtctgttgtggttggaggcatcgtggaggcagcccttggagcaaacgtgacaatccgatgtcctgtaaaaggtgtccctcagcctaatataacttggttgaagagaggaggatctctgagtggcaatgtttccttgcttttcaatggatccctgttgttgcagaatgtttcccttgaaaatgaaggaacctacgtctgcatagccaccaatgctcttggaaaggcagtggcaacatctgtactccacttgctggaacgaagatggccagagagtagaatcgtatttctgcaaggacataaaaagtacattctccaggcaaccaacactagaaccaacagcaatgacccaacaggagaacccccgcctcaagagcctttttgggagcctggtaactggtcacattgttctgccacctgtggtcatttgggagcccgcattcagagaccccagtgtgtgatggccaatgggcaggaagtgagtgaggccctgtgtgatcacctccagaagccactggctgggtttgagccctgtaacatccgggactgcccagcgaggtggttcacaagtgtgtggtcacagtgctctgtgtcttgcggtgaaggataccacagtcggcaggtgacgtgcaagcggacaaaagccaatggaactgtgcaggtggtgtctccaagagcatgtgcccctaaagaccggcctctgggaagaaaaccatgttttggtcatccatgtgttcagtgggaaccagggaaccggtgtcctggacgttgcatgggccgtgctgtgaggatgcagcagcgtcacacagcttgtcaacacaacagctctgactccaactgtgatgacagaaagagacccaccttaagaaggaactgcacatcaggggcctgtgatgtgtgttggcacacaggcccttggaagccctgtacagcagcctgtggcaggggtttccagtctcggaaagtcgactgtatccacacaaggagttgcaaacctgtggccaagagacactgtgtacagaaaaagaaaccaatttcctggcggcactgtcttgggccctcctgtgatagagactgcacagacacaactcactactgtatgtttgtaaaacatcttaatttgtgttctctagaccgctacaaacaaaggtgctgccagtcatgtcaagagggataaacctttggaggggtcatgatgctgctgtgaagataaaagtagaatataaaagctcttttccccatgtcgctgattcaaaaacatgtatttcttaaaagactagattctatggatcaaacagaggttgatgcaaaaacaccactgttaaggtgtaaagtgaaattttccaatggtagttttatattccaattttttaaaatgatgtattcaaggatgaacaaaatactatagcatgcatgccactgcacttgggacctcatcatgtcagttgaatcgagaaatcaccaagattatgagtgcatcctcacgtgctgcctctttcctgtgatatgtagactagcacagagtggtacatcctaaaaacttgggaaacacagcaacccatgacttcctcttctctcaagttgcaggttttcaacagttttataaggtatttgcattttagaagctctggccagtagttgttaagatgttggcattaatggcattttcatagatccttggtttagtctgtgaaaaagaaaccatctctctggataggctgtcacactgactgacctaagggttcatggaagcatggcatcttgtccttgcttttagaacacccatggaagaaaacacagagtagatattgctgtcatttatacaactacagaaatttatctatgacctaatgaggcatctcggaagtcaaagaagagggaaagttaaccttttctactgatttcgtagtatattcagagctttcttttaagagctgtgaatgaaactttttctaagcactattctattgcacacaaacagaaaaccaaagccttattagacctaatttatgcataaagtagtattcctgagaactttattttggaaaatttataagaaagtaatccaaataagaaacacgatagttgaaaataatttttatagtaaataattgttttgggctgatttttcagtaaatccaaagtgacttaggttagaagttacactaaggaccaggggttggaatcagaatttagtttaagatttgaggaaaagggtaagggttagtttcagttttaggattagagctagaattgggttaggtgagaaagaaagttaaggttaaggctagagttgtctttaagggttagggttaggaccaggttaggtcagggttggattgggtttagattggggccagtgctggtgttagtgatagtgtcaggatggaggttaggtttggagtaagcgttgttgctgaagtgagttcaggctagcattaaattgtaagttctgaagctgatttggttatggggtctttcccctgtatactaccagttgtgtctttagatggcacacaagtccaaataagtggtcatacttctttattcagggtctcagctgcctgtacacctgctgcctacatcttcttggcaacaaagttacctgccacaggctctgctgagcctagttcctggtcagtaataactgaacagtgcattttggctttggatgtgtctgtggacaagcttgctgagtttctctaccatattctgagcacacggtctcttttgttctaacttcagcttcactgacactgggttgagcactactgtatgtggagggtttggtgattgggaatggatgggggacagtgaggaggacacaccagcccattagttgttaatcatcaatcacatctgattgttgaaggttattaaattaaaagaaagatcatttgtaacatactctttgtatatatttattatatgaaaggtgcaatattttattttgtacagtatgtaataaagacatgggacatatatttttcttattaacaaaatttcatattaaattgcttcactttgtatttaaagttaaaagttactatttttcatttgctattgtactttcattgttgtcattcaattgacattcctgtgtactgtattttactactgtttttataacatgagagttaatgtttctgtttcatgatccttatgtaattcagaaataaatttactttgattattcagtggcatccttataaa

SEQ ID NO: 265502 - DNA, 5076 bp, Artificial Sequence
  derived and/or modified sequence
atggcctcctggacctcaccctggtgggttctgatcggcatggtgttcatgcacagccccctgccacagacaacggccgagaaatcacccggcgcatattttctgccagagtttgcactgagccctcagggatctttccttgaggacacaacgggcgagcagtttttaacgtaccggtacgacgaccagacctctcggaatacgagaagcgatgaagacaaggacggtaactgggatgcttggggagattggagtgactgttcccgtacctgcgggggcggagccagttactctttgcgccggtgcctgacagggagaaattgtgagggtcagaatattaggtacaaaacatgtagcaaccacgactgtccaccggacgccgaggatttccgcgctcagcagtgcagcgcctacaatgacgtccagtaccagggtcattactatgagtggttgcctagatataacgatccagcagcaccttgtgccttgaagtgtcatgctcaaggacagaatctcgttgtggaactggctcccaaagtgttagatggaacccggtgtaacactgactccctggatatgtgcatttccggcatttgccaggcagtgggctgtgatcgccagctgggcagcaacgcaaaggaagacaattgcggggtgtgtgcgggcgatggatctacctgccgtctggtgagagggcagtcgaagagtcatgtctccccagagaagcgggaagagaacgtcatcgcggtgcctcttgggtctcgcagtgtgcgaataaccgtgaaaggccccgcgcacctgtttatagaaagcaagactctgcagggatctaagggggaacattctttcaactcgcccggcgttttcttggtggaaaatacgactgtggaattccagcgggggtcagagcggcagacattcaaaatccccggtcccctgatggccgatttcatctttaaaacacgatataccgccgctaaagactccgtggtgcagtttttcttttatcagcctatcagccaccaatggagacagaccgatttctttccttgtactgtgacatgcggtggagggtaccagctcaatagcgctgaatgcgttgacatccggctcaagcgagtggtacccgatcattactgtcactattacccagagaatgtgaagcccaagcccaagctcaaagaatgcagcatggacccttgccccagtagtgatggttttaaagaaatcatgccatacgatcactttcagccactgcctaggtgggagcacaatccgtggactgcctgcagcgtgtcctgcgggggcggcattcagcgtcgctccttcgtgtgtgtggaggaatcgatgcatggggagattctgcaggtggaagagtggaaatgtatgtatgccccaaagccaaaggtcatgcagacctgcaacctgttcgattgccccaagtggattgcgatggagtggagtcagtgcaccgtaacatgtggccggggactgcgctatagggtggtactgtgcattaaccatcgaggggaacacgttggtggctgtaatccgcagttaaagcttcatattaaggaggagtgcgtgattcctataccatgctacaaacccaaggaaaagtcacccgtggaggccaagctgccctggctgaagcaggctcaggaactggaggaaactcggatcgccaccgaggagccgaccttcataccagagccttggtctgcttgctcaacgacttgcggcccaggagtgcaggttcgagaggttaaatgccgggtgctgctgactttcactcaaacagagacggagcttcctgaggaggagtgcgaaggtccaaaactgcctacggagagaccatgtctgctggaggcttgcgatgaatcacccgctagccgcgaactcgatatccccctgcccgaagactccgagacgacatacgactgggaatacgcagggtttaccccctgtacagcaacttgcgttggaggacatcaggaggctattgcggtgtgtttgcacatccaaactcagcagacggtgaacgactccctttgtgacatggtgcatcgcccccccgccatgtcgcaggcttgcaatacagagccctgtcctccccggtggcatgtcggttcctggggcccctgcagcgcaacgtgcggggtaggaatacagaccagagatgtttactgcttgcacccaggggagactcccgctccgccggaagagtgtagagatgagaagccccatgccctgcaagcgtgcaatcaatttgattgtccacctggttggcatatcgaagaatggcagcagtgcagtaggacctgtggtggaggaacgcagaataggcgggtgacctgtagacaactgctaactgacggatctttcttgaacctctccgatgagctgtgtcagggtcctaaggcctcttctcacaaaagctgcgcccggacagattgccctcctcacctcgccgtgggggattggtcaaaatgctctgttagctgtggagtcggcatccagcgccgcaagcaggtgtgtcagagactggccgccaagggtcgacggatacctctgagtgagatgatgtgccgcgacctgcctggattaccacttgtgagatcctgccagatgcccgaatgcagcaagataaagagtgaaatgaaaacaaaacttggggaacagggacctcagatcctctccgtacagcgggtctacatccaaacacgggaagaaaagagaatcaatctgacaattggatccagagcgtatctgctgcctaacacctccgtgataataaagtgtcccgttcggaggttccagaagtccttgatacagtgggagaaagatggaagatgcttgcagaacagcaaacggctaggcatcactaagtctggcagtctgaagattcacggactcgccgcccccgacatcggtgtttatcgatgcatagcagggagcgcccaagagacagttgtacttaagttaattggaactgataatcgacttatcgctaggcctgctctgcgggaaccgatgagggagtatccggggatggaccattccgaagccaactctcttggcgtcacctggcataagatgaggcagatgtggaacaacaaaaacgacttgtatttggacgacgaccatataagcaaccagccttttttacgagccctgttaggtcactgcagtaattccgcgggctctactaactcctgggagcttaagaataaacaattcgaagccgctgtaaagcagggagcctattccatggatactgcgcagttcgatgagctcattcggaatatgtctcagttgatggagactggtgaagtgtctgacgatcttgcttctcaacttatttatcaattagtcgccgagctggccaaagcccagcccactcacatgcaatggcgggggatacaggaagagacaccccctgccgctcagttgaggggcgagacaggctcagtttcgcagagctcacatgctaagaactctggcaaattgacatttaagcctaaggggcctgtgctgatgcgtcagagccagccacccagtatttctttcaacaaaacaatcaattctcgaatcggaaacaccgtctacattacgaagagaacagaagtcataaacattctctgtgacctgataactccctcagaggcaacttacacatggacgaaggatggaacactgctgcaaccatccgttaaaatcatactggacggcactggtaaaattcaaatccagaacccaacccggaaggaacagggaatatacgaatgtagcgtggccaatcacttaggatccgatgtagagtcctccagcgtgctttacgctgaggcacccgtaatcctaagtgtagagagaaacattacaaaacctgaacacaatcacctctcagttgtggtcgggggtatcgtggaggctgccctaggagccaatgtcactattcgttgccctgtaaaaggagtaccccagcccaatatcacttggcttaagcggggaggctctttatcaggtaatgtgtctctcctgttcaatgggagcctcctgctccagaacgtctcactcgaaaacgaagggacatatgtgtgtattgctaccaacgccctgggcaaggctgtcgccacctccgttctccacctgctggagcgaagatggcctgaaagccgaatcgtattcctccaaggccacaaaaagtacatcttacaggctacgaatactaggaccaactctaacgatccaacaggtgaaccaccaccacaggagccattctgggagcccggcaattggtcccattgcagcgccacttgcggacatttaggtgctaggattcagcgaccccagtgtgttatggccaacgggcaggaagtgtccgaagccctttgcgaccacttacagaagcctcttgcagggtttgaaccgtgcaatattcgggactgccccgccaggtggttcacctccgtttggagccagtgcagtgtctcatgcggagagggttatcattcccggcaggttacttgtaagcgcacaaaggccaacggcaccgttcaggttgtgtccccacgggcttgtgcaccgaaggaccgcccccttgggcgcaagccctgctttggtcacccttgtgtccagtgggaacctggaaaccggtgcccgggacggtgtatgggtcgcgctgtccggatgcaacaaaggcacacagcttgccaacacaattcgtccgacagcaattgcgacgatcggaaaagaccaactctaaggcgaaactgtacgagtggtgcttgcgatgtgtgttggcacactggcccttggaaaccatgcactgccgcatgtggtaggggtttccagagtcggaaggtcgactgcatccatactcggagctgtaaaccagtggctaagagacattgtgttcagaaaaagaagcctatctcctggagacattgtctgggcccctcatgtgacagagactgtactgatactactcactactgcatgtttgtcaaacacctgaatctgtgctccctggatcgatacaaacagcgctgctgtcagagctgtcaggagggctag

SEQ ID NO: 265503 - DNA, 5076 bp, Artificial Sequence
  derived and/or modified sequence
atggcctcctggaccagcccctggtgggtgctgattggcatggtgttcatgcacagccccctgccccagaccacagctgagaagagccctggggcctacttcctgcctgagtttgccctgagcccccagggcagcttcctggaggacaccactggagagcagttcctgacctaccgctatgatgaccagaccagcaggaacaccaggagtgatgaggacaaggatggcaactgggatgcctggggagactggagcgactgcagcaggacctgtggcggcggggccagctacagcctgcggcgctgcctgaccggcaggaactgtgagggccagaacatccgctacaagacctgcagcaaccacgactgccccccagatgctgaggacttccgggcccagcagtgcagcgcctacaatgatgtgcagtaccagggccactactatgagtggctgccccgctacaatgaccctgctgccccctgtgccctgaagtgccacgcccagggccagaacctggtggtggagctggcccccaaggtgctggatggcacccgctgcaacacagacagcctggacatgtgcatcagcggcatctgccaggccgtgggctgtgaccggcagctgggcagcaatgccaaggaggacaactgtggggtgtgtgctggagatggcagcacctgccgcctggtgcggggccagagcaagagccacgtgtccccagagaagcgggaggagaatgtgattgctgtgcccctgggcagccgctctgtgcgcatcaccgtgaagggccctgcccacctgttcatcgagagcaagaccctgcagggcagcaagggggagcacagcttcaacagccctggggtcttcctggtggagaacaccaccgtggagttccagaggggcagcgagcggcagaccttcaagatccctggccccctgatggctgacttcatcttcaagacccgctacacagctgccaaggacagcgtggtgcagttcttcttctaccagcccatcagccaccagtggaggcagacagacttcttcccctgcaccgtgacctgtggcggcggctaccagctgaacagcgcagaatgtgtggacatccggctgaagagggtggtgcctgaccactactgccactactacccagaaaatgtgaagcccaagcccaagctgaaggaatgttccatggacccctgccccagcagtgatggcttcaaggagatcatgccctatgaccacttccagcccctgccccgctgggagcacaacccctggacagcctgcagcgtgtcctgtggcggcggcatccagaggaggagctttgtgtgtgtggaggagagcatgcatggagagatcctgcaggtggaggagtggaagtgcatgtatgcccccaagcccaaggtgatgcagacctgcaacctgtttgactgccccaagtggatcgccatggagtggagccagtgcaccgtgacctgtggccggggcctgcgctacagagtggtgctgtgcatcaaccacagaggagagcacgtgggcggctgcaacccccagctgaagctgcacatcaaggaggagtgtgtgatccccatcccctgctacaagcccaaggagaagagccctgtggaggccaagctgccctggctgaagcaggcccaggagctggaggagaccagaattgccacagaggagcccaccttcatccctgagccctggagcgcctgcagcaccacctgtggccctggggtgcaggtgcgggaggtgaagtgccgggtgctgctgaccttcacccagacagaaacagagctgcctgaggaggagtgtgagggccccaagctgcccacagagcggccctgcctgctggaggcctgtgatgagagccctgccagccgggagctggacatccccctgcctgaggacagcgagaccacctatgactgggagtatgccggcttcaccccctgcacagccacctgtgtgggcggccaccaggaggccatcgctgtgtgcctgcacatccagacccagcagacagtgaatgacagcctgtgtgacatggtgcaccggcccccagccatgagccaggcctgcaacacagagccctgccccccacgctggcacgtgggctcctggggcccctgcagcgccacctgtggggtgggcatccagaccagagatgtgtactgcctgcaccctggagagaccccagcccctcctgaggagtgcagagatgagaagccccacgccctgcaggcctgcaaccagtttgactgccccccaggctggcacatcgaggagtggcagcagtgcagcaggacctgtggcggcggcacccagaacagaagagtgacctgccggcagctgctgacagatggcagcttcctgaacctgagtgatgagctgtgccagggccccaaggccagcagccacaagagctgtgccaggacagactgccccccccacctggccgtgggggactggagcaagtgcagcgtgtcctgtggggtgggcatccagaggaggaagcaggtgtgccagaggctggccgccaagggccgccgcatccccctgtctgagatgatgtgccgggacctgcccggcctgcccctggtgcgcagctgccagatgccagaatgttccaagatcaagtctgagatgaagaccaagctgggggagcagggcccccagatcctgtctgtgcagagggtgtacatccagacccgggaggagaagaggatcaacctgaccatcggcagccgggcctacctgctgcccaacaccagcgtcatcatcaagtgccctgtgcggcgcttccagaagagcctcatccagtgggagaaggatggccgctgcctgcagaacagcaagaggctgggcatcaccaagagcggcagcctgaagatccacggcctggccgccccagacattggagtgtaccgctgcatcgccggcagcgcccaggagaccgtggtgctgaagctgattggaacagacaaccggctgattgcccggcctgccctgcgggagcccatgagggagtacccaggcatggaccacagcgaggccaacagcctgggcgtgacctggcacaagatgaggcagatgtggaacaacaagaatgacctgtacctggatgatgaccacatcagcaaccagcccttcctgcgggccctgctgggccactgcagcaacagcgctggcagcaccaacagctgggagctgaagaacaagcagtttgaggccgctgtgaagcagggcgcctacagcatggacacagcccagtttgatgagctgatccggaacatgagccagctgatggagactggagaggtgtctgatgacctggccagccagctgatctaccagctggtggccgagctggccaaggcccagcccacccacatgcagtggaggggcatccaggaggagaccccacctgctgcccagctgcggggggagactggatctgtgtcccagagcagccacgccaagaacagcggcaagctgaccttcaagcccaagggccctgtgctgatgaggcagagccagcccccatccatctccttcaacaagaccatcaacagccgcatcggcaacacagtgtacatcaccaagaggacagaggtgatcaacatcctgtgtgacctgatcaccccatctgaggccacctacacctggaccaaggatggcaccctgctgcagcccagcgtgaagatcatcctggatggcaccgggaagatccagatccagaaccccaccaggaaggagcagggcatctatgagtgcagcgtggccaaccacctgggcagtgatgtggagagcagctctgtgctgtatgcagaggcccctgtgatcctgtctgtggagaggaacatcaccaagccagagcacaaccacctgtctgtggtggtgggcggcatcgtggaggccgccctgggcgccaacgtgaccatccgctgccctgtgaagggcgtgccccagcccaacatcacctggctgaagagaggaggcagcctgtctggaaatgtgtccctgctcttcaacggcagcctgctgctgcagaatgtgtccctggagaatgaaggcacctacgtgtgcatcgccaccaatgccctgggcaaggctgtggccacctctgtgctgcacctgctggagcggcgctggccagagagccgcatcgtgttcctgcagggccacaagaagtacatcctgcaggccaccaacaccaggaccaacagcaatgaccccaccggggagcccccaccccaggagcccttctgggagcccggcaactggagccactgcagcgccacctgtggccacctgggcgcccgcatccagaggccccagtgtgtgatggccaacggccaggaggtgtctgaggccctgtgtgaccacctgcagaagcccctggccggctttgagccctgcaacatccgggactgcccagcccgctggttcacctctgtgtggagccagtgcagcgtgtcctgtggggagggctaccacagccggcaggtgacctgcaagaggaccaaggccaacggcaccgtgcaggtggtgagcccccgggcctgtgcccccaaggaccggcccctgggcaggaagccctgcttcggccacccctgtgtgcagtgggagcccggcaaccgctgccccggccgctgcatgggccgggctgtgaggatgcagcagaggcacacagcctgccagcacaacagcagtgacagcaactgtgatgacaggaagaggcccaccctgcggaggaactgcaccagcggggcctgtgatgtgtgctggcacacaggcccctggaagccctgcacagctgcctgtggccggggcttccagagcaggaaggtggactgcatccacaccaggagctgcaagcctgtggccaagaggcactgtgtgcagaagaagaagcccatctcctggaggcactgcctgggccccagctgtgaccgggactgcacagacaccacccactactgcatgtttgtgaagcacctgaacctgtgcagcctggaccgctacaagcagcgctgctgccagagctgccaggagggctag

SEQ ID NO: 265504 - DNA, 5076 bp, Artificial Sequence
  derived and/or modified sequence
atggccagctggaccagcccctggtgggtgctgatcggcatggtgttcatgcattcgccactgccccaaaccaccgcagagaagagtccaggggcatacttcctaccagagtttgctctgtctcctcagggaagctttttggaggacaccacaggcgaacagttcctgacctaccgatatgacgaccagacatcccggaatactcgctccgacgaagacaaggacggaaattgggatgcatggggcgactggagtgattgctctcgaacctgcgggggcggcgcctcttacagcctgaggcgatgcctgacaggacggaactgtgaaggccaaaatattagatataagacctgtagtaatcatgattgcccaccagatgcggaagactttcgggcgcagcagtgttccgcgtacaacgacgttcagtaccagggccattattatgagtggctgcctcgatacaacgatccagctgccccgtgcgcactcaagtgtcacgctcagggtcaaaacctggtggtggagctagcccccaaagtgctcgatgggacaagatgtaatactgactctctcgacatgtgcatctcaggtatctgccaggcggtgggctgcgataggcaactgggctctaatgctaaagaggataactgcggcgtatgtgctggagacggcagtacttgcagactagtcaggggccagtcaaaatcccatgtctcccccgagaaacgggaggagaatgtcatcgccgtccccctcggctcgcgctccgtgcgcattacagttaaaggacccgctcacctgttcattgaatccaaaacactgcagggctctaaaggagaacacagctttaacagtcctggcgtctttctggttgagaacaccacagtcgagttccaacggggttcagagagacagacttttaagatccctggaccactcatggcagatttcatttttaaaactaggtatactgcagccaaggactcagtcgtccagttctttttttaccagcccatcagccaccagtggcggcagacagacttttttccctgcaccgtgacgtgtgggggcggctaccagctgaacagcgccgagtgcgttgatatccgcctgaagcgggttgtaccggaccattactgtcactactatcctgaaaatgtcaagcctaaaccaaagctcaaggagtgctccatggatccttgcccttctagtgatggattcaaagaaattatgccctacgatcattttcaacctcttccacgttgggaacacaatccatggaccgcctgctcagtcagctgtggcggaggtattcagagacggtcgtttgtctgcgtcgaggagagcatgcacggagagatcttgcaggtggaagagtggaagtgcatgtatgctccaaaaccaaaagtaatgcaaacttgcaacctgtttgactgtcctaagtggattgccatggaatggtctcagtgtactgtgacttgcggccggggcctgcgataccgtgtggtactttgtatcaaccatcgaggcgagcatgtcggaggctgcaacccccagctcaaactccatatcaaagaggagtgcgtaatcccgatcccgtgctacaagccaaaagagaaaagccccgtggaagctaaacttccttggctcaagcaggctcaggaactagaagagaccaggattgccacagaggagccgacatttattccggagccctggagcgcctgtagtacaacttgcgggcccggggtgcaggtcagggaagtgaaatgccgcgtcctgttaacttttacacaaaccgagaccgagcttccagaggaggagtgtgagggccccaaattgccgactgagagaccatgtttactcgaagcttgcgatgagtcccctgctagtcgggagctggacatacccctccctgaagattccgaaaccacatacgattgggaatacgcgggttttacaccgtgtacagctacatgtgtgggaggacatcaggaggcaatcgcggtgtgtttgcacatccagacccaacagacggttaacgacagcctatgcgatatggtacaccgacctccagcaatgagtcaggcctgcaacacagagccttgccctccccgctggcacgttgggagctggggcccctgcagcgctacatgtggagttggtattcagacaagggatgtctactgtctgcaccccggcgagacgccagccccccctgaggagtgtcgggatgagaaaccccacgccttgcaggcctgtaatcagtttgactgcccacctggttggcacatcgaggagtggcaacagtgctcccgaacttgtggcggaggtacgcagaatcggagagttacatgtcgacagctcttaacagatggtagtttcctgaacctaagtgatgagctgtgccaggggccaaaagcgtcaagccacaaatcatgcgcccgcaccgactgtccgcctcacttggctgtgggggattggtcaaagtgtagtgtgtcatgcggggtgggcattcagagaaggaaacaggtgtgtcagaggcttgcagccaaaggtagaagaatcccattgagcgagatgatgtgtcgggacttaccagggttgcctctggtgcgctcttgtcaaatgcccgaatgctccaaaatcaagagcgaaatgaaaaccaagcttggtgaacagggccctcagattctcagcgtgcagagggtgtatattcagacgcgggaagaaaagagaatcaatctgacgatcggctccagggcttacctgctaccaaatacgagcgtcatcataaaatgccctgtcaggcgatttcaaaagtcactcatacaatgggagaaggatggcagatgcctccaaaactccaagcgactcggaataactaagtctgggtccctaaaaatccatggcttggctgcaccagatatcggagtttacaggtgtatcgcaggatctgctcaggagacagtggttctgaaactgatcggcaccgacaaccgtctgatcgctcgacccgctcttagggaaccaatgcgggagtatcccggcatggaccattctgaagcgaattcactgggtgttacctggcacaaaatgcgccagatgtggaacaataaaaatgacctgtatctcgatgacgaccacatcagcaatcagccattcctgagagcactcctgggacattgtagcaattcagctgggagcactaactcttgggaactgaaaaacaagcagttcgaagccgctgtgaagcagggcgcctacagcatggacactgcccagttcgatgagctaatcaggaacatgtcccagttgatggagacgggagaggtaagtgatgacctggcctctcagctgatttatcagttagtggcggagcttgctaaagcccaaccgacccatatgcagtggaggggaatccaggaggaaacccctccggctgcccagctgagaggggagaccggatccgtgtctcagtctagccatgccaaaaatagcggaaaactaacctttaagccaaaaggccccgtgttaatgcggcagtcacagcctccctccatttcttttaataagacaattaattctcgtatcggaaataccgtgtacataacaaagcgaaccgaggtgattaacatcctctgtgacttgataacacccagcgaggccacctatacatggacaaaggacggtaccctgctgcagccatctgtgaaaataatattggatgggacggggaagattcagatccaaaaccctactcggaaggaacagggtatctacgagtgtagtgtcgccaaccatctgggcagcgatgtggagagcagtagcgtgctatacgccgaggcccccgttattttgagtgttgaaaggaatatcaccaagccggagcacaatcatctctccgtcgtcgttgggggcattgttgaggcggcactgggcgcgaacgtgacgattcggtgtcctgttaaaggtgtgccacagccaaatattacgtggttgaagcggggggggtctctttccggaaacgtctccctcctcttcaacggtagtctgctgctgcaaaacgttagtctagaaaatgagggcacgtacgtgtgcatagccaccaacgccctgggaaaagccgtcgcgacttccgtgctccatctcttagaaaggcgttggcctgagagtaggattgtctttctccaaggccataaaaagtatattttgcaggcaaccaacactcgcaccaatagtaacgaccccaccggtgagcccccccctcaggagcccttctgggaacctggaaattggagccattgttccgctacctgtggtcatctgggggctagaattcagagacctcagtgtgtaatggccaacggccaggaggtgtctgaagcactgtgtgatcacctgcagaaaccgctggccggcttcgagccttgtaacatacgcgactgtcccgcccgttggttcacatccgtgtggtcccagtgcagcgtctcctgcggagaaggttatcacagcaggcaggtgacttgcaaaagaactaaggcaaatggtaccgtacaggtcgtgagccccagagcctgtgctccgaaggacagaccactgggacggaagccctgctttgggcacccttgcgtacagtgggagccagggaatcgctgtcctgggagatgtatgggaagggccgtgcggatgcagcagagacacaccgcttgccagcacaactcttcggactccaactgtgacgatcgaaaaagaccgacactcagacgtaactgtacgagcggggcatgcgacgtgtgctggcacaccggaccttggaaaccatgtacagcggcctgcggcagaggttttcagagcagaaaggttgactgcatacacacacgctcctgtaagcctgtagccaagagacactgtgtgcaaaaaaagaagccaatcagctggcggcattgcttgggaccaagctgtgatagagactgcactgataccacgcactactgcatgtttgtgaagcatttgaacctgtgcagcctggataggtacaaacagcggtgctgtcagagttgccaagagggctag

SEQ ID NO: 265505 - DNA, 5076 bp, Artificial Sequence
  derived and/or modified sequence
atggcgagctggaccagcccatggtgggtgctgattggaatggtgttcatgcattctcctctgccacagacaaccgccgaaaaatcaccaggagcctatttcttgccagagtttgccctctcccctcaagggtccttcttagaagacaccactggggaacagttcttgacttatagatacgacgatcaaacctcacggaatacaaggtccgacgaagataaggatgggaactgggacgcttggggcgactggagtgactgcagcagaacatgcggaggcggagcttcctattcactgcggcgatgcctcacaggcagaaactgtgaaggtcagaacatcagatataaaacctgctccaatcatgactgtcctcctgatgcagaggattttcgggcacagcagtgctcggcctacaacgacgtacaatatcaaggccactactatgagtggttgccacgctacaacgatccagctgcaccttgcgctctgaaatgtcacgcccagggtcagaacctcgtggtggaactggcacctaaggtgctcgatgggactagatgtaacacggactccctggacatgtgcattagtggcatctgccaagcagtcggctgcgacaggcagttgggatctaatgccaaagaggacaattgtggagtgtgcgcaggcgacggatccacatgccggttggtgcgcggacagtccaagagtcacgtgtcccctgaaaaaagagaggagaatgtgatcgctgtgccactgggttctcgttcagtgaggatcaccgtgaagggccctgcccacctgttcatcgaatccaaaactttgcaaggctcaaaaggcgagcatagcttcaacagccctggagttttccttgtcgagaatacaactgtggaattccaaagaggatccgagagacagaccttcaaaattccaggcccactgatggccgactttatctttaagacccggtacaccgccgcaaaggacagcgtggtgcaattttttttttaccagccaatcagccaccagtggaggcagacagactttttcccttgtaccgtgacatgcggcggaggataccagctgaactcagcagaatgcgtggacatacggctcaaacgtgtggtacccgatcattactgccattactatcctgagaatgttaagcctaaacccaaactaaaagaatgctcgatggatccttgtccgtcaagtgatggatttaaagagattatgccctatgatcatttccagcctttacctaggtgggagcataatccctggaccgcctgcagcgtttcatgtggtggtgggattcaaagacgatcttttgtgtgcgtggaagagagcatgcacggcgaaatactgcaggtcgaggaatggaagtgcatgtacgcacctaagccaaaggtcatgcagacctgtaatctgtttgactgccccaagtggatcgcaatggagtggtctcagtgtacagtgacctgcggacggggtctgcgataccgcgtcgtgctgtgcattaatcatcgcggagaacacgttgggggttgcaacccccagctgaaactgcacatcaaagaggagtgcgttatcccgatcccatgttacaaacccaaggagaaatctcccgtggaagctaagctcccctggctgaaacaggcccaggaactggaagagactaggattgctaccgaagagcccacattcatccctgaaccctggagtgcatgttctaccacatgtgggcctggtgtgcaagtgagggaggtcaagtgccgtgtgctcttgacctttacccaaacagagaccgaattgcccgaagaagaatgcgaagggcctaaactccccactgagagaccttgtctgctggaggcttgtgacgagtccccagcgagtcgcgaattggatataccattgccggaggattcagaaaccacttacgattgggagtatgccggatttacaccttgtacagctacatgcgttggcggacatcaggaagctatcgcagtatgtctgcacattcaaacacaacagaccgtgaacgactctctgtgtgacatggtgcaccggccaccagctatgagtcaggcatgcaatacagagccttgccctccccgatggcacgtgggctcctggggcccttgctcagctacctgtggagtcgggatacaaacgcgagatgtgtactgcctacatcctggcgaaaccccggctccacctgaggaatgtagggatgagaaaccacacgctctccaggcgtgtaatcaattcgattgcccccctggctggcatatagaagaatggcaacagtgttccagaacatgtgggggtggcacgcagaaccggagagtgacatgccgccaacttttaaccgatggttcttttctcaacctgagcgacgagttatgccagggcccaaaggcttccagtcataagagctgtgcaaggactgattgtccccctcacttggcggtgggcgattggagcaaatgtagcgtgtcctgtggtgtcggcatccagcgcaggaagcaggtatgtcagcggctcgctgccaagggtagaaggatccctttaagtgaaatgatgtgccgagaccttcccggtctcccactcgtgagaagctgccagatgcccgaatgctccaaaatcaagtccgagatgaagacaaagctcggggagcaaggcccacagattctcagtgtgcagagggtgtatatccagaccagggaagagaagagaatcaacctcacgatcggttccagagcatacttactccctaacaccagtgtcatcatcaaatgtccagtgagacgcttccaaaagagtttaatccaatgggagaaggatgggagatgtctgcagaacagcaaaaggctggggatcaccaagagcggaagtctgaaaatccatggcctcgctgcacccgacatcggggtgtatagatgcatagctggcagtgctcaggaaaccgttgtcctcaaactcatcgggacagataaccgtctcatcgctagaccagcattgagagaaccaatgcgagaatatccaggaatggatcactctgaggccaattcactgggggtcacatggcacaaaatgcggcagatgtggaataacaaaaacgatctgtaccttgacgatgaccatattagcaatcagccctttctgcgtgccctgctgggccactgttcaaactcagcgggttctactaatagctgggagctgaaaaacaagcagttcgaggctgcagtcaaacaaggtgcctatagcatggacacggctcagtttgacgagcttattcgcaatatgtcccagctcatggagacaggtgaagtgagcgacgacttggcctcacagctcatctaccagctggttgcagaactagcgaaggcacaacccacacacatgcagtggaggggcattcaagaggagaccccacctgctgcacagctgcggggagaaaccggctctgtcagtcagagctctcacgccaaaaattccgggaagctcaccttcaagccaaagggaccagtcctgatgagacagagtcagcctccctccattagctttaataagacgattaactcgagaattggcaatactgtgtacattacgaaaaggaccgaagtaatcaacattctgtgcgatctcatcacaccatcagaggctacctatacgtggaccaaagatggcaccttacttcaaccgtccgttaagattatcttggacggaacggggaagattcaaatacagaatcccactaggaaagaacaaggcatttacgagtgctctgtcgcaaatcatctcggcagcgatgtggagtcaagtagcgttctgtatgccgaggcacccgtgatcctttccgttgagcgcaacatcaccaaacctgaacacaatcacttatccgttgtggtaggcggaattgtcgaggcggctctgggcgctaacgtcactatccggtgcccagttaagggggttcctcagcccaatattacttggcttaagaggggtgggtccctgagcggtaatgtctccctgttgttcaacggctcattgctgctgcagaacgtgagcctggaaaatgaaggcacgtatgtttgcatagcaacgaacgccttgggcaaggcggttgcgacgtccgtgctgcatctgctggagcgcagatggccagaatcccgtattgtgtttctgcaggggcataaaaaatacattctgcaggctactaacacgcgcacgaacagcaacgatccaactggagaacctccaccacaggagcccttctgggagccgggaaattggtcccactgctctgctacctgtgggcatctcggcgctcggatacaacggccacagtgcgtaatggcgaacgggcaggaggtgtccgaagccctgtgcgaccacctccagaagcctctggccggtttcgaaccttgtaacatccgtgactgtcctgccaggtggtttacttccgtgtggtcccagtgttccgtgtcctgcggagaagggtatcatagccggcaggtcacctgtaagcgtaccaaggcaaacggcactgtgcaggtggtgagcccaagagcatgtgcccctaaggacagacccctggggcgaaagccctgtttcgggcacccttgtgtgcaatgggagccgggaaatagatgtcccggtagatgcatgggtcgcgcagtccgtatgcagcagcggcacacagcctgtcaacacaacagtagtgattccaactgtgacgacagaaagcggcctacactgcgtagaaactgcacatctggagcttgtgacgtgtgttggcacactggtccttggaaaccgtgcaccgccgcttgcgggcgaggcttccagagcagaaaagtggactgcattcatacaaggtcctgtaaacccgtggcaaagaggcactgtgtgcaaaagaagaagcccatctcctggcggcactgccttggcccaagttgcgatcgagactgcacagacactacccactattgtatgttcgtcaagcacctgaatttgtgtagccttgaccgctataagcagagatgttgtcagtcatgtcaagagggttat

SEQ ID NO: 265506 - DNA, 5076 bp, Artificial Sequence
  derived and/or modified sequence
atggccagctggaccagcccctggtgggtgctgatcggcatggtgttcatgcacagccccctgccccagaccaccgccgagaagagccccggcgcctacttcctgcccgagttcgccctgagcccccagggcagcttcctggaggacaccaccggcgagcagttcctgacctacagatacgacgaccagaccagcagaaacaccagaagcgacgaggacaaggacggcaactgggacgcctggggcgactggagcgactgcagcagaacctgcggcggcggcgccagctacagcctgagaagatgcctgaccggcagaaactgcgagggccagaacatcagatacaagacctgcagcaaccacgactgcccccccgacgccgaggacttcagagcccagcagtgcagcgcctacaacgacgtgcagtaccagggccactactacgagtggctgcccagatacaacgaccccgccgccccctgcgccctgaagtgccacgcccagggccagaacctggtggtggagctggcccccaaggtgctggacggcaccagatgcaacaccgacagcctggacatgtgcatcagcggcatctgccaggccgtgggctgcgacagacagctgggcagcaacgccaaggaggacaactgcggcgtgtgcgccggcgacggcagcacctgcagactggtgagaggccagagcaagagccacgtgagccccgagaagagagaggagaacgtgatcgccgtgcccctgggcagcagaagcgtgagaatcaccgtgaagggccccgcccacctgttcatcgagagcaagaccctgcagggcagcaagggcgagcacagcttcaacagccccggcgtgttcctggtggagaacaccaccgtggagttccagagaggcagcgagagacagaccttcaagatccccggccccctgatggccgacttcatcttcaagaccagatacaccgccgccaaggacagcgtggtgcagttcttcttctaccagcccatcagccaccagtggagacagaccgacttcttcccctgcaccgtgacctgcggcggcggctaccagctgaacagcgccgagtgcgtggacatcagactgaagagagtggtgcccgaccactactgccactactaccccgagaacgtgaagcccaagcccaagctgaaggagtgcagcatggacccctgccccagcagcgacggcttcaaggagatcatgccctacgaccacttccagcccctgcccagatgggagcacaacccctggaccgcctgcagcgtgagctgcggcggcggcatccagagaagaagcttcgtgtgcgtggaggagagcatgcacggcgagatcctgcaggtggaggagtggaagtgcatgtacgcccccaagcccaaggtgatgcagacctgcaacctgttcgactgccccaagtggatcgccatggagtggagccagtgcaccgtgacctgcggcagaggcctgagatacagagtggtgctgtgcatcaaccacagaggcgagcacgtgggcggctgcaacccccagctgaagctgcacatcaaggaggagtgcgtgatccccatcccctgctacaagcccaaggagaagagccccgtggaggccaagctgccctggctgaagcaggcccaggagctggaggagaccagaatcgccaccgaggagcccaccttcatccccgagccctggagcgcctgcagcaccacctgcggccccggcgtgcaggtgagagaggtgaagtgcagagtgctgctgaccttcacccagaccgagaccgagctgcccgaggaggagtgcgagggccccaagctgcccaccgagagaccctgcctgctggaggcctgcgacgagagccccgccagcagagagctggacatccccctgcccgaggacagcgagaccacctacgactgggagtacgccggcttcaccccctgcaccgccacctgcgtgggcggccaccaggaggccatcgccgtgtgcctgcacatccagacccagcagaccgtgaacgacagcctgtgcgacatggtgcacagaccccccgccatgagccaggcctgcaacaccgagccctgcccccccagatggcacgtgggcagctggggcccctgcagcgccacctgcggcgtgggcatccagaccagagacgtgtactgcctgcaccccggcgagacccccgccccccccgaggagtgcagagacgagaagccccacgccctgcaggcctgcaaccagttcgactgcccccccggctggcacatcgaggagtggcagcagtgcagcagaacctgcggcggcggcacccagaacagaagagtgacctgcagacagctgctgaccgacggcagcttcctgaacctgagcgacgagctgtgccagggccccaaggccagcagccacaagagctgcgccagaaccgactgccccccccacctggccgtgggcgactggagcaagtgcagcgtgagctgcggcgtgggcatccagagaagaaagcaggtgtgccagagactggccgccaagggcagaagaatccccctgagcgagatgatgtgcagagacctgcccggcctgcccctggtgagaagctgccagatgcccgagtgcagcaagatcaagagcgagatgaagaccaagctgggcgagcagggcccccagatcctgagcgtgcagagagtgtacatccagaccagagaggagaagagaatcaacctgaccatcggcagcagagcctacctgctgcccaacaccagcgtgatcatcaagtgccccgtgagaagattccagaagagcctgatccagtgggagaaggacggcagatgcctgcagaacagcaagagactgggcatcaccaagagcggcagcctgaagatccacggcctggccgcccccgacatcggcgtgtacagatgcatcgccggcagcgcccaggagaccgtggtgctgaagctgatcggcaccgacaacagactgatcgccagacccgccctgagagagcccatgagagagtaccccggcatggaccacagcgaggccaacagcctgggcgtgacctggcacaagatgagacagatgtggaacaacaagaacgacctgtacctggacgacgaccacatcagcaaccagcccttcctgagagccctgctgggccactgcagcaacagcgccggcagcaccaacagctgggagctgaagaacaagcagttcgaggccgccgtgaagcagggcgcctacagcatggacaccgcccagttcgacgagctgatcagaaacatgagccagctgatggagaccggcgaggtgagcgacgacctggccagccagctgatctaccagctggtggccgagctggccaaggcccagcccacccacatgcagtggagaggcatccaggaggagaccccccccgccgcccagctgagaggcgagaccggcagcgtgagccagagcagccacgccaagaacagcggcaagctgaccttcaagcccaagggccccgtgctgatgagacagagccagccccccagcatcagcttcaacaagaccatcaacagcagaatcggcaacaccgtgtacatcaccaagagaaccgaggtgatcaacatcctgtgcgacctgatcacccccagcgaggccacctacacctggaccaaggacggcaccctgctgcagcccagcgtgaagatcatcctggacggcaccggcaagatccagatccagaaccccaccagaaaggagcagggcatctacgagtgcagcgtggccaaccacctgggcagcgacgtggagagcagcagcgtgctgtacgccgaggcccccgtgatcctgagcgtggagagaaacatcaccaagcccgagcacaaccacctgagcgtggtggtgggcggcatcgtggaggccgccctgggcgccaacgtgaccatcagatgccccgtgaagggcgtgccccagcccaacatcacctggctgaagagaggcggcagcctgagcggcaacgtgagcctgctgttcaacggcagcctgctgctgcagaacgtgagcctggagaacgagggcacctacgtgtgcatcgccaccaacgccctgggcaaggccgtggccaccagcgtgctgcacctgctggagagaagatggcccgagagcagaatcgtgttcctgcagggccacaagaagtacatcctgcaggccaccaacaccagaaccaacagcaacgaccccaccggcgagccccccccccaggagcccttctgggagcccggcaactggagccactgcagcgccacctgcggccacctgggcgccagaatccagagaccccagtgcgtgatggccaacggccaggaggtgagcgaggccctgtgcgaccacctgcagaagcccctggccggcttcgagccctgcaacatcagagactgccccgccagatggttcaccagcgtgtggagccagtgcagcgtgagctgcggcgagggctaccacagcagacaggtgacctgcaagagaaccaaggccaacggcaccgtgcaggtggtgagccccagagcctgcgcccccaaggacagacccctgggcagaaagccctgcttcggccacccctgcgtgcagtgggagcccggcaacagatgccccggcagatgcatgggcagagccgtgagaatgcagcagagacacaccgcctgccagcacaacagcagcgacagcaactgcgacgacagaaagagacccaccctgagaagaaactgcaccagcggcgcctgcgacgtgtgctggcacaccggcccctggaagccctgcaccgccgcctgcggcagaggcttccagagcagaaaggtggactgcatccacaccagaagctgcaagcccgtggccaagagacactgcgtgcagaagaagaagcccatcagctggagacactgcctgggccccagctgcgacagagactgcaccgacaccacccactactgcatgttcgtgaagcacctgaacctgtgcagcctggacagatacaagcagagatgctgccagagctgccaggagggctag

SEQ ID NO: 265507 - protein, 343 aa, Artificial Sequence
  derived and/or modified sequence
MASNSSDVKEFLAKAKEDFLKKWESPAQNTAHLDQFERIKTLGTGSFGRVMLVKHKETGNHYAMKILDKQKVVKLKQIEHTLNEKRILQAVNFPFLVKLEFSFKDNSNLYMVMEYVPGGEMFSHLRRIGRFSEPHARFYAAQIVLTFEYLHSLDLIYRDLKPENLLIDQQGYIQVTDFGFAKRVKGRTWTLCGTPEYLAPEIILSKGYNKAVDWWALGVLIYEMAAGYPPFFADQPIQIYEKIVSGKVRFPSHFSSDLKDLLRNLLQVDLTKRFGNLKNGVNDIKNHKWFATTDWIAIYQRKVEAPFIPKFKGPGDTSNFDDYEEEEIRVSINEKCGKEFSEF

SEQ ID NO: 265508 - DNA, 1032 bp, Artificial Sequence
  derived and/or modified sequence
atggcaagcaacagcagcgatgtgaaggaattcctagccaaggctaaggaagactttctcaagaagtgggagagcccagctcaaaataccgcacacctggaccagttcgagagaattaagacactaggcaccggaagctttggccgtgtgatgttggttaagcataaagaaacgggcaatcactatgctatgaagattttggataagcagaaggtggtgaagcttaaacaaatcgagcacaccctgaatgagaagcgcatattgcaggccgtgaatttccccttcctggtgaaactcgagttttccttcaaggataacagcaatctctacatggtcatggaatatgtcccggggggggaaatgtttagccacctgcgtcggattgggcggttcagtgagcctcatgcgaggttctacgccgcgcaaattgtgcttacattcgaatatctccattcattggacctgatctatagggatctaaagcctgagaatctgctcatagatcagcaagggtacatccaggtgaccgattttggctttgccaaacgggtgaagggacgaacatggacattatgtggcacccccgagtatctggctcctgagataatattgtctaagggctataacaaggccgtcgactggtgggccctgggcgtgttgatctatgaaatggccgccgggtatccacctttctttgcggaccagcccattcagatttacgagaagatcgtctcgggtaaagtccggttcccctctcatttcagtagtgatttgaaagacctgctgcgaaatctgttgcaggtagatctaacaaagcgatttggtaatctgaaaaatggagttaacgatataaaaaatcacaagtggttcgctacaacggattggatcgccatttaccaaagaaaggtcgaggcccctttcattccgaaattcaaagggcccggagacacgagcaactttgatgattacgaagaagaggagattcgggtgagtataaatgaaaaatgcgggaaggaattttccgagttttag

SEQ ID NO: 265509 - DNA, 1032 bp, Artificial Sequence
  derived and/or modified sequence
atggcctctaactcgagtgacgttaaagagtttttggcgaaggcgaaagaggatttcctgaaaaagtgggagtcgcccgctcaaaacacagctcatcttgatcagttcgaaaggattaaaacactggggactggctcttttgggcgcgtgatgctcgtgaaacacaaagagacagggaaccattatgctatgaaaattctggacaaacagaaggttgtgaaattaaagcagattgagcacaccctgaacgaaaagcggatcctgcaggccgtgaatttcccttttttagtcaagttagagttctcatttaaagacaatagtaacttatatatggtaatggagtacgtgcccggaggggagatgttcagccacctgaggcggatcggtaggttctcagagccccacgcccgattctatgctgctcagatcgttctgacgtttgagtatctgcacagcctggatctgatctaccgtgatctaaaaccagagaaccttctgatagaccaacagggttatattcaggtgaccgattttggattcgctaagcgggtcaaaggtcggacgtggactctctgcggcacccccgagtatcttgctcccgagattatattaagcaaggggtacaataaagctgtggactggtgggctctaggagtgctcatttacgagatggccgccggatatccgcctttttttgccgaccagcctatccaaatatatgaaaagatagtgagcggtaaagttcggtttcctagccacttcagttccgacctaaaggatctcctgcgcaatcttctacaggtggatctgacaaaacgcttcggtaacctgaaaaatggcgtcaatgatattaaaaatcataaatggtttgccacaacagattggatcgccatttaccaacggaaggtggaagcaccctttattccaaaatttaaaggacccggagatacctccaatttcgacgattacgaggaagaagaaatcagagttagcattaatgagaaatgtggcaaagaatttagcgaattttag

SEQ ID NO: 265510 - DNA, 693 bp, Artificial Sequence
  derived and/or modified sequence
atgctggtgaaacataaggaaaccggcaaccactacgcaatgaaaatattggataaacagaaagtggtgaagctgaagcagatcgagcatacattgaacgagaaacggatactgcaggcagtgaatttcccattcctggtaaaactggagttctcctttaaagacaattccaacctgtatatggtgatggaatacgtacctggcggtgagatgttcagtcatctcagacggatcggccgattcagcgaaccacatgcccgtttctatgctgcgcagattgtactgacatttgaatacctgcacagcttagacctgatttacagggacctaaaaccagagaatctcctcatcgaccagcaggggtatatacaagtaaccgactttggcttcgcaaagagggtgaaggggaggacatggactttatgcggaacccctgagtacctggctcctgagattattctttctaaggggtataacaaggcagttgattggtgggctctgggagtgcttatatacgagatggccgccgggtacccccccttttttgctgaccagccgatccagatctatgagaaaattgtgtctggcaaagttcggagcggctgcggtgataccgcccttgaagagactgataggtctctgctgacacatcccatcccttggggcgcactcttagtggtaaggattatttag

SEQ ID NO: 265511 - DNA, 1032 bp, Artificial Sequence
  derived and/or modified sequence
atggccagcaacagcagtgatgtgaaggagttcctggccaaggccaaggaggacttcctgaagaagtgggagagccctgcccagaacacagcccacctggaccagtttgagcgcatcaagaccctgggcaccggcagctttggccgggtgatgctggtgaagcacaaggagaccggcaaccactacgccatgaagatcctggacaagcagaaggtggtgaagctgaagcagatcgagcacaccctgaatgagaagaggatcctgcaggccgtgaacttccccttcctggtgaagctggagttctccttcaaggacaacagcaacctgtacatggtgatggagtatgtgcctggaggagagatgttcagccacctgcggcgcatcggccgcttcagcgagccccacgcccgcttctacgccgcccagatcgtgctgacctttgagtacctgcacagcctggacctgatctacagagacctgaagccagagaacctgctgattgaccagcagggctacatccaggtgacagactttggatttgccaagagggtgaagggccgcacctggaccctgtgtggcaccccagagtacctggcccctgagatcatcctgagcaagggctacaacaaggctgtggactggtgggccctgggcgtgctgatctatgagatggccgccggctacccacccttctttgctgaccagcccatccagatctatgagaagatcgtgtctgggaaggtgcgcttccccagccacttcagcagtgacctgaaggacctgctgaggaacctgctgcaggtggacctgaccaagcgcttcggcaacctgaagaatggagtgaatgacatcaagaaccacaagtggtttgccaccacagactggatcgccatctaccagaggaaggtggaggcccccttcatccccaagttcaagggccctggggacaccagcaactttgatgattatgaggaggaggagatccgggtgtccatcaatgaaaaatgtgggaaggagttcagcgagttctag

SEQ ID NO: 265512 - DNA, 693 bp, Artificial Sequence
  derived and/or modified sequence
atgctggtgaagcacaaggagaccggcaaccactacgccatgaagatcctggacaagcagaaggtggtgaagctgaagcagatcgagcacaccctgaatgagaagaggatcctgcaggccgtgaacttccccttcctggtgaagctggagttctccttcaaggacaacagcaacctgtacatggtgatggagtatgtgcctggaggagagatgttcagccacctgcggcgcatcggccgcttcagcgagccccacgcccgcttctacgccgcccagatcgtgctgacctttgagtacctgcacagcctggacctgatctacagagacctgaagccagagaacctgctgattgaccagcagggctacatccaggtgacagactttggatttgccaagagggtgaagggccgcacctggaccctgtgtggcaccccagagtacctggcccctgagatcatcctgagcaagggctacaacaaggctgtggactggtgggccctgggcgtgctgatctatgagatggccgccggctacccacccttctttgctgaccagcccatccagatctatgagaagatcgtgtctgggaaggtgcgcagcggctgtggggacacagccctggaggagacagacaggagcctgctgacccaccccatcccctggggcgccctgctggtggtgcgcatcatctag

SEQ ID NO: 265513 - DNA, 1032 bp, Artificial Sequence
  derived and/or modified sequence
atggccagcaacagcagcgacgtgaaggagttcctggccaaggccaaggaagactttctgaaaaagtgggaatctcctgctcaaaacactgcccaccttgatcagttcgagagaataaagacgttaggcacagggtcctttgggagggtgatgctggtgaaacacaaggagaccggaaaccactatgccatgaagatcctcgataagcagaaagtagtcaagcttaagcagatcgagcacactctcaatgaaaagaggattttacaggctgtgaattttccattcctggtgaagctagaattcagtttcaaggataactcaaacttatatatggtcatggagtatgtcccaggtggcgaaatgttttcccacctgaggcggatcgggaggttctctgaacctcacgctaggttctacgcagcacagattgtgttgacattcgagtatctacattcactggatctgatctatagagacctaaagccagaaaaccttctgattgatcaacaaggctacattcaggtgaccgacttcgggttcgctaagcgtgtgaaaggcagaacatggaccctatgtggcactcctgaatacctcgctcccgagatcattctctctaaaggctataataaggctgtggactggtgggcactgggtgtgctgatctacgaaatggccgccggctatcctccattcttcgcggatcagcccatccagatatacgagaagattgtctccggtaaggttaggtttccatcccactttagctctgacctcaaggacctccttaggaaccttcttcaggtggacctgacaaagcggtttggaaatttgaagaacggagtaaatgacatcaaaaaccataaatggtttgccactaccgactggattgcaatctaccagagaaaagttgaagccccctttatcccaaaatttaagggtcccggcgatacctcaaacttcgatgattacgaagaggaagaaattagagtctcaatcaatgaaaaatgcggtaaggagttttcagagttctag

SEQ ID NO: 265514 - DNA, 1032 bp, Artificial Sequence
  derived and/or modified sequence
atggccagcaacagcagcgacgtgaaggagttcctggccaaggccaaagaggattttctcaagaagtgggagagccccgcacaaaacacagcccatctggaccagttcgagcggattaaaaccttagggacgggatcgtttgggcgcgtaatgcttgttaagcataaggagaccggaaaccactatgctatgaagatattagacaaacagaaggtcgtgaaactgaaacagattgagcataccctcaacgaaaagaggatcctgcaggctgtgaactttccctttttagtcaaactggagttttcattcaaggataattcaaatctgtacatggtcatggagtacgtcccgggcggcgagatgttttcgcatctcagacgcattggccgtttttcagagcctcatgccagattctacgcagcgcagatagtcttgaccttcgagtacctgcacagtctcgacctgatttacagagacttaaagccagagaatctcctaattgaccagcagggctacatccaggtgacagattttgggtttgccaagcgcgtgaagggtcggacttggacattgtgcggaacacctgaatatctcgcccccgagatcattctctccaagggatataacaaagcggtagattggtgggcactgggtgtgctcatatacgaaatggccgccggctaccccccattttttgcggatcaacccatccaaatctacgaaaagattgtgtcgggcaaggttaggtttccttcacattttagctctgatctgaaagatcttctacggaaccttctgcaagtggatctgaccaaaaggtttggaaatcttaagaacggggtgaatgacattaaaaaccataaatggttcgctaccaccgactggattgccatttatcaacgaaaggttgaagcaccatttatccctaagttcaaggggccgggagatacatctaattttgatgactatgaggaagaggagatcagagtctcaatcaatgaaaagtgtggtaaggaattttcagagttctag

SEQ ID NO: 265515 - DNA, 693 bp, Artificial Sequence
  derived and/or modified sequence
atgctggtgaagcacaaggagaccggcaaccactacgccatgaagatattagacaagcaaaaggtagtgaaattgaaacagatcgaacataccctgaatgagaagagaatactgcaggccgtcaatttcccattcctagttaagctcgaattcagttttaaggacaactcaaacttgtacatggtcatggaatacgtgcccggaggcgagatgttcagccaccttagacgtattggccgcttcagcgaaccccatgctcgattctatgcagctcagattgtgctaacttttgaatacctgcacagtttagatctcatctatcgtgatctcaaaccggaaaacctcctcattgaccagcaaggatacattcaggttacggactttgggtttgcaaaacgtgtcaaaggcaggacctggacactttgtggcactccggagtatctggctcccgaaatcattctcagtaagggatacaacaaagctgttgattggtgggcactgggagttttaatttatgaaatggccgccggttatccaccctttttcgctgatcaacctatacaaatctatgagaagatcgtgagcggtaaggtgcggagtggatgtggcgacaccgcactcgaagagactgatcggagcctgctgacgcaccctatcccatggggggccctgttggttgttcggataatatag

SEQ ID NO: 265516 - DNA, 1032 bp, Artificial Sequence
  derived and/or modified sequence
atggcttctaactcgtccgatgttaaagaattccttgcgaaagccaaggaagatttcttgaaaaagtgggagtccccggcacaaaacacagcccacctcgatcagttcgagagaatcaagactctcggcacgggcagttttggacgggtgatgctggtcaaacataaggaaactggtaaccactacgcgatgaagattctggacaagcagaaggtagttaagctgaagcagattgaacatacattgaacgaaaaacgtatcctgcaggcggttaatttccctttcctggtgaagttggagttctctttcaaggataatagtaacctgtacatggtgatggagtacgtgcccggtggtgagatgttctcacacctcaggcgtatcggacgtttttctgaaccccacgcaaggttctacgcagcccagattgttctgacatttgaatacctacactccttagatctcatataccgcgatctaaagcccgagaatctgctcatcgaccaacagggatatatacaagtgaccgattttgggttcgcgaagagagttaaaggcagaacctggaccctttgtgggacaccagaatatctcgcccctgagataatcttatcaaaggggtacaataaggctgtggactggtgggctctgggggtcctgatctatgagatggcagcgggttatcctcccttcttcgccgatcagcctatacagatttatgaaaaaatcgtgtcgggtaaggtcagatttcctagccatttctctagcgatttgaaggacctcctcagaaatctgttacaagtggacttaacaaagcggtttgggaacttgaagaatggcgttaacgatattaaaaaccacaagtggttcgctactacagattggatcgccatttaccagcgcaaggtggaggctcctttcatacctaaatttaagggcccaggcgatacatctaattttgacgactacgaggaggaagagatacgcgtatcgatcaatgagaaatgcggaaaggaattctctgagttctag

SEQ ID NO: 265517 - DNA, 1032 bp, Artificial Sequence
  derived and/or modified sequence
atggccagtaattcgtccgacgtcaaagagtttctagcaaaagccaaagaagactttctcaagaagtgggaatctcccgctcagaatacagctcatctcgaccagttcgaaagaatcaagacattaggcacaggttcttttggcagggtgatgctggtgaagcataaggagaccggaaaccactatgccatgaagatcctggataaacaaaaagttgtgaaactgaaacagatcgaacacaccctaaacgagaagagaatcctgcaagccgtaaatttccccttcctagttaagcttgagtttagtttcaaggataattccaatctgtatatggtaatggaatacgtgcctgggggagagatgttttctcacttacggaggatcggacgtttttctgaacctcacgcccgtttttatgctgcccaaattgtgctaacttttgagtatctacactccctcgatttaatctaccgagatctaaaaccagaaaatctgctgatcgaccagcaaggctacatccaagttacagattttggttttgccaaacgcgtcaagggtagaacctggacattgtgcggaactcctgagtatctggcccctgagattatccttagcaaaggttataataaggcagtagactggtgggccttgggggtcctgatctatgagatggcagcaggctaccctcctttcttcgctgatcagccaatccagatctacgagaagatcgtctccggaaaggtgcggttcccgtcccacttttcctccgatttaaaggatttactccgcaacttgcttcaggtggaccttactaaaaggtttggaaacctcaagaacggggtgaacgatataaagaaccacaagtggtttgcgacaaccgattggattgctatctaccagcgaaaagtggaggcaccttttatcccaaaattcaagggacctggagacacttccaacttcgacgactatgaggaagaagaaatccgtgtcagtattaatgagaagtgtgggaaggagtttagcgaattctag

SEQ ID NO: 265518 - DNA, 693 bp, Artificial Sequence
  derived and/or modified sequence
atgctcgtgaaacacaaggagaccggaaatcactatgctatgaaaatcctggacaaacagaaggttgtgaagctgaagcagatagagcataccctcaacgaaaagcgcatccttcaggctgtgaacttcccttttcttgttaaactagagttctccttcaaggacaattcaaatctttatatggtcatggagtacgtccctggaggcgagatgttcagccacctgaggcggattgggagattctccgaacctcacgctcgcttttatgcggctcagatagtgctcactttcgaatatctgcacagtcttgacttgatttatagggacttgaagccagagaacctgcttatcgaccagcaggggtacatccaggtgacagattttggcttcgccaaacgtgtgaagggcagaacttggacgctctgtggaactccagagtacctcgctcctgaaatcatcctttcaaaagggtacaacaaggccgtggattggtgggccttaggcgtactcatctatgagatggctgccggttatcctccgttcttcgccgatcagccaattcagatctacgaaaaaatcgtatccggtaaggttagaagcggatgtggagacaccgcactggaggaaactgatcgatccctccttactcaccccattccctggggggctttgctggtggtgcgtataatctag

SEQ ID NO: 265519 - DNA, 1127 bp, Artificial Sequence
  derived and/or modified sequence
gtagtgccggtgccctgagaacaggactgagtgatggcttccaactccagcgatgtgaaagaattcttagccaaagccaaagaagattttcttaaaaaatgggaaagtcccgctcagaacacagcccacttggatcagtttgaacgaatcaagaccctcggcacgggctccttcgggcgggtgatgctggtgaaacacaaggagaccgggaaccactatgccatgaagatcctcgacaaacagaaggtggtgaaactgaaacagatcgaacacaccctgaatgaaaagcgcatcctgcaagctgtcaactttccgttcctcgtcaaactcgagttctccttcaaggacaactcaaacttatacatggtcatggagtacgtgcccggcggggagatgttctcacacctacggcggatcggaaggttcagtgagccccatgcccgtttctacgcggcccagatcgtcctgacctttgagtatctgcactcgctggatctcatctacagggacctgaagccggagaatctgctcattgaccagcagggctacattcaggtgacagacttcggtttcgccaagcgcgtgaagggccgcacttggaccttgtgcggcacccctgagtacctggcccctgagattatcctgagcaaaggctacaacaaggccgtggactggtgggccctgggggttcttatctatgaaatggccgctggctacccgcccttcttcgcagaccagcccatccagatctatgagaagatcgtctctgggaaggtgcgcttcccttcccacttcagctctgacttgaaggacctgctgcggaacctcctgcaggtagatctcaccaagcgctttgggaacctcaagaatggggtcaacgatatcaagaaccacaagtggtttgccacaactgactggattgccatctaccagaggaaggtggaagctcccttcataccaaagtttaaaggccctggggatacgagtaactttgacgactatgaggaagaagaaatccgggtctccatcaatgagaagtgtggcaaggagttttctgagttttaggggcatgcctgtgcccccatgggttttcttttttcttttttcttttttttggtcgggggggt

SEQ ID NO: 265520 - DNA, 2472 bp, Artificial Sequence
  derived and/or modified sequence
ggtgccctgagaacaggactgagtgatggcttccaactccagcgatgtgaaagaattcttagccaaagccaaagaagattttcttaaaaaatgggaaagtcccgctcagaacacagcccacttggatcagtttgaacgaatcaagaccctcggcacgggctccttcgggcgggtgatgctggtgaaacacaaggagaccgggaaccactatgccatgaagatcctcgacaaacagaaggtggtgaaactgaaacagatcgaacacaccctgaatgaaaagcgcatcctgcaagctgtcaactttccgttcctcgtcaaactcgagttctccttcaaggacaactcaaacttatacatggtcatggagtacgtgcccggcggggagatgttctcacacctacggcggatcggaaggttcagtgagccccatgcccgtttctacgcggcccagatcgtcctgacctttgagtatctgcactcgctggatctcatctacagggacctgaagccggagaatctgctcattgaccagcagggctacattcaggtgacagacttcggtttcgccaagcgcgtgaagggccgcacttggaccttgtgcggcacccctgagtacctggcccctgagattatcctgagcaaaggctacaacaaggccgtggactggtgggccctgggggttcttatctatgaaatggccgctggctacccgcccttcttcgcagaccagcccatccagatctatgagaagatcgtctctgggaaggtgcgcttcccttcccacttcagctctgacttgaaggacctgctgcggaacctcctgcaggtagatctcaccaagcgctttgggaacctcaagaatggggtcaacgatatcaagaaccacaagtggtttgccacaactgactggattgccatctaccagaggaaggtggaagctcccttcataccaaagtttaaaggccctggggatacgagtaactttgacgactatgaggaagaagaaatccgggtctccatcaatgagaagtgtggcaaggagttttctgagttttaggggcatgcctgtgcccccatgggttttcttttttcttttttcttttttttggtcgggggggtgggagggttggattgaacagccagagggccccagagttccttgcatctaatttcacccccaccccaccctccagggttagggggagcaggaagcccagataatcagagggacagaaacaccagctgctccccctcatccccttcaccctcctgccccctctcccacttttcccttcctctttccccacagccccccagcccctcagccctcccagcccacttctgcctgttttaaacgagtttctcaactccagtcagaccaggtcttgctggtgtatccagggacagggtatggaaagaggggctcacgcttaactccagcccccacccacacccccatcccacccaaccacaggccccacttgctaagggcaaatgaacgaagcgccaaccttcctttcggagtaatcctgcctgggaaggagagatttttagtgacatgttcagtgggttgcttgctagaatttttttaaaaaaacaacaatttaaaatcttatttaagttccaccagtgcctccctccctccttcctctactcccacccctcccatgtccccccattcctcaaatccattttaaagagaagcagactgactttggaaagggaggcgctggggtttgaacctccccgctgctaatctcccctgggcccctccccggggaatcctctctgccaatcctgcgagggtctaggcccctttaggaagcctccgctctctttttccccaacagacctgtcttcacccttgggctttgaaagccagacaaagcagctgcccctctccctgccaaagaggagtcatcccccaaaaagacagagggggagccccaagcccaagtctttcctcccagcagcgtttccccccaactccttaattttattctccgctagattttaacgtccagccttccctcagctgagtggggagggcatccctgcaaaagggaacagaagaggccaagtccccccaagccacggcccggggttcaaggctagagctgctggggaggggctgcctgttttactcacccaccagcttccgcctcccccatcctgggcgcccctcctccagcttagctgtcagctgtccatcacctctcccccactttctcatttgtgcttttttctctcgtaatagaaaagtggggagccgctggggagccaccccattcatccccgtatttccccctctcataacttctccccatcccaggaggagttctcaggcctggggtggggccccgggtgggtgcgggggcgattcaacctgtgtgctgcgaaggacgagacttcctcttgaacagtgtgctgttgtaaacatatttgaaaactattaccaataaagttttgttt

SEQ ID NO: 265521 - DNA, 1524 bp, Artificial Sequence
  derived and/or modified sequence
ctctgcaaaccttggctagcttggagcaggtacctttaaaagcttctgtggcaaccagctcctcctccctggtcccctgaggccatcccaaggaagctgacttagaggctctgcgttttcctggtttctcagcaaaaggaagattccagggagagcccaagggggctggggatggatctgggatcaggcagcagccagggtggggacttggagaccaccttccagctgtggctgcagctgctcctctgggcccacctggctgtacgtttcctgggctacctgcaccgcaccttccgggggcctaagccacagccagcaccctgagcctccctggccagggggcagaaggccgccagatcaccccatcccacccaccctttattctaccctttcctggaagagacaggaagcagagtgaaagaattcttagccaaagccaaagaagattttcttaaaaaatgggaaagtcccgctcagaacacagcccacttggatcagtttgaacgaatcaagaccctcggcacgggctccttcgggcgggtgatgctggtgaaacacaaggagaccgggaaccactatgccatgaagatcctcgacaaacagaaggtggtgaaactgaaacagatcgaacacaccctgaatgaaaagcgcatcctgcaagctgtcaactttccgttcctcgtcaaactcgagttctccttcaaggacaactcaaacttatacatggtcatggagtacgtgcccggcggggagatgttctcacacctacggcggatcggaaggttcagtgagccccatgcccgtttctacgcggcccagatcgtcctgacctttgagtatctgcactcgctggatctcatctacagggacctgaagccggagaatctgctcattgaccagcagggctacattcaggtgacagacttcggtttcgccaagcgcgtgaagggccgcacttggaccttgtgcggcacccctgagtacctggcccctgagattatcctgagcaaaggctacaacaaggccgtggactggtgggccctgggggttcttatctatgaaatggccgctggctacccgcccttcttcgcagaccagcccatccagatctatgagaagatcgtctctgggaaggtgaggtccggatgtggggacacagccctggaagaaacagaccgttccctgctcacccatcctattccctggggagccctgcttgttgtcagaataatctagaagttccttaagtcaggccaggtggtgaagctggacgcgccggccacactgaggccaacacctcaagcccccttgctgtccagccccaaccccgcggttccagaatcccatgggcttccaaaatcccgagcctcacgggaacatcttggccacagaacacaaaccgccctgccagacgaccctccttttcgctcctcatcccagttagtgtgagttttcgcaaattccaaggcagaaaaacgaatgtatttggttcctgttcccaggtgctgtccatagcctcaccca

SEQ ID NO: 265522 - DNA, 1032 bp, Artificial Sequence
  derived and/or modified sequence
atggccagcaacagcagcgacgtgaaggagttcctggccaaggccaaggaggacttcctgaagaagtgggagagccccgcccagaacaccgcccacctggaccagttcgagagaatcaagaccctgggcaccggcagcttcggcagagtgatgctggtgaagcacaaggagaccggcaaccactacgccatgaagatcctggacaagcagaaggtggtgaagctgaagcagatcgagcacaccctgaacgagaagagaatcctgcaggccgtgaacttccccttcctggtgaagctggagttcagcttcaaggacaacagcaacctgtacatggtgatggagtacgtgcccggcggcgagatgttcagccacctgagaagaatcggcagattcagcgagccccacgccagattctacgccgcccagatcgtgctgaccttcgagtacctgcacagcctggacctgatctacagagacctgaagcccgagaacctgctgatcgaccagcagggctacatccaggtgaccgacttcggcttcgccaagagagtgaagggcagaacctggaccctgtgcggcacccccgagtacctggcccccgagatcatcctgagcaagggctacaacaaggccgtggactggtgggccctgggcgtgctgatctacgagatggccgccggctacccccccttcttcgccgaccagcccatccagatctacgagaagatcgtgagcggcaaggtgagattccccagccacttcagcagcgacctgaaggacctgctgagaaacctgctgcaggtggacctgaccaagagattcggcaacctgaagaacggcgtgaacgacatcaagaaccacaagtggttcgccaccaccgactggatcgccatctaccagagaaaggtggaggcccccttcatccccaagttcaagggccccggcgacaccagcaacttcgacgactacgaggaggaggagatcagagtgagcatcaacgagaagtgcggcaaggagttcagcgagttctag

SEQ ID NO: 265523 - DNA, 693 bp, Artificial Sequence
  derived and/or modified sequence
atgctggtgaagcacaaggagaccggcaaccactacgccatgaagatcctggacaagcagaaggtggtgaagctgaagcagatcgagcacaccctgaacgagaagagaatcctgcaggccgtgaacttccccttcctggtgaagctggagttcagcttcaaggacaacagcaacctgtacatggtgatggagtacgtgcccggcggcgagatgttcagccacctgagaagaatcggcagattcagcgagccccacgccagattctacgccgcccagatcgtgctgaccttcgagtacctgcacagcctggacctgatctacagagacctgaagcccgagaacctgctgatcgaccagcagggctacatccaggtgaccgacttcggcttcgccaagagagtgaagggcagaacctggaccctgtgcggcacccccgagtacctggcccccgagatcatcctgagcaagggctacaacaaggccgtggactggtgggccctgggcgtgctgatctacgagatggccgccggctacccccccttcttcgccgaccagcccatccagatctacgagaagatcgtgagcggcaaggtgagaagcggctgcggcgacaccgccctggaggagaccgacagaagcctgctgacccaccccatcccctggggcgccctgctggtggtgagaatcatctag

SEQ ID NO: 265524 - DNA, 939 bp, Artificial Sequence
  derived and/or modified sequence
atgcccatggacaccagcgtgtacgagagcccctacagcgaccccgaggagctgaaggacaagaagctgttcctgaagagagacaacctgctgatcgccgacatcgagctgggctgcggcaacttcggcagcgtgagacagggcgtgtacagaatgagaaagaagcagatcgacgtggccatcaaggtgctgaagcagggcaccgagaaggccgacaccgaggagatgatgagagaggcccagatcatgcaccagctggacaacccctacatcgtgagactgatcggcgtgtgccaggccgaggccctgatgctggtgatggagatggccggcggcggccccctgcacaagttcctggtgggcaagagagaggagatccccgtgagcaacgtggccgagctgctgcaccaggtgagcatgggcatgaagtacctggaggagaagaacttcgtgcacagagacctggccgccagaaacgtgctgctggtgaacagacactacgccaagatcagcgacttcggcctgagcaaggccctgggcgccgacgacagctactacaccgccagaagcgccggcaagtggcccctgaagtggtacgcccccgagtgcatcaacttcagaaagttcagcagcagaagcgacgtgtggagctacggcgtgaccatgtgggaggccctgagctacggccagaagccctacaagaagatgaagggccccgaggtgatggccttcatcgagcagggcaagagaatggagtgcccccccgagtgcccccccgagctgtacgccctgatgagcgactgctggatctacaagtgggaggacagacccgacttcctgaccgtggagcagagaatgagagcctgctactacagcctggccagcaaggtggagggcccccccggcagcacccagaaggccgaggccgcctgcgcctag

SEQ ID NO: 265525 - DNA, 939 bp, Artificial Sequence
  derived and/or modified sequence
atgcctatggacacctccgtgtatgaaagcccctattccgacccagaggagctgaaggacaagaagctttttctgaaacgagacaacctacttattgctgatatcgaactgggctgcggcaacttcggaagtgtgcgccaaggggtatatagaatgcggaagaaacagattgatgtggcgatcaaggtgctgaagcagggtacggagaaagctgataccgaggagatgatgcgggaggcccagataatgcaccagcttgataacccatacattgttcgactgatcggagtatgtcaggcagaagcccttatgctggtcatggagatggctggaggaggtcccctgcataagtttctggtcggcaaacgggaagaaattccggttagcaatgtagccgaattactgcaccaagtgagtatgggtatgaagtatttggaggaaaagaactttgtgcacagggatctggccgcccgcaacgtcctgctggtcaataggcattacgctaaaatttccgacttcggattgagtaaagccctcggagcagacgactcctactataccgccaggagcgctggcaaatggccactaaagtggtatgctccagagtgcataaacttccggaaattttcctcgaggagtgatgtgtggtcttacggtgtgaccatgtgggaggctctctcctacggacaaaagccatataagaagatgaagggcccagaggtgatggcattcatagaacaagggaagcgtatggagtgcccaccagaatgtcctccagaattgtacgcgctcatgtcagattgttggatctataaatgggaagaccgaccagacttcctgacggtggaacagcggatgcgcgcttgctattacagtttggctagcaaggtggaggggccgcctggtagcacccagaaggctgaagctgcttgtgcctag

SEQ ID NO: 265526 - DNA, 939 bp, Artificial Sequence
  derived and/or modified sequence
atgcccatggacacctctgtgtatgagagcccctacagcgaccctgaggagctgaaggacaagaagctgttcctgaagagggacaacctgctgattgctgacatcgagctgggctgcggcaactttggatctgtgcggcagggcgtgtacaggatgaggaagaagcagattgatgtggccatcaaggtgctgaagcagggcacagagaaggctgacacagaggagatgatgagggaggcccagatcatgcaccagctggacaacccctacatcgtgcggctgattggagtgtgccaggccgaggccctgatgctggtgatggagatggccggcggcggccccctgcacaagttcctggtgggcaagcgggaggagatccctgtgtccaatgtggccgagctgctgcaccaggtgtccatgggcatgaagtacctggaggagaagaactttgtgcaccgggacctggccgccagaaatgtgctgctggtgaacagacactacgccaagatcagtgactttggcctgagcaaggccctgggcgcagatgacagctactacacagcccggtctgctgggaagtggcccctgaagtggtacgcccctgagtgcatcaacttcaggaagttcagcagcagaagtgatgtgtggagctatggagtgaccatgtgggaggccctgtcctatggccagaagccctacaagaagatgaagggccctgaggtgatggccttcatcgagcagggcaagaggatggagtgccccccagagtgccccccagagctgtatgccctgatgtctgactgctggatctacaagtgggaggacagaccagacttcctgactgtggagcagaggatgagggcctgctactacagcctggccagcaaggtggagggccccccaggcagcacccagaaggccgaggccgcctgtgcctag

SEQ ID NO: 265527 - DNA, 939 bp, Artificial Sequence
  derived and/or modified sequence
atgcccatggacaccagcgtgtacgagagcccctacagcgaccccgaagagttgaaggataaaaagctctttctcaagagagacaaccttctcatcgccgatattgaactgggctgcggaaacttcggcagcgtaaggcagggcgtgtaccgaatgaggaaaaagcaaatcgatgtagcaataaaggttcttaagcagggaacagaaaaggctgatacagaagaaatgatgagggaggctcaaataatgcaccagctcgataacccatatattgtgcgcctgattggggtttgccaggctgaggcgcttatgttggttatggaaatggctggaggtggccctttgcataagttcctggtcggcaaacgcgaggaaatcccggtctccaacgtcgctgagttacttcaccaagtgtctatggggatgaagtatcttgaggagaaaaattttgtccaccgtgatctcgctgcacgaaacgtcctccttgtcaaccgacactatgcaaagattagcgactttggactatcaaaggccctgggcgccgatgacagctactacacagctcggtccgccggcaagtggccactaaaatggtacgctccagagtgtattaatttccgaaaattctccagtaggagtgacgtttggagctatggtgtcactatgtgggaggcgttatcttatggacaaaagccttataaaaaaatgaaaggccccgaggtgatggcgttcattgaacaggggaagaggatggaatgtcctccggaatgcccccctgaactctacgcacttatgtcagattgttggatctacaaatgggaagatagaccagacttcttaactgtcgaacagagaatgagggcctgttattacagcctggctagtaaggtcgaagggcctccaggatcgacacagaaggcagaagccgcgtgtgcctag

SEQ ID NO: 265528 - DNA, 939 bp, Artificial Sequence
  derived and/or modified sequence
atgccaatggacacgagtgtctacgagtcaccttacagtgaccctgaggagctgaaggacaagaagctgttccttaaacgagacaacctgctgattgctgacatcgaattaggctgtggtaatttcggctctgtgcggcaaggcgtataccgaatgaggaagaaacagattgatgtggcaattaaggtgctgaaacaggggactgaaaaggcagacaccgaagagatgatgcgggaagctcagatcatgcaccagctagataacccctacatcgtacgactcatcggtgtgtgccaagcagaagccctaatgcttgtaatggaaatggccggtggtgggccactgcacaaattcttggtgggcaaacgtgaggagatccctgtctctaatgtagcagagcttcttcaccaggtgtctatggggatgaagtatctggaagagaagaattttgtccatcgggatctggccgcacgcaatgtgctgctggttaataggcactatgccaagatatcagacttcggtcttagcaaagctcttggggcagatgactcttattacaccgctcgcagcgctggtaagtggccactcaagtggtacgcgcctgagtgcattaacttcagaaagttcagcagccgctccgatgtctggtcctacggggttaccatgtgggaagccctgtcctatggtcagaagccatataaaaaaatgaagggcccagaggtgatggcctttattgagcagggcaagcgaatggaatgccctcccgagtgtcccccagagctctacgccctcatgtccgactgctggatatacaagtgggaggacaggcctgattttttaacagtggagcagcgaatgagggcttgttactactctttagcaagcaaggtggaaggccctccaggttcaacgcaaaaagctgaggctgcctgcgcatag

SEQ ID NO: 265529 - protein, 392 aa, Artificial Sequence
  derived and/or modified sequence
MEDLDQSPLVSSSDSPPRPQPAFKYQFVREPEDEEEEEEEEEEDEDEDLEELEVLERKPAAGLSAAPVPTAPAAGAPLMDFGNDFVPPAPRGPLPAAPPVAPERQPSWDPSPVSSTVPAPSPLSAAAVSPSKLPEDDEPPARPPPPPPASVSPQAEPVWTPPAPAPAAPPSTPAAPKRRGSSGSVDETLFALPAASEPVIRSSAVVDLLYWRDIKKTGVVFGASLFLLLSLTVFSIVSVTAYIALALLSVTISFRIYKGVIQAIQKSDEGHPFRAYLESEVAISEELVQKYSNSALGHVNCTIKELRRLFLVDDLVDSLKFAVLMWVFTYVGALFNGLTLLILALISLFSVPVIYERHQAQIDHYLGLANKNVKDAMAKIQAKIPGLKRKAE

SEQ ID NO: 265530 - DNA, 1179 bp, Artificial Sequence
  derived and/or modified sequence
atggaagacctggaccagtcgcccctggtctcctcctccgactccccacctcgcccccagcctgccttcaaataccagtttgtcagggagcccgaggacgaggaagaggaggaggaagaggaggaagaggatgaagacgaagacctggaggagctagaggtcctggaacgcaaacctgctgctggcctgagtgccgcaccagtaccgactgcgcctgcggccggcgcaccactgatggatttcggcaatgactttgtacctcccgcgccgcgaggccctttacccgccgcaccaccggttgccccggagaggcaaccatcttgggatccctctccagtatcatcaaccgttcccgccccgtcccctctatccgccgcagctgtgagcccctctaagctgccagaggatgacgaaccgcccgcacgccccccccccccaccaccagctagcgtgtctcctcaagccgagccagtgtggaccccgcctgctccggctccagccgcccctccaagcacgcccgccgcgcctaagcgtcgcggcagtagcggctcagtggatgagaccctctttgccctgccagcagcatccgagcctgttattaggtcaagtgcagttgtggatttgctttactggcgggacattaagaagacgggagtcgtgttcggagcaagcctgttcctgctcctgagcttgaccgtcttcagcattgtgtctgtgacggcctatatcgcattggcactcctttccgtgactatttcgttcaggatctataagggcgtaatacaggccatccagaaatctgacgaggggcatcccttccgcgcatatttggaatctgaggttgcaatttctgaagagctagttcagaagtattcgaacagcgcccttggacacgtgaactgtaccatcaaggagctgcggcgcctgtttctagtggacgatctggtagactcattaaaatttgcagtactcatgtgggtttttacttacgtgggggcccttttcaacggtctgactctcctgattcttgcattgatcagtttattcagcgtgcccgtaatctatgaacgccatcaggcgcagatcgatcactacctcggccttgccaataagaatgtcaaggatgcaatggctaaaatccaggccaaaattccagggttaaagcggaaagctgagtag

SEQ ID NO: 265531 - DNA, 1179 bp, Artificial Sequence
  derived and/or modified sequence
atggaggacctggaccagagccccctggtgagcagcagtgacagccccccccggccccagcctgccttcaagtaccagtttgtgcgggagccagaagatgaggaggaggaggaggaggaggaggaggaggatgaagatgaggacctggaggagctggaggtgctggagaggaagccagctgctggcctgtctgctgcccctgtgcccacagccccagctgctggggcccccctgatggactttggaaatgactttgtgcccccagccccccggggccccctgcctgctgcccctcctgtggcccctgagcggcagcccagctgggaccccagccctgtgagcagcacagtgcctgcccccagccccctgtctgctgctgctgtgagccccagcaagctgcctgaagatgatgagcccccagcccggcccccacctcctcctccagcctctgtgagcccccaggccgagcctgtgtggaccccaccagccccagccccagctgccccacccagcaccccagctgcccccaagaggcggggcagcagcggctctgtggatgagaccctgtttgccctgcctgctgccagcgagcccgtcatccgcagcagcgctgtggtggacctgctgtactggagggacatcaagaagacaggagtggtgtttggagccagcctcttcctgctgctgagcctgaccgtcttcagcatcgtgtctgtgacagcctacatcgccctggccctgctgtctgtgaccatctccttccgcatctacaagggcgtcatccaggccatccagaagagtgatgagggccaccccttccgggcctacctggagagcgaggtggccatcagcgaggagctggtgcagaagtacagcaacagcgccctgggccacgtgaactgcaccatcaaggagctgcggcggctcttcctggtggatgacctggtggacagcctgaagtttgctgtgctgatgtgggtgttcacctacgtgggcgccctcttcaacggcctgaccctgctgatcctggccctgatcagcctcttctctgtgcctgtgatctatgagcggcaccaggcccagattgaccactacctgggcctggccaacaagaatgtgaaggatgccatggccaagatccaggccaagatccctggcctgaagaggaaggccgagtag

SEQ ID NO: 265532 - DNA, 1179 bp, Artificial Sequence
  derived and/or modified sequence
atggaggacctggaccagagccccctggtgagcagcagcgacagcccgcccagaccacaaccagcctttaagtatcagttcgtgagggagcctgaagacgaggaggaggaggaggaggaagaggaggaagatgaggacgaagacctggaggaactggaagtactggaaagaaagccggccgccggattgtccgccgcgccagtgccaaccgccccagcggctggagcccccctgatggatttcggaaacgactttgtgcctccagcacctcgcggccctctgcccgctgccccgcccgtggcccctgagagacagccctcttgggacccttcacctgtttccagcaccgtgcccgctccatctccactgtcggcagcagccgtcagcccaagtaaattaccagaggacgatgaaccccctgcccgcccccccccaccacctccagcaagtgtttcaccgcaggcggagcccgtctggacaccgccggcccccgcccctgccgctcccccctctacaccggccgcgcccaagcggcggggatcgagcggctcagtggacgagactctgtttgcattacccgctgcatccgaacctgtgatcagatcttcagcagtggttgatcttctgtactggcgagacattaaaaaaacaggggtcgtttttggcgcgtccctgtttctgctgctgagcctgactgtcttctcaattgtgagtgtaacagcttacatagccttagcgctcctgtcagtcaccatctcgtttagaatctataagggtgtgatccaggctatacagaagtccgatgaaggtcacccttttcgtgcatacttagagtcagaagtggccatcagcgaagagctggtgcagaaatactccaattcagctctgggccacgttaattgcaccataaaggagctgaggagactgtttctggtggacgacctcgtggactctctaaagtttgcagtcctgatgtgggtgtttacctacgtgggagcacttttcaatgggctcaccctactaatattggcccttatttctctgttctccgtgccagtgatttatgagagacaccaagcgcagattgatcactatctcgggctggctaataaaaatgtgaaagatgcaatggccaaaattcaggcgaaaatccccggcttaaaacggaaagctgaatag

SEQ ID NO: 265533 - DNA, 1179 bp, Artificial Sequence
  derived and/or modified sequence
atggaagatcttgatcaatcccctctagtctcctccagtgactctccgccaaggccgcagccggctttcaagtaccagtttgtgagagaaccagaggatgaggaagaggaagaggaagaggaggaagaggatgaagatgaggatcttgaagagctggaggtgctggagcgaaagccggcagctggcctgtctgccgcacccgtcccgacagccccagccgctggagctccgctgatggattttggaaacgacttcgtaccccctgcgccacggggtccacttcctgcagctccacctgtagcccctgagagacagccttcctgggaccccagtccggtgagctctacggtgcctgcaccttccccactctcagctgctgccgtgtcgccctcgaagctcccggaggacgacgaacccccagccaggccacctcctccacccccagcgtccgtttcacctcaggctgagcccgtgtggaccccaccggctcccgctcctgccgctcctccttccacccctgcggctccaaagaggcgtggatcgtctggtagcgtggatgagactttgtttgctcttccagctgctagtgagcctgtgatccgctcttccgccgtggtagatttgctgtattggcgggatatcaaaaagaccggcgtggtttttggagcttccttattcttactgctttccctaacagtcttctccatagtcagcgtgacggcctatattgccctggcacttctatcagtaactatttctttccggatctacaagggggtcattcaggccattcaaaaatctgacgagggtcacccctttcgagcttacctagagtctgaagtggccatttctgaggaactggtccagaaatattccaattctgctctgggtcatgtcaattgtaccattaaagagctgcgcagactcttcctggtggacgatctggttgactctcttaaattcgccgtgttaatgtgggttttcacctacgtcggcgctcttttcaacgggctgactctgctgattttagcactaatatcactgtttagcgtgcccgttatatatgaaaggcatcaggcacagatcgatcattatctaggcctggcaaataagaacgttaaagatgcgatggctaaaatccaggccaagatccctgggctaaagaggaaagcggaatag

SEQ ID NO: 265534 - DNA, 2390 bp, Artificial Sequence
  derived and/or modified sequence
gctggcctcactcctagctcatctgggcggcggcggcaagtggggacagggcgggtggcgcatcaccggcgcggaggcaggaggagcagtctcattgttccgggagccgtcaccacagtaggtccctcggctcagtcggcccagcccctctcagtcctccccaacccccacaaccgcccgcggctctgagacgcggccccggcggcggcggcagcagctgcagcatcatctccaccctccagccatggaagacctggaccagtctcctctggtctcgtcctcggacagcccaccccggccgcagcccgcgttcaagtaccagttcgtgagggagcccgaggacgaggaggaagaagaggaggaggaagaggaggacgaggacgaagacctggaggagctggaggtgctggagaggaagcccgccgccgggctgtccgcggccccagtgcccaccgcccctgccgccggcgcgcccctgatggacttcggaaatgacttcgtgccgccggcgccccggggacccctgccggccgctccccccgtcgccccggagcggcagccgtcttgggacccgagcccggtgtcgtcgaccgtgcccgcgccatccccgctgtctgctgccgcagtctcgccctccaagctccctgaggacgacgagcctccggcccggcctccccctcctcccccggccagcgtgagcccccaggcagagcccgtgtggaccccgccagccccggctcccgccgcgcccccctccaccccggccgcgcccaagcgcaggggctcctcgggctcagtggatgagaccctttttgctcttcctgctgcatctgagcctgtgatacgctcctctgcagttgttgacctcctgtactggagagacattaagaagactggagtggtgtttggtgccagcctattcctgctgctttcattgacagtattcagcattgtgagcgtaacagcctacattgccttggccctgctctctgtgaccatcagctttaggatatacaagggtgtgatccaagctatccagaaatcagatgaaggccacccattcagggcatatctggaatctgaagttgctatatctgaggagttggttcagaagtacagtaattctgctcttggtcatgtgaactgcacgataaaggaactcaggcgcctcttcttagttgatgatttagttgattctctgaagtttgcagtgttgatgtgggtatttacctatgttggtgccttgtttaatggtctgacactactgattttggctctcatttcactcttcagtgttcctgttatttatgaacggcatcaggcacagatagatcattatctaggacttgcaaataagaatgttaaagatgctatggctaaaatccaagcaaaaatccctggattgaagcgcaaagctgaatgaaaacgcccaaaataattagtaggagttcatctttaaaggggatattcatttgattatacgggggagggtcagggaagaacgaaccttgacgttgcagtgcagtttcacagatcgttgttagatctttatttttagccatgcactgttgtgaggaaaaattacctgtcttgactgccatgtgttcatcatcttaagtattgtaagctgctatgtatggatttaaaccgtaatcatatctttttcctatctatctgaggcactggtggaataaaaaacctgtatattttactttgttgcagatagtcttgccgcatcttggcaagttgcagagatggtggagctagaaaaaaaaaaaaaaaagcccttttcagtttgtgcactgtgtatggtccgtgtagattgatgcagattttctgaaatgaaatgtttgtttagacgagatcataccggtaaagcaggaatgacaaagcttgcttttctggtatgttctaggtgtattgtgacttttactgttatattaattgccaatataagtaaatatagattatatatgtatagtgtttcacaaagcttagacctttaccttccagccaccccacagtgcttgatatttcagagtcagtcattggttatacatgtgtagttccaaagcacataagctagaagaagaaatatttctaggagcactaccatctgttttcaacatgaaatgccacacacatagaactccaacatcaatttcattgcacagactgactgtagttaattttgtcacagaatctatggactgaatctaatgcttccaaaaatgttgtttgtttgcaaatatcaaacattgttatgcaagaaattattaattacaaaatgaagatttataccattgtggtttaagctgtactgaactaaatctgtggaatgcattgtgaactgtaaaagcaaagtatcaataaagcttatagacttaaaa

SEQ ID NO: 265535 - DNA, 1179 bp, Artificial Sequence
  derived and/or modified sequence
atggaggacctggaccagagccccctggtgagcagcagcgacagcccccccagaccccagcccgccttcaagtaccagttcgtgagagagcccgaggacgaggaggaggaggaggaggaggaggaggaggacgaggacgaggacctggaggagctggaggtgctggagagaaagcccgccgccggcctgagcgccgcccccgtgcccaccgcccccgccgccggcgcccccctgatggacttcggcaacgacttcgtgccccccgcccccagaggccccctgcccgccgccccccccgtggcccccgagagacagcccagctgggaccccagccccgtgagcagcaccgtgcccgcccccagccccctgagcgccgccgccgtgagccccagcaagctgcccgaggacgacgagccccccgccagaccccccccccccccccccgccagcgtgagcccccaggccgagcccgtgtggaccccccccgcccccgcccccgccgccccccccagcacccccgccgcccccaagagaagaggcagcagcggcagcgtggacgagaccctgttcgccctgcccgccgccagcgagcccgtgatcagaagcagcgccgtggtggacctgctgtactggagagacatcaagaagaccggcgtggtgttcggcgccagcctgttcctgctgctgagcctgaccgtgttcagcatcgtgagcgtgaccgcctacatcgccctggccctgctgagcgtgaccatcagcttcagaatctacaagggcgtgatccaggccatccagaagagcgacgagggccaccccttcagagcctacctggagagcgaggtggccatcagcgaggagctggtgcagaagtacagcaacagcgccctgggccacgtgaactgcaccatcaaggagctgagaagactgttcctggtggacgacctggtggacagcctgaagttcgccgtgctgatgtgggtgttcacctacgtgggcgccctgttcaacggcctgaccctgctgatcctggccctgatcagcctgttcagcgtgcccgtgatctacgagagacaccaggcccagatcgaccactacctgggcctggccaacaagaacgtgaaggacgccatggccaagatccaggccaagatccccggcctgaagagaaaggccgagtag

SEQ ID NO: 265536 - DNA, 1320 bp, Artificial Sequence
  derived and/or modified sequence
atggcctggccctgcatcaccagagcctgctgcatcgccagattctggaaccagctggacaaggccgacatcgccgtgcccctggtgttcaccaagtacagcgaggccaccgagcaccccggcgcccccccccagcccccccccccccagcagcaggcccagcccgccctggccccccccagcgccagagccgtggccatcgagacccagcccgcccagggcgagctggacgccgtggccagagccaccggccccgcccccggccccaccggcgagagagagcccgccgccggccccggcagaagcggccccggccccggcctgggcagcggcagcaccagcggccccgccgacagcgtgatgagacaggactacagagcctggaaggtgcagagacccgagcccagctgcagacccagaagcgagtaccagcccagcgacgcccccttcgagagagagacccagtaccagaaggacttcagagcctggcccctgcccagaagaggcgaccacccctggatccccaagcccgtgcagatcagcgccgccagccaggccagcgcccccatcctgggcgcccccaagagaagaccccagagccaggagagatggcccgtgcaggccgccgccgaggccagagagcaggaggccgcccccggcggcgccggcggcctggccgccggcaaggccagcggcgccgacgagagagacaccagaagaaaggccggccccgcctggatcgtgagaagagccgagggcctgggccacgagcagacccccctgcccgccgcccaggcccaggtgcaggccaccggccccgaggccggcagaggcagagccgccgccgacgccctgaacagacagatcagagaggaggtggccagcgccgtgagcagcagctacagaaacgagttcagagcctggaccgacatcaagcccgtgaagcccatcaaggccaagccccagtacaagccccccgacgacaagatggtgcacgagaccagctacagcgcccagttcaagggcgaggccagcaagcccaccaccgccgacaacaaggtgatcgacagaagaagaatcagaagcctgtacagcgagcccttcaaggagccccccaaggtggagaagcccagcgtgcagagcagcaagcccaagaagaccagcgccagccacaagcccaccagaaaggccaaggacaagcaggccgtgagcggccaggccgccaagaagaagagcgccgagggccccagcaccaccaagcccgacgacaaggagcagagcaaggagatgaacaacaagctggccgaggccaaggagtag

SEQ ID NO: 265537 - DNA, 1320 bp, Artificial Sequence
  derived and/or modified sequence
atggcttggccctgcattacgagagcctgctgtattgcccggttttggaaccagcttgacaaagctgatatcgccgtcccgctggtgttcactaagtactcagaagccactgagcaccccggcgcacctccacaaccacctccccctcagcagcaggcccagccagctttggcgcccccaagcgcaagggctgtggcaatcgaaactcagcccgcgcagggggaactagatgctgttgctagagcaaccggacccgcccctggaccaacgggggaacgggaaccagccgctggacctgggaggagcggacccgggcctggactgggatctggcagcacatccgggcctgccgatagtgtgatgagacaggattatcgggcttggaaggtgcagcgacccgagccctcatgtagaccacgctcagagtatcagccaagcgacgcgccatttgagcgtgagactcaataccaaaaagattttcgggcctggccgctgcccagacggggggaccacccctggataccaaagcccgtgcaaatctccgctgcctctcaagcaagcgctcctatcctgggtgcccctaaacgcaggcctcagtctcaggagcgctggccggtgcaggccgccgctgaggccagggaacaggaagctgctcctggcggcgcaggcggcctggctgccgggaaggcctcaggggctgacgagagggatacaaggcgcaaagctgggccagcctggatagtccggagagccgagggcctcggccacgaacagacacccttacctgcggcgcaggctcaagtgcaggccacgggcccagaggccggaagagggagagcggccgccgatgcgctaaatagacaaattcgagaggaagtcgcttccgctgtgagcagtagttatagaaatgaattccgagcctggactgatattaaacccgtgaagcctataaaggccaaaccacagtataaaccacccgatgataaaatggtacacgagacatcctactcggcccaatttaagggcgaggctagcaagcccacgacagcagacaacaaggtgattgacagacggcgcattcgttctctgtactccgaacccttcaaggagccgcccaaggtcgagaagccatcagtgcaatcatcgaagcccaagaaaaccagcgcttcccataagcccactcgcaaagctaaggacaaacaggccgtaagtggacaggctgccaaaaagaaatcggcagagggtccatctaccaccaaacctgacgacaaagagcaaagcaaggagatgaataacaaactggccgaggcgaaagaatag

SEQ ID NO: 265538 - DNA, 1320 bp, Artificial Sequence
  derived and/or modified sequence
atggcctggccctgcatcacccgggcctgctgcatcgcccgcttctggaaccagctggacaaggctgacattgctgtgcccctggtgttcaccaagtacagcgaggccacagagcaccctggggccccaccccagcccccaccaccccagcagcaggcccagcctgccctggcccctccttctgcccgggctgtggccatcgagacccagcctgcccagggcgagctggatgctgtggcccgggccactggacctgcccctggccccaccggggagcgggagcctgctgctggccctggccgcagcggccctggccctggcctgggcagcggcagcaccagcggccctgctgacagcgtgatgaggcaggactaccgggcctggaaggtgcagaggcctgagcccagctgccggcccaggtctgagtaccagcccagtgatgccccctttgagcgggagacccagtaccagaaggacttccgggcctggcccctgcccaggagaggagaccacccctggatccccaagcctgtgcagatctctgctgccagccaggccagcgcccccatcctgggcgcccccaagaggcggccccagagccaggagcgctggcctgtgcaggccgctgctgaggcccgggagcaggaggccgcccctggaggagctgggggcctggccgccggcaaggccagcggggctgatgagcgggacaccaggaggaaggccggccctgcctggatcgtgagaagagctgagggcctgggccacgagcagacccccctgcctgctgcccaggcccaggtgcaggccactggacctgaggccggccggggccgggctgctgctgatgccctgaaccggcagatccgggaggaggtggccagcgctgtgagcagcagctacagaaatgagttccgggcctggacagacatcaagcctgtgaagcccatcaaggccaagccccagtacaagcccccagatgacaagatggtgcatgagaccagctacagcgcccagttcaagggggaggccagcaagcccaccacagctgacaacaaggtgattgacagaagacgcatccgcagcctgtacagcgagcccttcaaggagccccccaaggtggagaagcccagcgtgcagagcagcaagcccaagaagaccagcgccagccacaagcccaccaggaaggccaaggacaagcaggccgtgtctggccaggccgccaagaagaagtctgctgagggccccagcaccaccaagccagatgacaaggagcagagcaaggagatgaacaacaagctggccgaggccaaggagtag

SEQ ID NO: 265539 - DNA, 1320 bp, Artificial Sequence
  derived and/or modified sequence
atggcctggccctgcatcacccgggcctgctgcatcgcccggttctggaatcagctggacaaggccgacatcgccgttcccctggtgtttacaaaatattctgaggctaccgagcacccgggcgcaccaccacaacccccccctcctcaacaacaagcccagccagcgttagctcctccttcagctagagcggtagcaattgagacacagcccgcccagggagaactcgacgcagtcgctcgggctactggccccgcacccggtccaaccggtgagcgcgaacccgcggccggacccgggaggagtggccccggtcccggactcgggagtggatcgacttccgggccggctgacagcgtgatgcggcaagattaccgagcatggaaggtccagcgcccagagccatcttgcagaccgcgcagcgaataccagccgtctgatgcacccttcgagagagaaacccagtatcagaaggacttcagggcctggcccctccctcggcgtggggatcacccatggatccccaagccagtgcagatctccgctgcttctcaggccagtgctcccatactgggggcacccaagcgaaggcctcagagtcaggagaggtggccagttcaggccgcagctgaagcccgagaacaggaggcggcgcccggcggcgcggggggcttggccgctggaaaggccagtggtgctgatgaaagggatactcgaaggaaagcaggtccagcgtggatcgtgaggcgggcagaagggctcggacacgaacagacgccactccctgccgcacaggcccaggtgcaggctacaggcccagaagcaggacgcgggcgcgccgctgctgacgcgttaaaccgtcaaattagggaggaagttgcttcagctgtctccagcagttatcgaaacgagtttagggcctggacagacatcaaaccagtgaaaccgataaaggcaaagccccagtacaaaccgcccgacgacaagatggtgcacgaaacgtcctactcagcccaattcaaaggcgaggcttctaaacctaccacagccgacaataaagtaatagacagaagaagaatacggagcctgtacagtgaacctttcaaagaacctcccaaggtagaaaagcctagtgtccagtcatcgaagcccaaaaaaacatcagcttctcacaaacccacccggaaagccaaagacaaacaagcagtttcaggccaagccgccaaaaaaaaaagcgctgagggaccctcaaccactaagccggatgataaagaacagtcaaaggaaatgaataataaattggcggaggcaaaggagtag

SEQ ID NO: 265540 - DNA, 1320 bp, Artificial Sequence
  derived and/or modified sequence
atggcctggccttgcataacccgagcatgctgcatagctcgattctggaaccagctggacaaagccgatattgctgtgcccttggtctttactaaatatagcgaggccactgagcatccaggagcccctccacaacccccaccaccacagcagcaggcccagccagctctggcacccccttctgcccgagccgtcgccatagaaacccaacccgctcagggcgaactggatgcagtggcccgagcaactggtccggcacctggacctaccggcgagagagagcccgctgctggccctggcaggtctggcccaggaccaggtttagggtccgggtcgacaagcggccctgcagactccgttatgaggcaggactacagagcttggaaggtgcagcgaccggagccatcttgtcggccacggtccgagtatcagccatcggacgccccttttgagagagaaacacaatatcagaaagattttcgggcttggcctcttcctcgccgaggagaccacccttggattccaaagcctgtccaaatttcagctgcctctcaagcaagtgccccaatccttggtgcccctaaacgccgtcctcagagtcaagagcgttggcccgttcaggccgcagccgaggcaagggaacaggaagccgctccaggtggagcaggtggattggcggctggaaaagctagtggtgctgatgagcgagacacccgcaggaaggctggcccagcgtggatcgttagacgggctgaggggctaggtcacgaacagacccctttacctgcagctcaggctcaagtccaagccacaggccctgaagcgggtcgcggacgcgctgcagccgacgcgttaaatagacagattcgagaggaagtggcctcagccgtttcaagctcctataggaatgagttcagggcatggactgacattaaaccggtcaagcctattaaggccaagccgcagtacaagccacccgacgacaagatggtccacgaaaccagctacagcgcacagttcaaaggcgaggctagtaagcccactaccgccgacaataaagtgatcgacagacgtagaataagaagcttatactcggagccattcaaggagcctcccaaggtggagaagccatctgtgcaatcttctaaacccaaaaagacatcagcatctcataagcccactcggaaagcgaaggataagcaagctgtctcaggccaagcagccaagaagaagagcgcggaaggaccaagcaccacgaagcccgacgacaaggagcagtccaaggagatgaataacaaactcgctgaggccaaagaatag

SEQ ID NO: 265541 - DNA, 4329 bp, Artificial Sequence
  derived and/or modified sequence
aagattatagagacttgctttagaaccacaagaagaaagaggaggccggcttttcagctagcatcatggcgtggccgtgcatcacgagggcctgctgcatcgcccgcttctggaaccagttggacaaagcggacatcgctgtgccgctggttttcaccaagtactcggaggccaccgagcacccgggcgccccgccgcagccaccgccgccgcagcagcaggcgcagccggcgctcgcgcccccctcggcgcgcgcggttgccatagagacgcagccagcccagggcgagttggatgcagttgcccgggcaacggggccagcgcctgggcctaccggcgagcgcgagccggcggcgggccccggccggagcgggccgggcccgggcctgggctccggctccacctccggccccgcggactcggtgatgcggcaggattaccgagcctggaaggtgcagcggcccgagcccagctgccggccgcgcagcgaataccagccctccgacgctcccttcgagcgcgagacccagtaccagaaggacttccgcgcctggccgctgccgcgccgcggggaccacccgtggatccccaagcccgtgcagatctctgcggcctcccaggcgtcggcgcccattctcggggcgcccaagcgccggccgcagagccaggagcgctggccagtgcaggccgccgctgaggcccgggagcaggaggcggcccccggcggagcgggtggcctggcggccggaaaggcgtccggggcggacgagcgcgacacgcgcaggaaggccgggcctgcctggattgtgcgccgcgccgagggcctggggcacgagcagacgccgctgcccgcggcccaggcccaggtccaggccaccggccccgaggctggcagggggcgcgccgcggcggacgccctcaaccggcaaatccgcgaggaggtggcgagtgcagtgagcagctcctacaggaatgaattcagggcatggacggacatcaagcctgtgaaaccaataaaggccaagccccagtacaagcccccagatgataagatggttcatgagaccagctacagtgctcagttcaaaggagaggccagcaagccaacaacagctgacaataaggtcattgatcgcagaagaatacgcagcctctacagcgaacccttcaaggaacccccaaaggtggaaaaacctagtgttcagagttccaaaccaaaaaagacctcagcgagccataagcccacgaggaaggccaaagacaagcaggcggtgtcaggccaggctgccaagaaaaagagcgcggagggcccgagtaccaccaagccagacgacaaggagcaaagcaaagagatgaacaataaactggctgaggcgaaagagtaaatttccctgcactttccttttactcttctctctctctccctccccccaactttttttttttaaaccaacaaaccaaaaaaggccacaaaattaattagaggcttctcatctgccttggtcctgagtgttccaggagctctttggtttggcttcttttgatggaagaatcctgcttcacagactgagtggcaggcctcctcctgagggcagcccctggagcaccaggaagcgttgccgctggctgtgccctcccctggcactctgactgcatgctgatgagcaaggcaggcaggtctgagaggcgaaacgaatctcccggcagtgcttggaagtgtctgtggggtctcctcctcccagatccccaagatctgtgtcactggtcgattttgaactttaggtacatgtgttcttttcaaaaattcagagaatcgtcatgtgccacagaagctcagcctgggcttcagcaattgacaaaatttgaagaaatattaaacaaaaataacaaaaaaagaaacaaccttggccttaatgtcaataaaagggagttgtgtctgttaagtggtcttttcatagaatcgtccattagaaatgtgtgcctgtgtttagcttcctatcagtgggctttaaattgtataccgagtcatagatacgccactgataactaaaactagatcagggctggtgaagaaggttaggtgttttaggtacattccagctgtcataggaagatcacagaaatgaggaggctgttttcctctgattctcctcggccgaccacctgtccaatgctgctggtttcgcagagcgaccggttggagatgtctgaggaagaaagttcaaggtgtagggatagtgtgtttggaatttgactttccatttctgagacccaagggggcgtagatgtagtggcaagtgtggcgatgtttactctcccttcctgaaccgctctggtctgctcctcagagagggcagcggtgccaggcctcaggtcagggagaatgtctgtgacttagctgcagactaggagactgccctgctaactaattagcaagcagctttgacctcattaatatataaaagcagctctcagtatattccgtgtcgtgtgtgtgtgtggccaaagcccccaagggtggcaagtgccaccttcgctgtgctagagttgtgttgtaggaattagtcagggagttgttgtgaaaaaaaaaaccccagtgcttgtgagggaactcaaaatagttaccagaaaaataatatttgccaatatgacgtgtatattgctcagcacactctgtatctcctgtccttaaaatcctcttgtccccggcattctgacacactgggctgccgtccggtgtcaagccccggcgcaggcttgctcttcttttacaatgaaaggggtgaagagtgagggtctcacagttccttacctcaaagtccctttaggtccttctggtttggaggaagtggagcctccacgaactctctcttactccgaccattcaggcagcaaagtctctgcttacatcattttggttgtcaccttggggctgagtgagaagtcttttgtaaattaattcggcgtgtgctacatgagccataattattaacagaacaggaatatcagaaacgaagttgttgatcaggcccactgcgaccttcctttctatctcagggtttaaaactgtgaggaaggagaagtatgaaggaaggtagaaaatgctggtgggtctccgtgtttatgagtcacagattttgaaagctatcaggaaatgactagagtggatcctggcactgattccaactctttgccagctaatcttaacatttagcagaaagctctagcaacatgatcttaattgtatccagaggatttgccaatgtatgttcagtctctcaagatttggcattagtcagacatgttgatgctagccacaatttggatttctccatagaataatcatttatttttgcagatcaaataaatcagagtttacaatgcacaggggatcatttatttagcattcccttgctagaagcccgtgtgccaggcactgtgctaggcgtggtgggcagtataaagaaatctgtctccacagccacacaaccagagggtgcacatgacttgatccctatgaccaagtcaagttggtgttgcccaaatcgcagtttgacataagggtcccacaggcttccccaccccccgcccccactcactgccccagggaccaacttcctaccctcacccaaggctttagaggacctgtagcatgtctttttcaacctgtcagtatccccttctgcttaacacacccactgagaaaaccctgtttgtagttcactttgactcttgaatgtgtcactttactggcaagagacttcctttgatttctactgtttacaaataaaactcagccagtctcattctatatcccaaacgtactgaatgaaactgattttggttccacaagcagtgtttgggtgttgccttcctgaaggtgaccaagcttccaaagctcgtcccactggcctctgtacatttccctgtggttctccgtccttccctggcgagggagctgggactgaagctttcccgctgtttccctgcctgcaaaagcagccccaagagctgcgcattggcttccctcagcaatctgtcctgtctgtgctcccattcggtccacatagctttctttgcctctctgaggcagacaggaagtgtctaattacgattttgtggcctgggttttgttgcataccacagattgtctatgtaacatgtagcgcacacctctcttggtgctatttcattcctgctgtaagagaatgacaaaaatattcatgtatagccaattgattgtgacgtgcttgtggtctgtgcttgctcagaaaaacaaacaaacaaacagtttttccaattataaataaatgctaaagacgaacacca

SEQ ID NO: 265542 - protein, 320 aa, Artificial Sequence
  derived and/or modified sequence
MTLWNGVLPFYPQPRHAAGFSVPLLIVILVFLALAASFLLILPGIRGHSRWFWLVRVLLSLFIGAEIVAVHFSAEWFVGTVNTNTSYKAFSAARVTARVRLLVGLEGINITLTGTPVHQLNETIDYNEQFTWRLKENYAAEYANALEKGLPDPVLYLAEKFTPSSPCGLYHQYHLAGHYASATLWVAFCFWLLSNVLLSTPAPLYGGLALLTTGAFALFGVFALASISSVPLCPLRLGSSALTTQYGAAFWVTLATGVLCLFLGGAVVSLQYVRPSALRTLLDQSAKDCSQERGGSPLILGDPLHKQAALPDLKCITTNL

SEQ ID NO: 265543 - DNA, 963 bp, Artificial Sequence
  derived and/or modified sequence
atgaccctgtggaatggggtactaccattctatccccagcccaggcacgccgcaggcttttcagttccactactgatcgtgatcctcgtgttcctggccctggccgccagctttctgctgatcttgcctgggattcgcggccacagccgatggttttggttggtaagagtgttgctgtccctgttcattggggctgaaatcgtcgccgtccactttagcgctgagtggttcgttggcactgttaatactaacacgtcgtataaggccttttctgctgccagggttacagcccgtgtgcgtctgctggtgggtttggaggggatcaacataacactcactggaactcctgtgcaccaactgaatgagactattgattacaacgaacagtttacctggagactcaaggagaactacgccgcagagtatgccaacgcccttgaaaaaggcctgcccgatccagtactataccttgccgaaaaatttactcccagctccccttgtggcctttaccaccagtaccatttggcaggacattacgccagtgcgacactatgggtggccttctgtttctggttattatctaacgtcttgctgagcacgccagcccccctgtacggcggcctggccctactgacgaccggtgctttcgcactgtttggggtgttcgctttggcctcaatttctagcgtgccactctgtcccctcagactcggatcctcagctctgaccacgcagtatggtgcagcgttctgggtcacgctggccactggcgttctttgtctatttctggggggagctgttgtcagtctccaatacgtaaggcctagcgctttgcgcactttgctggaccagagtgccaaagactgtagccaggagcgggggggaagccctctaatattaggcgatccgttgcacaaacaggctgcattacctgatcttaaatgcattaccacaaacctgtag

SEQ ID NO: 265544 - DNA, 963 bp, Artificial Sequence
  derived and/or modified sequence
atgaccctgtggaatggagtgctgcccttctacccccagcccaggcatgctgctggcttctctgtgcccctgctgattgtcatcctggtgttcctggccctggccgccagcttcctgctgatcctgcccggcatccggggccacagccgctggttctggctggtgcgggtgctgctgagcctcttcatcggggctgagatcgtggccgtgcacttctctgctgagtggtttgtgggcaccgtgaacaccaacaccagctacaaggccttctctgctgcccgggtgacagcccgggtgcggctgctggtgggcctggagggcatcaacatcaccctgaccggcacccctgtgcaccagctgaatgagaccatcgactacaatgagcagttcacctggaggctgaaggagaactatgctgctgaatatgccaatgccctggagaagggcctgcctgaccctgtgctgtacctggccgagaagttcacccccagcagcccctgtggcctgtaccaccagtaccacctggccggccactacgccagcgccaccctgtgggtggccttctgcttctggctgctgagcaatgtgctgctgagcaccccagcccccctgtatggaggcctggccctgctgaccactggagcctttgccctgtttggagtgtttgccctggccagcatcagctctgtgcccctgtgccccctgcggctgggcagcagcgccctgaccacccagtacggggccgccttctgggtgaccctggccaccggggtgctgtgcctcttcctgggcggcgctgtggtgtccctgcagtatgtgcggcccagcgccctgcggaccctgctggaccagagcgccaaggactgcagccaggagcggggcggcagccccctcatcctgggggaccccctgcacaagcaggccgccctgcctgacctgaagtgcatcaccaccaacctgtag

SEQ ID NO: 265545 - DNA, 963 bp, Artificial Sequence
  derived and/or modified sequence
atgaccctgtggaacggcgtgctgcccttctacccccagccccggcacgccgctggcttttctgtgccccttctcatagtgatccttgtgttcttggctctggccgctagcttcttactgattcttccagggatccggggacacagccgatggttctggctggttagggtcttactttcactgttcattggggctgagatcgtggcagtacacttttccgccgagtggttcgtcgggactgtgaacacaaacacaagctataaagccttctctgctgcccgagtgactgcgcgagtccggctgctggtcggtctggaggggatcaatattaccctgactggtacaccggtgcaccaactgaatgagacaattgactacaacgaacaattcacctggcgccttaaggagaattatgccgccgagtacgctaacgcccttgagaagggcctgccggaccccgtcctgtatctcgcagagaaatttacacccagcagcccctgcggcctgtatcaccagtaccacctggcggggcactatgcaagcgccaccctgtgggtagctttttgtttttggctgttgtctaacgtgcttctcagcacccctgccccattgtatggcggcctggctctgctgactacgggggccttcgctctctttggggtttttgctctcgcttcaatcagctccgtgcctctgtgcccactgagactcgggtcatcggccttaactacacaatacggtgccgctttctgggtgacccttgctactggcgtgctgtgtctatttctggggggggctgtggtctctctccaatacgtacgtccaagcgctctacgcaccctgctggaccagagtgcaaaggattgtagtcaggagcgtggcgggagcccactgatcctcggggacccattgcacaagcaggccgctctccccgatctgaaatgtattaccacaaatctgtag

SEQ ID NO: 265546 - DNA, 963 bp, Artificial Sequence
  derived and/or modified sequence
atgaccctgtggaatggcgtgctgccattctacccccaacccagacatgctgcaggtttttctgtgccattgctgatcgtgatactggtgttcttggccctggccgctagttttctgctgatcctacctggcattagaggtcatagtagatggttttggctggtcagggtgctcttgtctttattcattggcgctgaaatcgtagccgttcatttcagcgctgagtggtttgtggggacagtcaacaccaacacctcctacaaggccttctctgctgccagggtgacggcgcgtgtgcgactcttagtggggttagaaggcatcaatattactcttacaggcacacctgtgcaccagctgaatgaaacaatagactacaacgagcagtttacatggagactcaaggagaactatgccgcagagtatgcaaatgctcttgaaaaagggctgcccgatcctgtgctctatcttgccgagaaatttacacccagctcaccatgtggactgtaccaccaataccatctggccggacattatgcttctgctacgctttgggtagcattttgcttttggctcttatccaacgtgttactgagcacacccgctccgctctacgggggattagcattgcttacaacaggtgctttcgcattatttggtgtcttcgcattggcctcaattagttcagtgccgttgtgcccactacgcttgggatcctcagccctgaccactcagtacggagccgcattttgggtgacgctcgccaccggggtgctatgtctgttcctcggaggagcagtggtgagtcttcagtatgtcagaccaagcgcattgcggacactcctggaccaatccgccaaggactgttcacaggaaagggggggttctccactgatcctcggtgatccactacacaagcaagccgctttgcccgatctgaagtgtattactactaatctgtag

SEQ ID NO: 265547 - DNA, 963 bp, Artificial Sequence
  derived and/or modified sequence
atgaccctgtggaacggcgtgctgcccttctacccccagcccagacacgccgccggcttcagcgtgcccctgctgatcgtgatcctggtgttcctggccctggccgccagcttcctgctgatcctgcccggcatcagaggccacagcagatggttctggctggtgagagtgctgctgagcctgttcatcggcgccgagatcgtggccgtgcacttcagcgccgagtggttcgtgggcaccgtgaacaccaacaccagctacaaggccttcagcgccgccagagtgaccgccagagtgagactgctggtgggcctggagggcatcaacatcaccctgaccggcacccccgtgcaccagctgaacgagaccatcgactacaacgagcagttcacctggagactgaaggagaactacgccgccgagtacgccaacgccctggagaagggcctgcccgaccccgtgctgtacctggccgagaagttcacccccagcagcccctgcggcctgtaccaccagtaccacctggccggccactacgccagcgccaccctgtgggtggccttctgcttctggctgctgagcaacgtgctgctgagcacccccgcccccctgtacggcggcctggccctgctgaccaccggcgccttcgccctgttcggcgtgttcgccctggccagcatcagcagcgtgcccctgtgccccctgagactgggcagcagcgccctgaccacccagtacggcgccgccttctgggtgaccctggccaccggcgtgctgtgcctgttcctgggcggcgccgtggtgagcctgcagtacgtgagacccagcgccctgagaaccctgctggaccagagcgccaaggactgcagccaggagagaggcggcagccccctgatcctgggcgaccccctgcacaagcaggccgccctgcccgacctgaagtgcatcaccaccaacctgtag

SEQ ID NO: 265548 - DNA, 1760 bp, Artificial Sequence
  derived and/or modified sequence
aactcagcgccaacccgcagaaccaggaaagtaacggctacagacagtgagaaatagtttcgctcgccggctagaaaaactctgtcggtaccaaccccagagcgttgagagcagcccacctccacgcttccttaacggagaggtgcaggactcagacttcaccagcccactcggtcccagccttgtacgcaaagagacgccaaggacgcgctctcccgcgtccaggcagccccagcttgctggcttgcctgcccgcctgcgtgcagcactcggccggcgtgcagcatgaccctgtggaacggcgtactgcctttttacccccagccccggcatgccgcaggcttcagcgttccactgctcatcgttattctagtgtttttggctctagcagcaagcttcctgctcatcttgccggggatccgtggccactcgcgctggttttggttggtgagagttcttctcagtctgttcataggcgcagaaattgtggctgtgcacttcagtgcagaatggttcgtgggtacagtgaacaccaacacatcctacaaagccttcagcgcagcgcgcgttacagcccgtgtccgtctgctcgtgggcctggagggcattaatattacactcacagggaccccagtgcatcagctgaacgagaccattgactacaacgagcagttcacctggcgtctgaaagagaattacgccgcggagtacgcgaacgcactggagaaggggctgccggacccagtgctctacctggcggagaagttcacaccgagtagcccttgcggcctgtaccaccagtaccacctggcgggacactacgcctcggccacgctatgggtggcgttctgcttctggctcctctccaacgtgctgctctccacgccggccccgctctacggaggcctggcactgctgaccaccggagccttcgcgctcttcggggtcttcgccttggcctccatctctagcgtgccgctctgcccgctccgcctaggctcctccgcgctcaccactcagtacggcgccgccttctgggtcacgctggcaaccggcgtcctgtgcctcttcctcggaggggccgtggtgagtctccagtatgttcggcccagcgctcttcgcacccttctggaccaaagcgccaaggactgcagccaggagagagggggctcacctcttatcctcggcgacccactgcacaagcaggccgctctcccagacttaaaatgtatcaccactaacctgtgagggggacccaatctggactccttccccgccttgggacatcgcaggccgggaagcagtgcccgccaggcctgggccaggagagctccaggaagggcactgagcgctgctggcgcgaggcctcggacatccgcaggcaccagggaaagtctcctggggcgatctgtaaataaacctttttttcttttgttttttaaaaactgtttttcccattaattttcatggcttctccgcgccggggtcgcacgtcctcatgagcttcgctgggctggagacagcctagtacactctccgcagtgctgtgaaacctgattctctgcgtcgactccagagtaataggggcgccctctagtgaggccggagggaccctaccagagctagcatctttctgaaccaccccagggggacgttaggtggcagtgatgaggcaggtcacccactcccccgtcctggatgccactcagctagcccagctgagtggggtgggaaggaatagcgttttggagttgattccc

SEQ ID NO: 265549 - protein, 331 aa, Artificial Sequence
  derived and/or modified sequence
MLLSQNAFIFRSLNLVLMVYISLVFGISYDSPDYTDESCTFKISLRNFRSILSWELKNHSIVPTHYTLLYTIMSKPEDLKVVKNCANTTRSFCDLTDEWRSTHEAYVTVLEGFSGNTTLFSCSHNFWLAIDMSFEPPEFEIVGFTNHINVMVKFPSIVEEELQFDLSLVIEEQSEGIVKKHKPEIKGNMSGNFTYIIDKLIPNTNYCVSVYLEHSDEQAVIKSPLKCTLLPPGQESESAESAKIGGIITVFLIALVLTSTIVTLKWIGYICLRNSLPKVLRQGLAKGWNAVAIHRCSHNALQSETPELKQSSCLSFPSSWDYKRASLCPSD

SEQ ID NO: 265550 - DNA, 165 bp, Artificial Sequence
  derived and/or modified sequence
atgatgaagccccaggccgagaccggcgaggccgcccgggacccctcccttagacctgcccgcactgttctggtgggctcgttgagctggctgcgcaagcaactccaaccaacccactgcaaatacgaaggccctagaaaagctcgccgcctctggttcgcatag

SEQ ID NO: 265551 - DNA, 996 bp, Artificial Sequence
  derived and/or modified sequence
atgctgctgtcacagaacgcctttatcttccggtcgctcaacctcgtgctgatggtctacattagtttggtgttcggcatctcctacgatagccctgactacacagatgaatcttgtacattcaaaatttctcttcggaacttccggagtattctttcatgggagctcaaaaaccatagcatcgtgcccacacactacacactgctgtatactatcatgtccaaaccagaggatctgaaagtggtgaagaattgtgctaatacaactagatcattttgcgatcttacagacgagtggagaagcacccatgaggcatatgtgacggttctcgaaggattctccggcaatactaccctcttttcatgctcccacaatttctggctggcaatagatatgtccttcgagccacccgagtttgagatcgtaggctttacgaatcatattaacgtgatggtgaaatttccttcaattgttgaagaggaactgcaattcgatctgagcctagtgattgaggagcagtctgagggcatagtaaagaaacacaagccagagataaagggcaacatgtctgggaattttacttatataattgacaagctaatccccaacactaattactgcgtctccgtatatctggagcattccgacgaacaggctgtgatcaagagccccctgaagtgtacacttctgccccccggccaggaatctgagtcggcagaatccgccaagattggcggcattatcacggtatttctcattgcactggtccttactagcacaatcgttacgttaaagtggattggatatatttgtcttcgaaactccttgcccaaagtcctcagacagggcctcgcaaaagggtggaatgccgtcgctatccacaggtgctctcacaacgctctccagagcgagacccccgagctgaaacaatcttcatgtttatcattcccatcatcctgggactacaagcgagcctcgctctgcccaagcgactag

SEQ ID NO: 265552 - DNA, 996 bp, Artificial Sequence
  derived and/or modified sequence
atgttgctgagccaaaacgctttcatcttcagaagcctgaacctcgtgctgatggtttatatttctcttgtctttggcatctcttacgattcccccgattacacagatgagtcttgtacatttaaaatatccttaagaaacttccggtctatccttagctgggaactcaagaatcactcaatcgttccaacccactataccctactgtacactattatgagtaagccagaggatctgaaagttgtgaagaactgcgctaacaccacccggtccttctgcgacctgaccgacgagtggcgctctacccacgaagcttatgtcaccgtgttagaaggattctcaggcaacacaaccttgttctcttgttcacataacttctggcttgcgattgacatgagctttgagcctccagagtttgaaattgtaggctttacaaaccatatcaatgtgatggtgaaattcccttcaatcgttgaagaagagctgcagttcgacttaagcctcgtgatcgaggagcagagtgagggcatagttaaaaagcacaagcctgaaatcaaaggcaatatgtccggtaatttcacatacatcatagataagctgattccgaacaccaactattgcgtgagtgtttacctggagcatagtgatgaacaagccgtgatcaagtcacccctgaagtgtaccctgctgccaccaggccaggaatctgagagcgccgaaagcgctaagatcggaggcatcatcaccgttttccttattgcccttgtgctgacctccacgatcgtaaccctaaaatggatcggatatatttgcctgcgtaattcattaccaaaagtcttaaggcagggacttgcgaagggctggaatgcggttgccatacacaggtgcagccacaacgccttgcagtccgaaacccccgagctgaaacagagctcgtgtctttcttttcccagctcttgggattacaaaagggcctctctgtgcccaagcgattag

SEQ ID NO: 265553 - DNA, 1389 bp, Artificial Sequence
  derived and/or modified sequence
gcccccgcgccggcggcggcgcggcgcccgcgcttccgtatcgctcctcgtaggccggggctcggcgcgcgcacccgcactaaagacgcttcttcccggcgggtaggaatcccgccggcgagccgaacagttccccgagcgcagcccgcggaccaccacccggccgcacgggccgcttttgtcccccgcccgccgcttctgtccgagaggccgcccgcgaggcgcatcctgaccgcgagcgtcgggtcccagagccgggcgcggctggggcccgaggctagcatctctcgggagccgcaaggcgagagctgcaaagatgtaaaagtcaagagaagactctaaaaatagcaaagatgcttttgagccagaatgccttcatcttcagatcacttaatttggttctcatggtgtatatcagcctcgtgtttggtatttcatatgattcgcctgattacacagatgaatcttgcactttcaagatatcattgcgaaatttccggtccatcttatcatgggaattaaaaaaccactccattgtaccaactcactatacattgctgtatacaatcatgagtaaaccagaagatttgaaggtggttaagaactgtgcaaataccacaagatcattttgtgacctcacagatgagtggagaagcacacacgaggcctatgtcaccgtcctagaaggattcagcgggaacacaacgttgttcagttgctcacacaatttctggctggccatagacatgtcttttgaaccaccagagtttgagattgttggttttaccaaccacattaatgtgatggtgaaatttccatctattgttgaggaagaattacagtttgatttatctctcgtcattgaagaacagtcagagggaattgttaagaagcataaacccgaaataaaaggaaacatgagtggaaatttcacctatatcattgacaagttaattccaaacacgaactactgtgtatctgtttatttagagcacagtgatgagcaagcagtaataaagtctcccttaaaatgcaccctccttccacctggccaggaatcagaatcagcagaatctgccaaaataggaggaataattactgtgtttttgatagcattggtcttgacaagcaccatagtgacactgaaatggattggttatatatgcttaagaaatagcctccccaaagtcttgaggcaaggtctcgctaagggctggaatgcagtggctattcacaggtgcagtcataatgcactacagtctgaaactcctgagctcaaacagtcgtcctgcctaagcttccccagtagctgggattacaagcgtgcatccctgtgccccagtgattaagttttattatgtagaaaataaagagcaaacagtacagctg

SEQ ID NO: 265554 - DNA, 4335 bp, Artificial Sequence
  derived and/or modified sequence
gccggcggcggcgcggcgcccgcgcttccgtatcgctcctcgtaggccggggctcggcgcgcgcacccgcactaaagacgcttcttcccggcgggtaggaatcccgccggcgagccgaacagttccccgagcgcagcccgcggaccaccacccggccgcacgggccgcttttgtcccccgcccgccgcttctgtccgagaggccgcccgcgaggcgcatcctgaccgcgagcgtcgggtcccagagccgggcgcggctggggcccgaggctagcatctctcgggagccgcaaggcgagagctgcaaagtttaattagacacttcagaattttgatcacctaatgttgatttcagatgtaaaagtcaagagaagactctaaaaatagcaaagatgcttttgagccagaatgccttcatcttcagatcacttaatttggttctcatggtgtatatcagcctcgtgtttggtatttcatatgattcgcctgattacacagatgaatcttgcactttcaagatatcattgcgaaatttccggtccatcttatcatgggaattaaaaaaccactccattgtaccaactcactatacattgctgtatacaatcatgagtaaaccagaagatttgaaggtggttaagaactgtgcaaataccacaagatcattttgtgacctcacagatgagtggagaagcacacacgaggcctatgtcaccgtcctagaaggattcagcgggaacacaacgttgttcagttgctcacacaatttctggctggccatagacatgtcttttgaaccaccagagtttgagattgttggttttaccaaccacattaatgtgatggtgaaatttccatctattgttgaggaagaattacagtttgatttatctctcgtcattgaagaacagtcagagggaattgttaagaagcataaacccgaaataaaaggaaacatgagtggaaatttcacctatatcattgacaagttaattccaaacacgaactactgtgtatctgtttatttagagcacagtgatgagcaagcagtaataaagtctcccttaaaatgcaccctccttccacctggccaggaatcagaatcagcagaatctgccaaaataggaggaataattactgtgtttttgatagcattggtcttgacaagcaccatagtgacactgaaatggattggttatatatgcttaagaaatagcctccccaaagtcttgaggcaaggtctcgctaagggctggaatgcagtggctattcacaggtgcagtcataatgcactacagtctgaaactcctgagctcaaacagtcgtcctgcctaagcttccccagtagctgggattacaagcgtgcatccctgtgccccagtgattaagttttattatgtagaaaataaagagcaaacagtacagctgatacggactctctctctctttttttttttttttaagaattttcataactttttagcctggccatttcctaacctgccaccgttggaagccatggatatggtggaggtcatttacatcaacagaaagaagaaagtgtgggattataattatgatgatgaaagtgatagcgatactgaggcagcgcccaggacaagtggcggtggctataccatgcatggactgactgtcaggcctctgggtcaggcctctgccacctctacagaatcccagttgatagacccggagtccgaggaggagcctgacctgcctgaggttgatgtggagctccccacgatgccaaaggacagccctcagcagttggaactcttgagtgggccctgtgagaggagaaagagtccactccaggacccttttcccgaagaggactacagctccacggaggggtctgggggcagaattaccttcaatgtggacttaaactctgtgtttttgagagttcttgatgacgaggacagtgacgacttagaagcccctctgatgctatcgtctcatctggaagagatggttgacccagaggatcctgataatgtgcaatcaaaccatttgctggccagcggggaagggacacagccaacctttcccagcccctcttcagagggcctgtggtccgaagatgctccatctgatcaaagtgacacttctgagtcagatgttgaccttggggatggttatataatgagatgactccaaaactattgaatgaacttggacagacaagcacctacagggttctttgtctctgcatcctaacttgctgccttatcgtctgcaagtgttctccaagggaaggaggaggaaactgtggtgttcctttcttccaggtgacatcacctatgcacattcccagtatggggaccatagtatcattcagtgcattgtttacatattcaaagtggtgcactttgaaggaagcacatgtgcacctttcctttacactaatgcacttaggatgtttctgcatcatgtctaccagggagcagggttccccacagtttcagaggtggtccaggaccctatgatatttctcttctttcgttcttttttttttttttttttgagacagagtctcgttctgtcgcccaagctggagcgcaatggtgtgatcttggctcactgcaacatccgcctcccaggttcaagtgattctcctgcctcagcctccctcgcaagtagctgggattacaggcgcctgccaccatgcctagcaaatttttgtatttttagtagagacaggattttaccatgttggccaggctggtctcaaactcctgacctcaagtgatctgccctcctcagcctcgtaaagtgctgggattacaggggtgagccgctgtgcctggctggccctgtgatatttctgtgaaataaattgggccagggtgggagcagggaaagaaaaggaaaatagtagcaagagctgcaaagcaggcaggaagggaggaggagagccaggtgagcagtggagagaaggggggccctgcacaaggaaacagggaagagccatcgaagtttcagtcggtgagccttgggcacctcacccatgtcacatcctgtctcctgcaattggaattccaccttgtccagccctccccagttaaagtggggaagacagactttaggatcacgtgtgtgactaatacagaaaggaaacatggcgtcggggagagggataaaacctgaatgccatattttaagttaaaaaaaaaaaaagcaaacacaaagatgcttcaagatcttcaggagaagtatggtatacaagtttcagggaccctatttgacaattttcagagtgctctctatgctgattccgagtcgagtgtgtcagctgtgattacagtgcctgtggatctaggccgggttgggggggtgtgggcgggggaagggaagtctggcccggagcaattgctcctgccggtaaccccagcactttgggatgcctaaacaggcgtatcgcttgaggccagtaattcgagaccagcctgggcaacatggcaaatctgtctctacaaaacaaaattagaaaaattaactgggcgtagtggcatgtgcctgttgtcccagctacttgggaggctgaggtgggagaatggcttgagcccaggaagcggaggttgcagtgagccaagatcatgtcactgcacttcagcctgggtgacagaaccagaccctgtctttaaaaagggagttggtggggagaggttctagaatgtcatgtagcaaccagtttaaggactgggactcagggatccaactcccacagtttccctgtgtgaccctaggcatttgacttagcctttctgagcctcaggttttttgtttctgaagtaaaaggattggactaggtaatctccaagatcctaggaacccaggagaaagatgagaaaatgtacaagaatgaacactcaggtggaaatgctgcaatcctgagaagctcccaggatgaatgaaaggcacaggacctcttacccctcacccctgcccccctcaagagctggtttctcaaacctttctcttaggccccttcaaagggggaaaactaaaaattatacaagttatagttcaaggactttaaatagattatttatatgattgctcataaggatgaggctgtgaggagggaacaccttatttaatctaatgaaattccataggaaagaggccttttgtatattgaatcaatttatctgccttctcagtgcatctgtcatattctgaaagattctgggttgatcttttgcgataacctctatggctgtgagtgtgtgtgtgtgtttgtgtattttttaacattttgtataatgattggaggttggtaaaaagtaacacaacagtacttttttaatacaaa

SEQ ID NO: 265555 - DNA, 996 bp, Artificial Sequence
  derived and/or modified sequence
atgctgctgagccagaatgccttcatcttccgcagcctgaacctggtgctgatggtgtacatcagcctggtgtttggcatctcctatgacagcccagactacacagatgagagctgcaccttcaagatcagcctgaggaacttccgcagcatcctgtcctgggagctgaagaaccacagcatcgtgcccacccactacaccctgctgtacaccatcatgagcaagccagaggacctgaaggtggtgaagaactgtgccaacaccaccaggagcttctgtgacctgacagatgagtggaggagcacccatgaggcctacgtgacagtgctggagggcttcagcggcaacaccaccctcttcagctgcagccacaacttctggctggccatcgacatgagctttgagcccccagagtttgaaattgtgggcttcaccaaccacatcaacgtgatggtgaagttccccagcatcgtggaggaggagctgcagtttgacctgagcctggtgattgaggagcagagcgagggcatcgtgaagaagcacaagccagagatcaagggcaacatgagcggcaacttcacctacatcatcgacaagctgatccccaacaccaactactgtgtgtctgtgtacctggagcacagtgatgagcaggccgtcatcaagagccccctgaagtgcaccctgctgcccccaggccaggagagcgagagcgctgagagcgccaagattggaggcatcatcaccgtcttcctgattgccctggtgctgaccagcaccatcgtgaccctgaagtggattggctacatctgcctgaggaacagcctgcccaaggtgctgcggcagggcctggccaagggctggaatgctgtggccatccaccgctgcagccacaatgccctgcagagcgagaccccagagctgaagcagagcagctgcctgtccttccccagctcctgggactacaagagggccagcctgtgccccagcgactag

SEQ ID NO: 265556 - DNA, 996 bp, Artificial Sequence
  derived and/or modified sequence
atgctgctgagccagaacgccttcatcttccggagcctgaacctggttcttatggtgtacatcagcctggttttcggtattagctatgattcacccgattatacagacgagtcctgcacgttcaagattagcctcaggaatttcaggtcaatactgagctgggagctgaagaaccactcgattgtacccacccactacacgctcctgtacacaatcatgagcaagccagaggacttgaaggtggtaaagaattgcgctaacacaaccagatctttctgtgacctgaccgatgagtggcgcagtacccatgaagcctacgtgacggtactggagggcttctccgggaataccacgttattcagttgcagtcataacttctggctagctattgacatgtctttcgagcctcctgagtttgagatagtggggtttaccaatcacattaacgtgatggtcaagttccctagcatcgtagaagaggagctgcagtttgacctatccctcgtgattgaggaacagtctgaaggaatcgtcaaaaaacacaaaccagaaatcaaaggcaatatgagcggcaacttcacctacataattgacaagctgatcccaaacaccaattactgcgtgtccgtatatctggagcatagcgatgaacaggccgtcatcaagagtcccctgaaatgcacgttgctccccccaggccaggagagcgagtcagctgaatccgctaaaatcggcggcatcatcaccgtttttctgatcgcccttgtgctaacatcaacaattgtcacactaaaatggatcggctatatatgcctgcgtaactctttgcctaaagtgcttcgccaaggcctggccaagggatggaacgctgtagccatccaccgctgctctcacaacgccctgcaatccgagactccagaactaaagcagagcagctgtttgagctttccctcctcatgggactataaacgagcctcactgtgcccttccgattag

SEQ ID NO: 265557 - DNA, 996 bp, Artificial Sequence
  derived and/or modified sequence
atgctgctgagccagaacgccttcatcttccggagcctgaacctggtactgatggtctacattagtttagtgtttgggatcagttatgacagcccagactacaccgacgaatcctgcacatttaagatttctcttcgtaacttcagatccatactcagctgggaattaaagaaccactccatcgtacctacacattatactttactttacaccatcatgtcaaagccggaggatctgaaggtggtgaagaattgcgcgaatacaacccgcagcttctgtgatcttactgacgagtggcggtctacacacgaagcctatgtgaccgtgctcgaaggcttcagcgggaacacgactctgttctcatgctctcataatttttggctcgccattgatatgtctttcgaaccacctgagttcgagatcgtcggattcacaaatcacatcaacgtgatggtaaagttcccgagcatcgtagaggaagagttacaatttgacctctcgctggtcatcgaggagcagagcgaaggtatagtgaaaaagcacaagcccgaaataaaaggcaatatgtccggcaattttacatacataatcgacaagctcattcccaatacgaactattgcgtttccgtgtacctcgagcattccgatgaacaggctgtgatcaagagccccctaaagtgcactctcctgcctcccggacaggagtcggaaagcgctgaatcagccaagattggagggatcatcaccgtatttctcatagctctggtccttacctccacaatagtaacgttgaaatggatcggctatatctgcctccggaattccctgcccaaggttctgaggcagggcctggcaaaagggtggaatgcagtcgccatacacaggtgtagccacaatgccctgcagagcgagactcctgagcttaaacagtccagctgcctttcattcccctcatcatgggattataagagagcctcactctgtcccagcgactag

SEQ ID NO: 265558 - DNA, 996 bp, Artificial Sequence
  derived and/or modified sequence
atgctcctgtcccaaaatgctttcattttccgatctctcaacctggtcctcatggtgtatatcagtctcgtcttcggaatctcctacgatagccccgattatacagacgagtcatgtactttcaagattagcctccggaacttcaggagcatcctgagctgggaactcaagaaccattctattgtgccaacccactatacactgttgtatacaataatgtccaagccggaggacctgaaggtggtcaaaaattgcgccaacaccactcgctcattctgcgacctcacagacgagtggagatcgacacatgaggcttacgttaccgtcctcgagggttttagcggcaacactactctgttctcgtgttctcacaacttctggctggccattgacatgtcctttgagcctccagagttcgaaattgtcggtttcaccaatcatatcaacgtcatggtgaagtttccaagtatagttgaggaagaattgcaatttgacctcagtcttgtgatagaggagcagagcgaaggcatcgtgaaaaaacacaagccagagattaagggcaatatgagtgggaactttacttacattattgacaaactaatccctaacaccaactactgcgtgagcgtgtaccttgaacactctgatgaacaggccgtgatcaaatctcccctgaagtgcaccctactgccacccggtcaggaatctgagagtgctgaaagtgccaaaatcgggggaattataaccgtgtttctgatcgcactagtactcaccagcacaatcgtgactttaaagtggattgggtatatctgtcttcgaaactcactgccgaaagttttgcgccaagggttagccaagggatggaatgccgtcgccatccataggtgcagtcacaatgcactgcagagcgaaaccccagagcttaagcagtcctcttgtctgtcattcccttcatcctgggactacaaaagggccagcctatgcccatcagattag

SEQ ID NO: 265559 - DNA, 996 bp, Artificial Sequence
  derived and/or modified sequence
atgctgctctctcagaacgctttcatttttaggtccctcaacctggtgcttatggtgtacatcagtctggtgtttggcatttcatacgactccccggattacacggacgaatcatgcaccttcaaaatcagcttacggaatttccgctctatcctcagctgggagctgaagaaccacagcatcgtgccaacacactatactcttctttataccattatgagcaagccggaggatcttaaagtggttaagaactgtgccaacactactcgctcattttgtgacctgactgacgaatggcgcagcacccatgaggcttatgtcacagttctagaggggttctccggcaatactacactattctcatgttctcataacttctggctggccatcgacatgtcattcgaaccaccggagttcgagatagtcggctttaccaaccatattaatgtcatggtcaaattcccttctatagtcgaggaagagttgcagttcgatctgtccctcgttatcgaggagcagagtgagggcattgtcaaaaagcataagccggagattaagggcaacatgagtggaaactttacctacataatagataaattgattcccaatacgaattactgtgtttctgtctatctggaacatagcgatgaacaggctgtgatcaagagccctcttaaatgcaccctgctcccccctggtcaagaatcggaatccgccgaaagcgctaaaatcggcggtatcatcacagtttttctgatcgcgctggtcctgacctcaaccattgtgactctgaagtggattggctacatatgtctcagaaactcactaccgaaggtgttgagacaggggctggcaaaaggatggaatgctgtggccatccataggtgctcccacaacgctcttcagtcagaaacaccagagctgaaacagtcgtcatgtctaagttttcccagctcttgggactataaacgagcatccctatgtcccagtgactag

SEQ ID NO: 265560 - DNA, 996 bp, Artificial Sequence
  derived and/or modified sequence
atgctgctgagccagaacgccttcatcttcagaagcctgaacctggtgctgatggtgtacatcagcctggtgttcggcatcagctacgacagccccgactacaccgacgagagctgcaccttcaagatcagcctgagaaacttcagaagcatcctgagctgggagctgaagaaccacagcatcgtgcccacccactacaccctgctgtacaccatcatgagcaagcccgaggacctgaaggtggtgaagaactgcgccaacaccaccagaagcttctgcgacctgaccgacgagtggagaagcacccacgaggcctacgtgaccgtgctggagggcttcagcggcaacaccaccctgttcagctgcagccacaacttctggctggccatcgacatgagcttcgagccccccgagttcgagatcgtgggcttcaccaaccacatcaacgtgatggtgaagttccccagcatcgtggaggaggagctgcagttcgacctgagcctggtgatcgaggagcagagcgagggcatcgtgaagaagcacaagcccgagatcaagggcaacatgagcggcaacttcacctacatcatcgacaagctgatccccaacaccaactactgcgtgagcgtgtacctggagcacagcgacgagcaggccgtgatcaagagccccctgaagtgcaccctgctgccccccggccaggagagcgagagcgccgagagcgccaagatcggcggcatcatcaccgtgttcctgatcgccctggtgctgaccagcaccatcgtgaccctgaagtggatcggctacatctgcctgagaaacagcctgcccaaggtgctgagacagggcctggccaagggctggaacgccgtggccatccacagatgcagccacaacgccctgcagagcgagacccccgagctgaagcagagcagctgcctgagcttccccagcagctgggactacaagagagccagcctgtgccccagcgactag

SEQ ID NO: 265561 - protein, 515 aa, Artificial Sequence [sequence omitted]

SEQ ID NO: 265562 - DNA, 1548 bp, Artificial Sequence
  derived and/or modified sequence
atgttactcagtcagaacgccttcatcttccggagcctaaatctggtgttgatggtctatatctcattggtattcggcatctcttacgacagccccgattacacagacgagtcttgcacgttcaagataagtttgcgaaatttccgcagtatactctcgtgggagctgaaaaaccactctatcgtgcccacacactataccctgctgtacacaataatgtctaagcctgaggacttaaaggtagttaagaattgtgccaataccacccgcagtttctgtgacctgacagatgagtggcgaagcacgcacgaagcatacgtgacagtgttggaaggattttccggcaacaccacacttttctcttgcagccacaacttctggttggcgatcgatatgtcatttgagccaccagaatttgaaatcgttggctttacaaatcacatcaacgtcatggtgaagtttccctctatagtggaggaagagcttcagtttgatctatctctagttatcgaagaacagtcagaaggtatagtgaagaaacacaaaccagagataaaaggaaatatgtcaggaaatttcacttatatcattgacaagctgatacccaatacgaactattgcgtttctgtgtacttagaacactcagacgagcaggcagtgatcaagtcccctcttaagtgcaccctgttgccacccgggcaagaatcggaatctgcagagtccgcaaagatcggtgggatcattaccgtgttcttaattgccctggtcctgacttcgactatcgtgacgcttaagtggattgggtatatctgcttacggaatagtctgcccaaagttctgaatttccataacttccttgcatggccctttcccaatcttcccccactcgaggccatggatatggttgaagttatttacattaacagaaagaagaaggtgtgggactataactatgacgacgaaagtgattccgataccgaggccgcccctagaactagtggcggcggatacacaatgcatggcttaacagtgcggcccctggggcaggcatctgccacttccactgagagtcagttgatagaccctgaatctgaggaggagcccgacctcccagaggttgacgttgagctaccgaccatgcccaaagacagccctcagcagctagaactactgtcaggaccctgtgaaagaagaaagtcccctttgcaagacccattccccgaagaagattacagttccaccgaggggtccggcgggcgcatcactttcaacgtggatctgaatagcgtgttcctcagagtcctagatgatgaagatagtgacgatctagaggccccacttatgctgtcaagccatctcgaggagatggttgatcccgaagacccagacaatgtgcagagtaatcatcttcttgcctccggggagggaacgcaacctacatttccatcaccttccagcgagggcttatggagcgaggatgcaccttctgaccagtcagacacatcagaatctgatgtggatttgggtgacggctacattatgcgctag

SEQ ID NO: 265563 - DNA, 1548 bp, Artificial Sequence
  derived and/or modified sequence
atgctccttagtcaaaatgcttttattttcaggtcactcaacctggtgttgatggtctatatttccctggtgtttggtatcagctacgactcaccagactacactgacgagagctgcacttttaagatctccttgcggaattttcggtctattcttagttgggagctgaaaaatcatagcattgtgcccacacactacacactgttgtacactattatgtctaagcctgaagatcttaaggtcgttaagaattgtgccaacactactaggagcttttgtgatctgacagatgaatggcgatccacccacgaagcctacgtgaccgtgttggaaggttttagcggaaacacgactctcttttcatgttcccacaatttttggctggcaatcgatatgtccttcgagcctccagagttcgagattgtggggttcacgaaccacatcaacgttatggtgaaattcccatcaattgtcgaagaagagctccagtttgacctgagtttggtaatagaggaacagtcagagggtattgtgaagaagcacaagccagagattaagggaaatatgtccggcaatttcacctacattatagacaagctgatccctaatactaactactgcgtgtctgtttacttggaacactcagacgaacaggcggttatcaagtcccccctgaagtgtacactgctcccaccagggcaggaatcggagagcgccgaatcagcgaaaattgggggcataattacggtgttcttgatcgccttggtcctcacctctacgatcgtcaccctgaagtggattggatacatctgcctgcgcaacagcctgccgaaggtgctgaatttccataattttctcgcttggcctttcccaaatctgcctcccctcgaggccatggacatggtcgaggtgatttatatcaatagaaagaagaaggtgtgggactacaattacgatgatgagtctgattccgataccgaggcagccccaagaacatctggcggtggctacactatgcacggactcaccgtacgccctcttgggcaggccagcgctacatctaccgaaagtcagctgatcgatcccgagagcgaggaggagcccgatctgccagaggtggacgtggagctgcccacaatgcccaaggatagtccacagcagctcgaactgctctccggtccttgtgaacgacgaaagagtccactccaggatcctttcccggaggaggattattccagcacagaaggatccgggggcagaatcactttcaatgtcgatctgaattcagtgttcctgagagtccttgacgacgaggattctgatgatctggaggcaccactgatgctgagctcacatctggaagaaatggtggatccagaagatcctgacaacgtccagagcaatcatcttctggcatctggtgagggtacccagccgactttcccttcaccttcctcggaaggcttgtggtctgaggatgccccgtccgatcagtcagacacatccgaatcagacgtggatctcggggacggatacataatgagatag

SEQ ID NO: 265564 - DNA, 2899 bp, Artificial Sequence
  derived and/or modified sequence
cccgcactaaagacgcttcttcccggcgggtaggaatcccgccggcgagccgaacagttccccgagcgcagcccgcggaccaccacccggccgcacgggccgcttttgtcccccgcccgccgcttctgtccgagaggccgcccgcgaggcgcatcctgaccgcgagcgtcgggtcccagagccgggcgcggctggggcccgaggctagcatctctcgggagccgcaaggcgagagctgcaaagtttaattagacacttcagaattttgatcacctaatgttgatttcagatgtaaaagtcaagagaagactctaaaaatagcaaagatgcttttgagccagaatgccttcatcttcagatcacttaatttggttctcatggtgtatatcagcctcgtgtttggtatttcatatgattcgcctgattacacagatgaatcttgcactttcaagatatcattgcgaaatttccggtccatcttatcatgggaattaaaaaaccactccattgtaccaactcactatacattgctgtatacaatcatgagtaaaccagaagatttgaaggtggttaagaactgtgcaaataccacaagatcattttgtgacctcacagatgagtggagaagcacacacgaggcctatgtcaccgtcctagaaggattcagcgggaacacaacgttgttcagttgctcacacaatttctggctggccatagacatgtcttttgaaccaccagagtttgagattgttggttttaccaaccacattaatgtgatggtgaaatttccatctattgttgaggaagaattacagtttgatttatctctcgtcattgaagaacagtcagagggaattgttaagaagcataaacccgaaataaaaggaaacatgagtggaaatttcacctatatcattgacaagttaattccaaacacgaactactgtgtatctgtttatttagagcacagtgatgagcaagcagtaataaagtctcccttaaaatgcaccctccttccacctggccaggaatcagaatcagcagaatctgccaaaataggaggaataattactgtgtttttgatagcattggtcttgacaagcaccatagtgacactgaaatggattggttatatatgcttaagaaatagcctccccaaagtcttgaattttcataactttttagcctggccatttcctaacctgccaccgttggaagccatggatatggtggaggtcatttacatcaacagaaagaagaaagtgtgggattataattatgatgatgaaagtgatagcgatactgaggcagcgcccaggacaagtggcggtggctataccatgcatggactgactgtcaggcctctgggtcaggcctctgccacctctacagaatcccagttgatagacccggagtccgaggaggagcctgacctgcctgaggttgatgtggagctccccacgatgccaaaggacagccctcagcagttggaactcttgagtgggccctgtgagaggagaaagagtccactccaggacccttttcccgaagaggactacagctccacggaggggtctgggggcagaattaccttcaatgtggacttaaactctgtgtttttgagagttcttgatgacgaggacagtgacgacttagaagcccctctgatgctatcgtctcatctggaagagatggttgacccagaggatcctgataatgtgcaatcaaaccatttgctggccagcggggaagggacacagccaacctttcccagcccctcttcagagggcctgtggtccgaagatgctccatctgatcaaagtgacacttctgagtcagatgttgaccttggggatggttatataatgagatgactccaaaactattgaatgaacttggacagacaagcacctacagggttctttgtctctgcatcctaacttgctgccttatcgtctgcaagtgttctccaagggaaggaggaggaaactgtggtgttcctttcttccaggtgacatcacctatgcacattcccagtatggggaccatagtatcattcagtgcattgtttacatattcaaagtggtgcactttgaaggaagcacatgtgcacctttcctttacactaatgcacttaggatgtttctgcatcatgtctaccagggagcagggttccccacagtttcagaggtggtccaggaccctatgatatttctcttctttcgttcttttttttttttttttttgagacagagtctcgttctgtcgcccaagctggagcgcaatggtgtgatcttggctcactgcaacatccgcctcccaggttcaagtgattctcctgcctcagcctccctcgcaagtagctgggattacaggcgcctgccaccatgcctagcaaatttttgtatttttagtagagacaggattttaccatgttggccaggctggtctcaaactcctgacctcaagtgatctgccctcctcagcctcgtaaagtgctgggattacaggggtgagccgctgtgcctggctggccctgtgatatttctgtgaaataaattgggccagggtgggagcagggaaagaaaaggaaaatagtagcaagagctgcaaagcaggcaggaagggaggaggagagccaggtgagcagtggagagaaggggggccctgcacaaggaaacagggaagagccatcgaagtttcagtcggtgagccttgggcacctcacccatgtcacatcctgtctcctgcaattggaattccaccttgtccagccctccccagttaaagtggggaagacagactttaggatcacgtgtgtgactaatacagaaaggaaacatggcgtcggggagagggataaaacctgaatgccatattttaagttaaaaaaaaaaaa

SEQ ID NO: 265565 - DNA, 2889 bp, Artificial Sequence
  derived and/or modified sequence
gcccgcgcttccgtatcgctcctcgtaggccggggctcggcgcgcgcacccgcactaaagacgcttcttcccggcgggtaggaatcccgccggcgagccgaacagttccccgagcgcagcccgcggaccaccacccggccgcacgggccgcttttgtcccccgcccgccgcttctgtccgagaggccgcccgcgaggcgcatcctgaccgcgagcgtcgggtcccagagccgggcgcggctggggcccgaggctagcatctctcgggagccgcaaggcgagagctgcaaagatgtaaaagtcaagagaagactctaaaaatagcaaagatgcttttgagccagaatgccttcatcttcagatcacttaatttggttctcatggtgtatatcagcctcgtgtttggtatttcatatgattcgcctgattacacagatgaatcttgcactttcaagatatcattgcgaaatttccggtccatcttatcatgggaattaaaaaaccactccattgtaccaactcactatacattgctgtatacaatcatgagtaaaccagaagatttgaaggtggttaagaactgtgcaaataccacaagatcattttgtgacctcacagatgagtggagaagcacacacgaggcctatgtcaccgtcctagaaggattcagcgggaacacaacgttgttcagttgctcacacaatttctggctggccatagacatgtcttttgaaccaccagagtttgagattgttggttttaccaaccacattaatgtgatggtgaaatttccatctattgttgaggaagaattacagtttgatttatctctcgtcattgaagaacagtcagagggaattgttaagaagcataaacccgaaataaaaggaaacatgagtggaaatttcacctatatcattgacaagttaattccaaacacgaactactgtgtatctgtttatttagagcacagtgatgagcaagcagtaataaagtctcccttaaaatgcaccctccttccacctggccaggaatcagaatcagcagaatctgccaaaataggaggaataattactgtgtttttgatagcattggtcttgacaagcaccatagtgacactgaaatggattggttatatatgcttaagaaatagcctccccaaagtcttgaattttcataactttttagcctggccatttcctaacctgccaccgttggaagccatggatatggtggaggtcatttacatcaacagaaagaagaaagtgtgggattataattatgatgatgaaagtgatagcgatactgaggcagcgcccaggacaagtggcggtggctataccatgcatggactgactgtcaggcctctgggtcaggcctctgccacctctacagaatcccagttgatagacccggagtccgaggaggagcctgacctgcctgaggttgatgtggagctccccacgatgccaaaggacagccctcagcagttggaactcttgagtgggccctgtgagaggagaaagagtccactccaggacccttttcccgaagaggactacagctccacggaggggtctgggggcagaattaccttcaatgtggacttaaactctgtgtttttgagagttcttgatgacgaggacagtgacgacttagaagcccctctgatgctatcgtctcatctggaagagatggttgacccagaggatcctgataatgtgcaatcaaaccatttgctggccagcggggaagggacacagccaacctttcccagcccctcttcagagggcctgtggtccgaagatgctccatctgatcaaagtgacacttctgagtcagatgttgaccttggggatggttatataatgagatgactccaaaactattgaatgaacttggacagacaagcacctacagggttctttgtctctgcatcctaacttgctgccttatcgtctgcaagtgttctccaagggaaggaggaggaaactgtggtgttcctttcttccaggtgacatcacctatgcacattcccagtatggggaccatagtatcattcagtgcattgtttacatattcaaagtggtgcactttgaaggaagcacatgtgcacctttcctttacactaatgcacttaggatgtttctgcatcatgtctaccagggagcagggttccccacagtttcagaggtggtccaggaccctatgatatttctcttctttcgttcttttttttttttttttttgagacagagtctcgttctgtcgcccaagctggagcgcaatggtgtgatcttggctcactgcaacatccgcctcccaggttcaagtgattctcctgcctcagcctccctcgcaagtagctgggattacaggcgcctgccaccatgcctagcaaatttttgtatttttagtagagacaggattttaccatgttggccaggctggtctcaaactcctgacctcaagtgatctgccctcctcagcctcgtaaagtgctgggattacaggggtgagccgctgtgcctggctggccctgtgatatttctgtgaaataaattgggccagggtgggagcagggaaagaaaaggaaaatagtagcaagagctgcaaagcaggcaggaagggaggaggagagccaggtgagcagtggagagaaggggggccctgcacaaggaaacagggaagagccatcgaagtttcagtcggtgagccttgggcacctcacccatgtcacatcctgtctcctgcaattggaattccaccttgtccagccctccccagttaaagtggggaagacagactttaggatcacgtgtgtgactaatacagaaaggaaacatggcgtcggggagagggataaaacctgaatgccatattttaagtt

SEQ ID NO: 265566 - DNA, 1548 bp, Artificial Sequence
  derived and/or modified sequence
atgctgctgagccagaatgccttcatcttccgcagcctgaacctggtgctgatggtgtacatcagcctggtgtttggcatctcctatgacagcccagactacacagatgagagctgcaccttcaagatcagcctgaggaacttccgcagcatcctgtcctgggagctgaagaaccacagcatcgtgcccacccactacaccctgctgtacaccatcatgagcaagccagaggacctgaaggtggtgaagaactgtgccaacaccaccaggagcttctgtgacctgacagatgagtggaggagcacccatgaggcctacgtgacagtgctggagggcttcagcggcaacaccaccctcttcagctgcagccacaacttctggctggccatcgacatgagctttgagcccccagagtttgaaattgtgggcttcaccaaccacatcaacgtgatggtgaagttccccagcatcgtggaggaggagctgcagtttgacctgagcctggtgattgaggagcagagcgagggcatcgtgaagaagcacaagccagagatcaagggcaacatgagcggcaacttcacctacatcatcgacaagctgatccccaacaccaactactgtgtgtctgtgtacctggagcacagtgatgagcaggccgtcatcaagagccccctgaagtgcaccctgctgcccccaggccaggagagcgagagcgctgagagcgccaagattggaggcatcatcaccgtcttcctgattgccctggtgctgaccagcaccatcgtgaccctgaagtggattggctacatctgcctgaggaacagcctgcccaaggtgctgaacttccacaacttcctggcctggcccttccccaacctgccccccctggaggccatggacatggtggaggtgatctacatcaacaggaagaagaaggtgtgggactacaactatgatgatgaaagtgacagcgacacagaggccgcccccaggaccagcggcggcggctacaccatgcacggcctgactgtgcggcccctgggccaggccagcgccaccagcacagagagccagctgattgatcctgagagcgaggaggagccagacctgcctgaggtggatgtggagctgcccaccatgcccaaggacagcccccagcagctggagctgctgagcggcccctgtgaaagaaggaagagccccctgcaggaccccttccctgaggaggactacagcagcacagagggcagcggcggccgcatcaccttcaacgtggacctgaacagcgtcttcctgcgggtgctggatgatgaggacagtgatgacctggaggcccccctgatgctgagcagccacctggaggagatggtggaccctgaggaccctgacaacgtgcagagcaaccacctgctggccagcggggagggcacccagcccaccttccccagccccagcagcgagggcctgtggagcgaagatgcccccagcgaccagagcgacaccagcgagagtgatgtggacctgggagatggctacatcatgaggtag

SEQ ID NO: 265567 - DNA, 1548 bp, Artificial Sequence
  derived and/or modified sequence
atgctgctgagccagaacgccttcatcttccggagcctgaacctggtgctcatggtctacatttcattagtcttcggcatctcttacgacagtcccgactatactgacgagagttgcactttcaaaattagcttaaggaatttcagatccattcttagttgggaactcaagaaccattctattgtgccaactcattatacacttctgtatacaatcatgtctaaacctgaggatctgaaggtcgtgaagaattgtgcgaataccaccaggagcttttgtgacctgaccgacgagtggcggagtactcacgaggcctacgtgacagtactcgaagggttttccggtaatactactctgtttagctgctcccacaatttttggcttgccattgatatgagttttgaacctcctgaattcgagatcgtaggtttcacaaaccatatcaacgtcatggtaaaattcccttccatcgtagaggaggaactgcagtttgacctgagccttgtgatcgaagagcagtccgaggggattgtaaaaaaacataagcccgaaataaaaggaaatatgagtgggaacttcacctatatcatcgacaagctaatacctaataccaactactgcgtgtctgtctacctcgaacattccgacgagcaggctgtgataaagtcgcccctcaagtgtacccttctcccgcccggccaggagtccgagagtgctgaatcggctaagatcgggggcattataacagtgttcttgatcgccctggtactgacctccacaattgtaacactaaaatggatcggctacatatgcctaaggaacagcctgcctaaggtccttaatttccacaactttttagcttggcccttccctaatctgcctccactagaggccatggacatggtagaagtcatttacattaatcgaaagaagaaagtgtgggattacaactatgatgatgaaagcgactccgatacagaggcagctcctcggacatcagggggaggctacacgatgcacgggcttactgtcagacctctcggccaggcaagcgccacgagtaccgagagtcaactcattgatccagagagcgaggaggaacctgatttacctgaggttgacgtggagcttccgaccatgcctaaggattcaccacaacaactggagcttctctctggcccttgtgagcggcggaagagccctctgcaggatccttttcctgaggaagactattcaagcactgagggatctggcggccggatcacatttaatgtcgaccttaatagcgtatttctgagggttctggatgatgaggactctgatgacctcgaagcccctctgatgctgtcatctcatctggaggagatggtggaccccgaggacccagataacgtccaaagtaaccacctgctggccagcggcgaagggactcagccaacttttccatccccctccagtgaggggctatggtctgaagatgccccatccgaccaatctgacacatccgagtccgacgtggatctgggggacggatacatcatgcggtag

SEQ ID NO: 265568 - DNA, 1548 bp, Artificial Sequence
  derived and/or modified sequence
atgctgctgagccagaacgccttcatcttccggagcctgaacctggtactcatggtttatattagtcttgttttcggcataagctacgattccccagattatacagatgagagttgcacctttaaaatatccctgcggaactttagatccatcttgagctgggagctcaagaaccactcaattgtccccacccattacacactcttatacacaatcatgtccaagcccgaagacctgaaggtggtaaagaattgcgcaaatactacacgctcattttgtgatctgacagatgaatggcgctcgacacacgaagcatatgtcacagtgctcgaaggcttctccggcaatacaaccctattcagctgctcgcataatttttggctcgccatcgatatgtctttcgagcccccagagttcgaaattgttggcttcacgaatcatatcaatgtaatggtgaagtttccttcaatagtcgaggaagaactacagtttgacttgtcactggttattgaggaacagtccgagggcatcgtgaagaaacataaacccgagataaagggaaacatgagcggcaatttcacctacattattgataagctgattccaaacaccaattactgcgtctctgtctatctcgagcattctgacgaacaggcggtaatcaaaagtcctctcaaatgcactttgctaccacccggacaggaatccgagtcagcagagagtgccaagattgggggcattatcacagtattcctcattgcattagtgctcacaagtacgatagttaccctgaagtggataggttatatctgtctgaggaattccctaccaaaggttctgaactttcataactttctggcctggcctttccccaacttgcccccgttggaggccatggacatggttgaggtgatctacatcaaccgtaaaaagaaggtgtgggactacaattacgacgacgaaagcgatagcgatacagaggcagcgccgaggaccagtggaggtggatataccatgcacgggttgaccgtgcgccccctggggcaggccagtgcaacctctaccgagagtcaactgatagaccctgaaagtgaggaggagcctgacctgccagaggtggatgttgagcttcctacaatgcctaaggattccccacagcagctggaactgttgtcagggccgtgtgaacgccgcaaatcaccccttcaagatcctttcccagaggaagactacagttctacagagggaagtggaggaagaatcacctttaacgtggatctaaactcagtgtttctgcgcgtgctggatgacgaggacagcgacgacctcgaggcgcctttgatgctctcctctcaccttgaggaaatggtggacccggaggaccccgacaatgtgcagtccaatcacctcctggcttccggggaagggacccaacctactttcccttctccttcatccgaaggactgtggagcgaggacgcgccaagcgaccaaagtgatacaagtgaatccgacgtggatctgggggatggctacatcatgcgatag

SEQ ID NO: 265569 - DNA, 1548 bp, Artificial Sequence
  derived and/or modified sequence
atgctgctttcacagaatgctttcatttttaggtcgctaaatctagtgttgatggtgtatatttcattggtgttcggcatctcttacgattcaccagactacacagacgagtcttgcacctttaagatctcactcagaaatttcaggtctattttatcctgggagctaaagaatcactccattgtgcccacccactataccttgctctataccataatgtctaagccagaagatctaaaggtcgttaagaactgcgctaacacaaccaggagcttctgcgaccttacagacgaatggagatccacacatgaggcctacgtgaccgtacttgaggggttttcagggaataccaccctattttcctgtagccacaacttttggctggcgattgatatgagtttcgagcctcccgagttcgagatcgtgggcttcactaatcacatcaacgtgatggtcaagtttcctagcattgtcgaagaagaactacagtttgacttaagccttgtaattgaggagcagtcagaagggattgtgaagaagcacaaacctgagatcaagggcaatatgagcggcaactttacgtacattattgataagctgattcctaatactaattattgtgtgtctgtctacttggaacattccgacgagcaggccgtaataaaaagtccactcaagtgtacattattaccccctggtcaagaaagcgagtcagccgaatccgccaagattggcggtatcattacagtgtttctgattgctctggtcctgacgtctaccattgtcacccttaaatggataggatacatatgtctccgcaatagcttgcccaaagtgttaaacttccacaatttcctggcttggccctttccaaacttgccacctttagaagctatggacatggttgaagtgatttatattaaccgtaagaaaaaggtatgggattataactatgatgatgaatcagacagtgacacggaagctgctcccagaacttccggcggaggctataccatgcatggactcaccgtcaggcccctaggccaggcctccgctacttccaccgaatcgcagctgattgacccagagtcagaagaagagccagatctgccggaggtcgacgtggagttgcctacaatgcccaaagacagtccccagcaactggagctgctgagtggcccttgcgagcgcaggaaaagtcccttgcaggaccctttcccagaggaggattatagctctactgaaggctcagggggtaggattacatttaacgtcgatttgaacagtgtgtttctgcgagtcttagatgatgaggattccgacgacctggaagcacccctgatgctgagctcccacctggaggaaatggtggacccggaggatcccgacaatgttcagtccaaccatcttttggccagcggggaaggcacacaacctactttcccgagtccgtcttctgaagggctgtggagcgaagatgctccaagtgatcagagtgacacgtcagagagcgacgtggaccttggtgacggatatattatgcgttag

SEQ ID NO: 265570 - DNA, 1548 bp, Artificial Sequence
  derived and/or modified sequence
atgttgctttctcaaaacgcctttatttttcgcagtctaaaccttgtcctcatggtctacatatccctggtatttgggatatcctatgattcccctgactacaccgatgagagttgtacgttcaagattagtcttcgcaacttcagatctatcctgtcatgggagttgaagaatcattccatcgtccccactcattacacactgctgtacacgatcatgtccaaacccgaagacctcaaggtagtcaagaattgtgctaatacaacgagatccttctgtgatctgacagatgagtggagatcgacccatgaggcttacgtgaccgtgctggaaggattctctggcaatactacgctcttttcttgttctcacaatttctggctggctatcgacatgagttttgagcccccagaatttgagatcgttgggttcaccaaccatataaacgtgatggtgaagttccccagtatagtagaagaggaacttcagttcgatctttccctggttatcgaagaacaatccgaggggatcgtgaagaaacataagccagagatcaagggcaacatgtcggggaattttacctacataatcgacaagttgatccccaacacgaactactgcgtctcggtgtatctcgagcattcggacgaacaggccgtgataaagagcccccttaaatgcacccttctcccccctggtcaggagtctgagagtgctgagagcgcaaaaattggcggaattatcacagtgttcctgatcgctctggtcctgacgagtacgatcgttaccttgaaatggattggctacatctgcctgcggaacagtcttccaaaggtactgaattttcataatttcttggcttggccttttcccaacctgccccctctcgaagctatggacatggtggaggtgatttacattaaccggaaaaagaaagtctgggactacaactacgatgacgaatcagactctgacacggaagcggctcctaggactagcgggggaggatataccatgcatggcttgacagttcggccactggggcaggcctcggccacatccaccgaaagccagctgattgatcccgagtccgaagaggaacccgacctgccggaggttgatgtcgaactgccaaccatgcctaaagattcacctcagcaactggaactgttgtctggcccatgtgaacgacggaaaagtccacttcaggacccatttccagaggaagattactcttcaacagaaggcagcgggggaagaatcacatttaatgtggatctgaacagcgtatttctcagggtgctcgatgatgaggacagtgacgatttggaagcacctttgatgctgtcgagtcatctcgaggagatggtcgatcccgaggaccccgacaacgtgcagtcgaatcacctcctggcaagcggagaagggacccagcctacctttccgtcaccatcatccgaggggctgtggtccgaagacgctcccagcgaccagtctgacacatccgagagcgatgtcgacctgggcgacggatatattatgcggtag

SEQ ID NO: 265571 - DNA, 1548 bp, Artificial Sequence
  derived and/or modified sequence
atgctgctgagccagaacgccttcatcttcagaagcctgaacctggtgctgatggtgtacatcagcctggtgttcggcatcagctacgacagccccgactacaccgacgagagctgcaccttcaagatcagcctgagaaacttcagaagcatcctgagctgggagctgaagaaccacagcatcgtgcccacccactacaccctgctgtacaccatcatgagcaagcccgaggacctgaaggtggtgaagaactgcgccaacaccaccagaagcttctgcgacctgaccgacgagtggagaagcacccacgaggcctacgtgaccgtgctggagggcttcagcggcaacaccaccctgttcagctgcagccacaacttctggctggccatcgacatgagcttcgagccccccgagttcgagatcgtgggcttcaccaaccacatcaacgtgatggtgaagttccccagcatcgtggaggaggagctgcagttcgacctgagcctggtgatcgaggagcagagcgagggcatcgtgaagaagcacaagcccgagatcaagggcaacatgagcggcaacttcacctacatcatcgacaagctgatccccaacaccaactactgcgtgagcgtgtacctggagcacagcgacgagcaggccgtgatcaagagccccctgaagtgcaccctgctgccccccggccaggagagcgagagcgccgagagcgccaagatcggcggcatcatcaccgtgttcctgatcgccctggtgctgaccagcaccatcgtgaccctgaagtggatcggctacatctgcctgagaaacagcctgcccaaggtgctgaacttccacaacttcctggcctggcccttccccaacctgccccccctggaggccatggacatggtggaggtgatctacatcaacagaaagaagaaggtgtgggactacaactacgacgacgagagcgacagcgacaccgaggccgcccccagaaccagcggcggcggctacaccatgcacggcctgaccgtgagacccctgggccaggccagcgccaccagcaccgagagccagctgatcgaccccgagagcgaggaggagcccgacctgcccgaggtggacgtggagctgcccaccatgcccaaggacagcccccagcagctggagctgctgagcggcccctgcgagagaagaaagagccccctgcaggaccccttccccgaggaggactacagcagcaccgagggcagcggcggcagaatcaccttcaacgtggacctgaacagcgtgttcctgagagtgctggacgacgaggacagcgacgacctggaggcccccctgatgctgagcagccacctggaggagatggtggaccccgaggaccccgacaacgtgcagagcaaccacctgctggccagcggcgagggcacccagcccaccttccccagccccagcagcgagggcctgtggagcgaggacgcccccagcgaccagagcgacaccagcgagagcgacgtggacctgggcgacggctacatcatgagatag

SEQ ID NO: 265572 - protein, 668 aa, Artificial Sequence
  derived and/or modified sequence
MLGTQGWTKQRKPCPQNASSYSAEMTEPKSVCVSVDEVVSSNMEATETDLLNGHLKKVDNNLTEAQRFSSLPRRAAVNIEFRDLSYSVPEGPWWRKKGYKTLLKGISGKFNSGELVAIMGPSGAGKSTLMNILAGYRETGMKGAVLINGLPRDLRCFRKVSCYIMQDDMLLPHLTVQEAMMVSAHLKLQEKDEGRREMVKEILTALGLLSCANTRTGSLSGGQRKRLAIALELVNNPPVMFFDEPTSGLDSASCFQVVSLMKGLAQGGRSIICTIHQPSAKLFELFDQLYVLSQGQCVYRGKVCNLVPYLRDLGLNCPTYHNPADFVMEVASGEYGDQNSRLVRAVREGMCDSDHKRDLGGDAEVNPFLWHRPSEEDSSSMEGCHSFSASCLTQFCILFKRTFLSIMRDSVLTHLRITSHIGIGLLIGLLYLGIGNEAKKVLSNSGFLFFSMLFLMFAALMPTVLTFPLEMGVFLREHLNYWYSLKAYYLAKTMADVPFQIMFPVAYCSIVYWMTSQPSDAVRFVLFAALGTMTSLVAQSLGLLIGAASTSLQVATFVGPVTAIPVLLFSGFFVSFDTIPTYLQWMSYISYVRYGFEGVILSIYGLDREDLHCDIDETCHFQKSEAILRELDVENAKLYLDFIVLGIFFISLRLIAYFVLRYKIRAER

SEQ ID NO: 265573 - DNA, 2007 bp, Artificial Sequence
  derived and/or modified sequence
atgctaggaacacagggatggaccaagcaacgtaagccttgtcctcaaaacgcctctagctactccgccgagatgaccgagcctaagtccgtctgcgtcagcgtggacgaggttgtgtctagtaacatggaggcgactgaaacagacctgttaaacgggcatctgaaaaaggtggacaacaatctgactgaggctcagcgattctcatctctgccgcggagggctgctgtcaatatcgagttcagagatcttagttacagtgtccccgaaggcccatggtggcgtaaaaagggatataagactctattgaagggaattagcggtaaattcaattcaggcgagttggtggcaatcatgggcccttctggtgcagggaagagtacactgatgaacatcctggccggctatcgggaaaccggaatgaagggtgccgtgttgattaacggcctgccacgggacctgcggtgtttccgcaaagttagctgctacattatgcaggacgatatgttgctgcctcaccttaccgtgcaggaagctatgatggttagtgctcatctgaagctgcaagagaaagatgagggcagacgggaaatggtgaaagagatcctgacagcactcgggttgctgtcctgcgcaaatacccgaactggtagcctgagtggtggccaaaggaaacggctagccatcgccctcgaattggtgaataatccccctgtaatgttcttcgacgaacctacatctggtctggacagcgcttcttgcttccaggttgtgagccttatgaaagggctggctcaagggggccggtcgataatttgcactatccatcagccctctgccaagctgtttgagttgttcgaccagctgtacgtgctgagccagggccagtgcgtctatagagggaaggtgtgtaacctagtcccatatctgcgagatctagggctgaactgccccacgtaccacaatcctgcagatttcgtgatggaggtcgcgtccggtgaatatggcgatcaaaatagcagattggtccgagccgtgagggaggggatgtgtgatagtgaccacaagagggacctgggaggcgatgccgaggtaaaccccttcctctggcaccgtccctctgaagaggattcctcctccatggagggatgtcattcctttagcgcatcctgcctgacgcagttctgtatccttttcaagcgcaccttcctatcgatcatgcgtgacagtgttctgactcacctgagaataactagtcacatcggaattggtttacttatcggcttgctgtacttgggaattggtaatgaggcaaagaaggttctgtccaatagcggattcctttttttttccatgttattcctgatgttcgctgccctcatgcccacggttctcacattccctctggaaatgggagtctttctgcgcgaacacctcaattactggtactcattaaaggcctactatctggcaaagaccatggccgatgtgccctttcagatcatgttccccgtagcttactgttcaattgtatactggatgaccagccaaccctcagacgccgtgagatttgttctgttcgcagcgctgggtacaatgaccagcctagtggctcagtctctaggactcctaattggtgctgcctcaaccagtcttcaggttgccacatttgtgggacccgtcacagcgatccctgtcctgttgttctcaggcttttttgtctccttcgatacaattcctacctatttacagtggatgtcgtatattagctacgttcggtatggtttcgagggagtaatcctgagcatatacggcctggatcgggaggatctgcattgtgatattgatgagacctgccatttccaaaagtccgaagccatactcagagagctagacgttgaaaacgcaaagctgtatttggactttatcgttctggggattttttttatttcactacggctgatcgcatacttcgttctcagatataagatccgtgccgagcgttag

SEQ ID NO: 265574 - DNA, 2007 bp, Artificial Sequence
  derived and/or modified sequence
atgctgggcacccagggctggaccaagcagaggaagccctgcccccagaatgccagcagctacagcgctgagatgacagagcccaagtctgtgtgtgtgtctgtggatgaggtggtgagcagcaacatggaggccacagaaacagacctgctgaatggccacctgaagaaggtggacaacaacctgacagaggcccagcgcttcagcagcctgcccaggagagctgctgtgaacatcgagttccgggacctgagctacagcgtgcctgagggcccctggtggaggaagaagggctacaagaccctgctgaagggcatcagcggcaagttcaacagcggggagctggtggccatcatgggccccagcggggccggcaagagcaccctgatgaacatcctggccggctaccgggagaccggcatgaagggagctgtgctgatcaatggcctgccccgggacctgcgctgcttcaggaaggtgtcctgctacatcatgcaggatgacatgctgctgccccacctgactgtgcaggaggccatgatggtgtctgcccacctgaagctgcaggagaaggatgagggcagaagagagatggtgaaggagatcctgacagccctgggcctgctgagctgtgccaacaccaggacaggcagcctgagcggcggccagaggaagaggctggccatcgccctggagctggtgaacaacccccctgtgatgttctttgatgagcccaccagcggcctggacagcgccagctgcttccaggtggtgtccctgatgaagggcctggcccagggcggccgcagcatcatctgcaccatccaccagcccagcgccaagctgtttgagctgtttgaccagctgtatgtgctgagccagggccagtgtgtgtaccggggcaaggtgtgcaacctggtgccctacctgcgggacctgggcctgaactgccccacctaccacaacccagctgactttgtgatggaggtggccagcggggagtatggagaccagaacagccggctggtgcgggctgtgcgggagggcatgtgtgacagcgaccacaagagggacctgggcggagatgctgaggtgaaccccttcctgtggcaccggcccagcgaggaggacagcagctccatggagggctgccacagcttcagcgccagctgcctgacccagttctgcatcctcttcaagaggaccttcctgagcatcatgagggacagcgtgctgacccacctgcgcatcaccagccacatcggcatcggcctgctgattggcctgctgtacctgggcattggaaatgaggccaagaaggtgctgagcaacagcggcttcctgttcttctccatgctgttcctgatgtttgctgccctgatgcccaccgtgctgaccttccccctggagatgggcgtcttcctgcgggagcacctgaactactggtacagcctgaaggcctactacctggccaagaccatggctgatgtgcccttccagatcatgtttcctgtggcctactgcagcatcgtgtactggatgaccagccagcccagtgatgctgtgcgctttgtgctgtttgctgccctgggcaccatgaccagcctggtggcccagagcctgggcctgctgattggagctgccagcaccagcctgcaggtggccacctttgtgggccctgtgacagccatccctgtgctgctcttcagcggcttctttgtgtcctttgacaccatccccacctacctgcagtggatgagctacatctcctatgtgcgctatggctttgagggcgtcatcctgagcatctacggcctggaccgggaggacctgcactgtgacattgatgagacctgccacttccagaagtctgaggccatcctgcgggagctggatgtggagaatgccaagctgtacctggacttcatcgtgctgggcatcttcttcatcagcctgcggctgattgcctactttgtgctgcgctacaagatccgggcagagaggtag

SEQ ID NO: 265575 - DNA, 2007 bp, Artificial Sequence
  derived and/or modified sequence
atgctgggcacccagggctggaccaagcagcggaagccctgcccccagaatgcttcttcgtattctgccgagatgactgagccgaagagcgtctgcgtgagcgtagacgaggttgttagctccaatatggaagcgacggagactgatttgctcaacgggcacctgaaaaaagttgacaataatctaaccgaagcacagagattctcatccctacctaggcgggccgccgtaaatattgagtttcgagacctgtcttactcggtgcctgaaggcccctggtggcgcaaaaaaggttataagacactgctgaagggaatatcagggaagtttaacagcggcgagctcgttgctataatgggaccttctggggcaggcaagtcaacgttgatgaatattctcgccggctaccgcgaaaccggtatgaaaggggccgtgttaataaatggactcccccgggatctgcgttgttttagaaaggtgtcatgttatattatgcaagatgatatgcttttaccacacctgactgtgcaagaggctatgatggtgagcgctcacctgaaactacaggagaaggacgagggcagacgagagatggtgaaagaaatcctgactgccttgggtctcctgtcttgcgctaataccaggaccgggtctctgagcggcggccaaagaaaacgactcgcgatcgctttggagctcgtgaacaaccctcctgttatgtttttcgacgagccgaccagcggcctagatagtgcgtcctgtttccaagtggtgagcctcatgaaaggactagcccaggggggccggagtattatctgtaccatccaccagcctagcgccaagctcttcgagctgttcgatcagttatacgtcctctcccagggtcagtgtgtgtataggggtaaggtctgcaatctggtaccatatctccgagaccttgggttgaattgtccgacctaccataatcctgccgattttgtgatggaggtagcttccggcgaatatggcgaccagaacagtagactcgttcgcgctgttcgcgagggcatgtgcgacagcgaccataaacgggatctgggtggagacgcagaagtgaatcctttcttgtggcatcgacctagcgaagaagattcttcctccatggaaggttgtcatagtttcagcgcaagttgtttgactcagttttgcatacttttcaaacgcaccttcctttctataatgagagactctgttcttacacacttgcgaattacaagccacatcggtatcggacttctgattggactcctgtacctgggcattgggaatgaggcaaagaaggtcctaagcaactcagggtttctctttttcagtatgttgttcctgatgttcgcggcactgatgcccaccgttttaacattcccgttggaaatgggcgtgttcttgagggaacacttgaactattggtatagtttgaaagcctattacttggccaagaccatggccgatgtcccgttccagataatgttcccagtcgcttattgttccatagtgtactggatgacctctcagcctagcgacgcagtacggtttgttcttttcgcggccttgggcaccatgacctcactggtcgctcagtctttgggtctgctgattggtgccgcatcaacctccttgcaggtcgcgacattcgtcggtcctgtcaccgcaattccagtgctgctcttttctggcttttttgtatcatttgatactattccaacctacttgcagtggatgtcatacatctcttatgtgcgttacggctttgagggcgtcattttgtctatttacggattggaccgagaagaccttcactgcgatattgatgagacatgccactttcagaaatccgaggcaatcctccgcgagctcgacgtagagaatgccaagttatacctggatttcattgtgctcggtatctttttcatcagccttcgcctgatagcttatttcgtccttcgatataaaattagagccgagcggtag

SEQ ID NO: 265576 - DNA, 2007 bp, Artificial Sequence
  derived and/or modified sequence
atgctgggaactcaggggtggactaagcagcgcaaaccttgcccccaaaacgcgagcagttacagcgcagaaatgaccgaacccaaatcagtatgcgtgagtgtagacgaggtggtatcgagtaatatggaggccacagaaaccgatctcctcaatggacacctgaagaaagtcgacaacaatctgactgaggctcaacgcttctcttcactgcccaggcgggcagccgtgaacatcgaatttcgggatctttcctactcagtgcccgaaggtccttggtggcggaagaagggctacaagactctgctgaaaggcataagtggcaaattcaactccggtgagcttgtcgctattatgggaccctccggcgctgggaaatcaacgctgatgaacatattggccggataccgggaaaccggaatgaagggcgcagtgcttatcaacggcttacctcgagatcttaggtgttttcgcaaagtgagttgctacataatgcaggacgatatgcttttgccccacctgaccgtgcaggaggccatgatggtgtccgctcatctgaagctgcaggaaaaagacgaaggaagacgggaaatggtaaaagagatactgactgcactgggtttgctctcatgcgccaataccaggactggatcattgtccggcggacaaaggaagaggctggccatagcgcttgaactggtgaataatcccccagtaatgttcttcgatgaaccgaccagcggccttgactccgcctcatgttttcaggtggtttctctcatgaagggcctggcccaggggggtcggtctattatttgtactatccaccagccttccgcaaagctgttcgaacttttcgaccagttgtacgtactctcacagggtcagtgtgtctaccgaggcaaggtatgcaatttggtcccatacctgagggacctcgggctgaactgccccacctaccacaaccctgccgatttcgtgatggaagtggcctcaggcgaatacggtgatcagaacagcaggcttgtgagagccgtgcgagaaggtatgtgcgactctgatcataaacgagatttaggtggcgacgccgaagtgaacccttttttgtggcatcgacccagtgaagaagactctagtagtatggaagggtgtcactctttcagcgccagctgcctaactcagttttgtattttgtttaagagaaccttcctgtctatcatgcgggacagtgtgcttacccacctgagaattactagccacatagggattggattactgataggcctcctgtacctgggcatcggaaacgaggctaagaaagtgctgtctaactctggttttctgttcttcagcatgctttttctgatgttcgccgcattaatgccaacagttcttacctttcctctagagatgggagtgtttctgcgtgagcatttgaattattggtactctttaaaggcctactacttagccaaaacgatggccgacgtgccttttcagattatgttccccgttgcatactgctcaattgtgtattggatgacatctcagccctcagatgccgtgaggttcgtcttatttgccgctctcggaactatgacgagtctggtggctcaatcactgggcctgctcataggagccgcaagtaccagcctgcaagttgccacatttgtaggacccgtgaccgccattccggtgttgctgttctcaggattctttgtaagctttgacacgatcccaacgtatctccagtggatgtcttacatcagttatgtccgctatgggtttgaaggtgtgatcctgtcaatttatggactggatcgggaggatctccactgcgatatcgacgagacttgccattttcaaaagtccgaagccattcttcgcgaactggatgtggagaacgctaaattgtatctggatttcatcgttcttggtattttctttatctccctccgcctgatagcttacttcgtcctaagatacaaaatcagggctgagcgttag

SEQ ID NO: 265577 - DNA, 3119 bp, Artificial Sequence
  derived and/or modified sequence
agacactgaatcatcatttgtagtttggggggctttacatgcctgcagtggtgaaaactgaaattttgtcccacttaagggagtttcttcttccctttattaattgcaaaataaatatatgtcacttcagagggcagcagctggactacctatgtttgtggcgctacaccaacctgaacttcgcttcctgagacctaagattcagccccgtgctcagcagacatcagggatcaccgactctgtgccaggagctgttcttgatgctgggaacgcaggggtggacaaaacagagaaagccctgccctcagaatgccagcagttactctgcagagatgacggagcccaagtcggtgtgtgtctcggtggatgaggtggtgtccagcaacatggaggccactgagacggacctgctgaatggacatctgaaaaaagtagataataacctcacggaagcccagcgcttctcctccttgcctcggagggcagctgtgaacattgaattcagggacctttcctattcggttcctgaaggaccctggtggaggaagaaaggatacaagaccctcctgaaaggaatttccgggaagttcaatagtggtgagttggtggccattatgggtccttccggggccgggaagtccacgctgatgaacatcctggctggatacagggagacgggcatgaagggggccgtcctcatcaacggcctgccccgggacctgcgctgcttccggaaggtgtcctgctacatcatgcaggatgacatgctgctgccgcatctcactgtgcaggaggccatgatggtgtcggcacatctgaagcttcaggagaaggatgaaggcagaagggaaatggtcaaggagatactgacagcgctgggcttgctgtcttgcgccaacacgcggaccgggagcctgtcaggtggtcagcgcaagcgcctggccatcgcgctggagctggtgaacaaccctccagtcatgttcttcgatgagcccaccagcggcctggacagcgcctcctgcttccaggtggtctcgctgatgaaagggctcgctcaagggggtcgctccatcatttgcaccatccaccagcccagcgccaaactcttcgagctgttcgaccagctttacgtcctgagtcaaggacaatgtgtgtaccggggaaaagtctgcaatcttgtgccatatttgagggatttgggtctgaactgcccaacctaccacaacccagcagattttgtcatggaggttgcatccggcgagtacggtgatcagaacagtcggctggtgagagcggttcgggagggcatgtgtgactcagaccacaagagagacctcgggggtgatgccgaggtgaacccttttctttggcaccggccctctgaagaggactcctcgtccatggaaggctgccacagcttctctgccagctgcctcacgcagttctgcatcctcttcaagaggaccttcctcagcatcatgagggactcggtcctgacacacctgcgcatcacctcgcacattgggatcggcctcctcattggcctgctgtacttggggatcgggaacgaagccaagaaggtcttgagcaactccggcttcctcttcttctccatgctgttcctcatgttcgcggccctcatgcctactgttctgacatttcccctggagatgggagtctttcttcgggaacacctgaactactggtacagcctgaaggcctactacctggccaagaccatggcagacgtgccctttcagatcatgttcccagtggcctactgcagcatcgtgtactggatgacgtcgcagccgtccgacgccgtgcgctttgtgctgtttgccgcgctgggcaccatgacctccctggtggcacagtccctgggcctgctgatcggagccgcctccacgtccctgcaggtggccactttcgtgggcccagtgacagccatcccggtgctcctgttctcggggttcttcgtcagcttcgacaccatccccacgtacctacagtggatgtcctacatctcctatgtcaggtatgggttcgaaggggtcatcctctccatctatggcttagaccgggaagatctgcactgtgacatcgacgagacgtgccacttccagaagtcggaggccatcctgcgggagctggacgtggaaaatgccaagctgtacctggacttcatcgtactcgggattttcttcatctccctccgcctcattgcctattttgtcctcaggtacaaaatccgggcagagaggtaaaacacctgaatgccaggaaacaggaagattagacactgtggccgagggcacgtctagaatcgaggaggcaagcctgtgcccgaccgacgacacagagactcttctgatccaacccctagaaccgcgttgggtttgtgggtgtctcgtgctcagccactctgcccagctgggttggatcttctctccattcccctttctagctttaactaggaagatgtaggcagattggtggtttttttttttttaacatacagaattttaaataccacaactggggcagaatttaaagctgcaacacagctggtgatgagaggcttcctcagtccagtcgctccttagcaccaggcaccgtgggtcctggatggggaactgcaagcagcctctcagctgatggctgcacagtcagatgtctggtggcagagagtccgagcatggagcgattccattttatgactgttgtttttcacattttcatctttctaaggtgtgtctcttttccaatgagaagtcatttttgcaagccaaaagtcgatcaatcgcattcattttaagaaattatacctttttagtacttgctgaagaatgattcagggtaaatcacatactttgtttagagaggcgaggggtttaaccgagtcacccagctggtctcatacatagacagcacttgtgaaggattgaatgcaggttccaggtggagggaagacgtggacaccatctccactgagccatgcagacatttttaaaagctatacaaaaaattgtgagaagacattggccaactctttcaaagtctttctttttccacgtgcttcttattttaagcgaaatatattgtttgtttcttcctaa

SEQ ID NO: 265578 - DNA, 2007 bp, Artificial Sequence
  derived and/or modified sequence
atgctgggcacccagggctggaccaagcagagaaagccctgcccccagaacgccagcagctacagcgccgagatgaccgagcccaagagcgtgtgcgtgagcgtggacgaggtggtgagcagcaacatggaggccaccgagaccgacctgctgaacggccacctgaagaaggtggacaacaacctgaccgaggcccagagattcagcagcctgcccagaagagccgccgtgaacatcgagttcagagacctgagctacagcgtgcccgagggcccctggtggagaaagaagggctacaagaccctgctgaagggcatcagcggcaagttcaacagcggcgagctggtggccatcatgggccccagcggcgccggcaagagcaccctgatgaacatcctggccggctacagagagaccggcatgaagggcgccgtgctgatcaacggcctgcccagagacctgagatgcttcagaaaggtgagctgctacatcatgcaggacgacatgctgctgccccacctgaccgtgcaggaggccatgatggtgagcgcccacctgaagctgcaggagaaggacgagggcagaagagagatggtgaaggagatcctgaccgccctgggcctgctgagctgcgccaacaccagaaccggcagcctgagcggcggccagagaaagagactggccatcgccctggagctggtgaacaacccccccgtgatgttcttcgacgagcccaccagcggcctggacagcgccagctgcttccaggtggtgagcctgatgaagggcctggcccagggcggcagaagcatcatctgcaccatccaccagcccagcgccaagctgttcgagctgttcgaccagctgtacgtgctgagccagggccagtgcgtgtacagaggcaaggtgtgcaacctggtgccctacctgagagacctgggcctgaactgccccacctaccacaaccccgccgacttcgtgatggaggtggccagcggcgagtacggcgaccagaacagcagactggtgagagccgtgagagagggcatgtgcgacagcgaccacaagagagacctgggcggcgacgccgaggtgaaccccttcctgtggcacagacccagcgaggaggacagcagcagcatggagggctgccacagcttcagcgccagctgcctgacccagttctgcatcctgttcaagagaaccttcctgagcatcatgagagacagcgtgctgacccacctgagaatcaccagccacatcggcatcggcctgctgatcggcctgctgtacctgggcatcggcaacgaggccaagaaggtgctgagcaacagcggcttcctgttcttcagcatgctgttcctgatgttcgccgccctgatgcccaccgtgctgaccttccccctggagatgggcgtgttcctgagagagcacctgaactactggtacagcctgaaggcctactacctggccaagaccatggccgacgtgcccttccagatcatgttccccgtggcctactgcagcatcgtgtactggatgaccagccagcccagcgacgccgtgagattcgtgctgttcgccgccctgggcaccatgaccagcctggtggcccagagcctgggcctgctgatcggcgccgccagcaccagcctgcaggtggccaccttcgtgggccccgtgaccgccatccccgtgctgctgttcagcggcttcttcgtgagcttcgacaccatccccacctacctgcagtggatgagctacatcagctacgtgagatacggcttcgagggcgtgatcctgagcatctacggcctggacagagaggacctgcactgcgacatcgacgagacctgccacttccagaagagcgaggccatcctgagagagctggacgtggagaacgccaagctgtacctggacttcatcgtgctgggcatcttcttcatcagcctgagactgatcgcctacttcgtgctgagatacaagatcagagccgagagatag

SEQ ID NO: 265579 - protein, 663 aa, Artificial Sequence
  derived and/or modified sequence
MIMRLPQPHGTNASSYSAEMTEPKSVCVSVDEVVSSNMEATETDLLNGHLKKVDNNLTEAQRFSSLPRRAAVNIEFRDLSYSVPEGPWWRKKGYKTLLKGISGKFNSGELVAIMGPSGAGKSTLMNILAGYRETGMKGAVLINGLPRDLRCFRKVSCYIMQDDMLLPHLTVQEAMMVSAHLKLQEKDEGRREMVKEILTALGLLSCANTRTGSLSGGQRKRLAIALELVNNPPVMFFDEPTSGLDSASCFQVVSLMKGLAQGGRSIICTIHQPSAKLFELFDQLYVLSQGQCVYRGKVCNLVPYLRDLGLNCPTYHNPADFVMEVASGEYGDQNSRLVRAVREGMCDSDHKRDLGGDAEVNPFLWHRPSEEDSSSMEGCHSFSASCLTQFCILFKRTFLSIMRDSVLTHLRITSHIGIGLLIGLLYLGIGNEAKKVLSNSGFLFFSMLFLMFAALMPTVLTFPLEMGVFLREHLNYWYSLKAYYLAKTMADVPFQIMFPVAYCSIVYWMTSQPSDAVRFVLFAALGTMTSLVAQSLGLLIGAASTSLQVATFVGPVTAIPVLLFSGFFVSFDTIPTYLQWMSYISYVRYGFEGVILSIYGLDREDLHCDIDETCHFQKSEAILRELDVENAKLYLDFIVLGIFFISLRLIAYFVLRYKIRAER

SEQ ID NO: 265580 - DNA, 1992 bp, Artificial Sequence
  derived and/or modified sequence
atgatcatgcggttgcctcagccacacggaacgaacgcctcctcttactccgccgaaatgacagagcccaaatccgtgtgtgtgagcgtggatgaagtggtgtcatccaatatggaggcaacggaaaccgatctgctgaatggccacctcaagaaggtagacaacaatcttaccgaggcccaaaggtttagcagcctgcctagaagggccgctgtcaatattgaattcagagatctctcctactcagttccggagggaccatggtggagaaaaaagggctacaaaactttgttgaagggcatatccggtaaattcaactctggagagttggttgcaataatggggccatctggagctggcaagagcactctgatgaacatcttagcagggtaccgtgagactggaatgaagggagcagtcttgatcaatggcctgcctcgggatctgaggtgtttccgaaaagtcagctgttatattatgcaggatgacatgctgctgccacatctcacagtgcaggaagccatgatggtttccgctcacctgaagctccaggagaaggacgaagggcgaagggaaatggtgaaagagatcctgacagccctaggtttgctgtcgtgtgccaacacgcgcacgggatccctcagcggcggacagcggaaacggctggccatcgcattggagcttgtcaacaatccacccgtgatgtttttcgacgagcccacgtccggactcgattcagcatcttgcttccaggtggtgtccctaatgaagggtttggcccagggggggcgcagtattatatgcaccatccaccagccaagtgccaaactgttcgagctattcgatcaattatacgtcctgtcccaggggcagtgcgtctaccggggcaaggtgtgcaacctggtgccctacttgcgcgatctcggactcaactgccccacatatcataacccagctgactttgtgatggaagtggcctccggggagtatggggaccaaaatagtagattggtccgggcagtccgggagggtatgtgtgacagcgatcataagcgggatctaggcggggatgccgaagtgaaccctttcttgtggcatagaccatcggaagaggattctagtagcatggagggctgccactcctttagtgcctcctgcctcactcagttctgtatactattcaagagaactttcctgagcatcatgcgtgactcagtactgacccatctcaggataactagtcacatagggatagggctcctgatcggcctgttatacctggggataggaaacgaggccaagaaggtgctatctaatagcggctttttgtttttctcaatgctattccttatgttcgccgccctgatgcctaccgtcctgacttttccactggagatgggggtgtttctcagagagcacctgaattactggtattcattaaaagcatactatctggccaaaaccatggccgacgtcccatttcaaatcatgttccctgtggcctactgcagcattgtgtactggatgacttcccagccgtcagacgccgtacgtttcgtgttgttcgccgccctcggcactatgaccagcctggtagctcagtcactagggttgctgatcggagccgcctccacatcccttcaggtagcgacatttgtgggccccgtgacagctattcctgtcttgttattctcagggttcttcgtttcttttgacaccattcctacatacttgcagtggatgtcctacatcagctatgtaagatacggtttcgagggggtgattctctctatttatggcctagatagggaagatcttcactgtgacatagatgaaacttgccacttccagaaatcggaggctatactccgtgagctcgacgtggagaatgcgaagctttaccttgatttcattgtcttaggcattttttttatatcactgagactgatcgcctattttgtcctccgctataaaatcagggctgagcgctag

SEQ ID NO: 265581 - DNA, 1992 bp, Artificial Sequence
  derived and/or modified sequence
atgatcatgaggctgccccagccccacggcaccaatgccagcagctacagcgctgagatgacagagcccaagtctgtgtgtgtgtctgtggatgaggtggtgagcagcaacatggaggccacagaaacagacctgctgaatggccacctgaagaaggtggacaacaacctgacagaggcccagcgcttcagcagcctgccccggcgggctgctgtgaacatcgagttccgggacctgagctacagcgtgcctgagggcccctggtggaggaagaagggctacaagaccctgctgaagggcatcagcggcaagttcaacagcggggagctggtggccatcatgggccccagcggggccggcaagagcaccctgatgaacatcctggccggctaccgggagaccggcatgaagggagctgtgctgatcaatggcctgccccgggacctgcgctgcttcaggaaggtgtcctgctacatcatgcaggatgacatgctgctgccccacctgactgtgcaggaggccatgatggtgtctgcccacctgaagctgcaggagaaggatgagggccggcgggagatggtgaaggagatcctgacagccctgggcctgctgagctgtgccaacaccaggacaggcagcctgagcggcggccagaggaagaggctggccatcgccctggagctggtgaacaacccccctgtgatgttctttgatgagcccaccagcggcctggacagcgccagctgcttccaggtggtgtccctgatgaagggcctggcccagggcggccgcagcatcatctgcaccatccaccagcccagcgccaagctgtttgagctgtttgaccagctgtatgtgctgagccagggccagtgtgtgtaccggggcaaggtgtgcaacctggtgccctacctgcgggacctgggcctgaactgccccacctaccacaacccagctgactttgtgatggaggtggccagcggggagtatggagaccagaacagccggctggtgcgggctgtgcgggagggcatgtgtgacagcgaccacaagagggacctgggcggagatgctgaggtgaaccccttcctgtggcaccggcccagcgaggaggacagcagctccatggagggctgccacagcttcagcgccagctgcctgacccagttctgcatcctcttcaagaggaccttcctgagcatcatgagggacagcgtgctgacccacctgcgcatcaccagccacatcggcatcggcctgctgattggcctgctgtacctgggcattggaaatgaggccaagaaggtgctgagcaacagcggcttcctgttcttctccatgctgttcctgatgtttgctgccctgatgcccaccgtgctgaccttccccctggagatgggcgtcttcctgcgggagcacctgaactactggtacagcctgaaggcctactacctggccaagaccatggctgatgtgcccttccagatcatgtttcctgtggcctactgcagcatcgtgtactggatgaccagccagcccagtgatgctgtgcgctttgtgctgtttgctgccctgggcaccatgaccagcctggtggcccagagcctgggcctgctgattggagctgccagcaccagcctgcaggtggccacctttgtgggccctgtgacagccatccctgtgctgctcttcagcggcttctttgtgtcctttgacaccatccccacctacctgcagtggatgagctacatctcctatgtgcgctatggctttgaaggagtcatcctgagcatctacggcctggaccgggaggacctgcactgtgacattgatgagacctgccacttccagaagtctgaggccatcctgcgggagctggatgtggagaatgccaagctgtacctggacttcatcgtgctgggcatcttcttcatcagcctgcggctcatcgcctactttgtgctgcgctacaagatccgggcagagaggtag

SEQ ID NO: 265582 - DNA, 1992 bp, Artificial Sequence
  derived and/or modified sequence
atgatcatgcggctgccccagccccacggcaccaacgccagcagctatagtgcagagatgactgaacccaagtccgtctgtgtcagcgtggacgaggtagttagcagcaatatggaagccacagagacagaccttcttaatgggcatctcaaaaaggtagataacaacctgacagaggcgcaaagattcagtagcctccctagaagggcagccgttaacattgaattccgggatttgtcctattccgtacccgaaggcccttggtggaggaagaagggatataagaccctcctgaagggaatttccggaaaatttaattctggggagttggtggctatcatgggcccgagtggggctggaaagtcaacgctgatgaacatccttgccggttacagagagacaggaatgaagggggccgtgctgattaacggtctacctcgggacctcaggtgctttcgtaaggtcagctgttatattatgcaagatgacatgctgctgccccatctgacagtgcaagaggccatgatggtttctgctcatctgaagctgcaggagaaggacgaagggcggcgcgagatggtgaaggagatcctgaccgccctcgggttactttcctgtgcgaataccagaacgggttcactgagcggcggccaacggaaacgccttgccatcgcgttggagcttgtgaacaaccctcccgtgatgttctttgacgagcccacctccgggctcgacagcgcatcttgttttcaggtcgtttccctcatgaagggccttgcccagggaggtcgcagtatcatttgcaccatccaccagcccagcgcgaagctcttcgaactctttgaccagctctacgtcctgtctcaaggccaatgtgtctacagaggaaaagtctgtaacctagtcccatatctacgcgacctcggcctgaattgccctacttaccataacccagctgattttgtgatggaggtcgcttccggggaatacggggaccagaatagtagactggtccgcgccgttagggaagggatgtgcgatagcgatcacaagcgcgatctcggcggcgatgcggaagtaaacccctttctctggcatagaccaagtgaggaagatagctcaagtatggaaggttgccactccttctccgcctcgtgtctgactcagttctgtatcttatttaagaggaccttcctgtccatcatgcgggatagcgtccttactcatttgcgaatcacttctcatatcggaattggtctcctcatcggcctgctataccttggcattggaaacgaggctaagaaggtactgagcaactcaggctttctcttctttagcatgttgttcctgatgtttgccgctttgatgcctaccgtgctaaccttccccctggagatgggggtttttctgcgagagcatctgaactattggtacagcctgaaggcttattatctggccaaaaccatggccgacgttccatttcagattatgttcccagtggcttactgctcgatcgtatattggatgacttcacagccgtccgacgcagtgcgatttgtcctgtttgctgcgttaggaaccatgacctcacttgtcgcccagtcactcgggctgttgattggcgccgcaagcacctcccttcaagtggctacgtttgtaggaccagtgactgccatcccagtcttgctgttctcaggtttttttgtgagtttcgacactatccctacgtacttgcagtggatgtcgtatataagctatgtaaggtatggatttgaaggcgttatcctcagtatttacggactcgaccgggaggacttgcactgcgacattgatgaaacctgccactttcagaagtctgaagcaatcctgagggagctcgacgtagaaaacgctaagttgtacctggatttcatcgtgttagggatttttttcatttcgctaaggctgattgcttacttcgttcttaggtataaaatccgggcggaacgttag

SEQ ID NO: 265583 - DNA, 1992 bp, Artificial Sequence
  derived and/or modified sequence
atgataatgagactgccacagccacacggcaccaacgcttcttcttatagcgcagaaatgactgaaccaaagagcgtgtgcgtgtctgtggatgaggtcgtgtcatcaaatatggaggcaacagagacggatctgttaaatgggcacctaaagaaggttgataacaatctgaccgaagcccagagattcagttcccttcccagacgtgctgcggttaatattgagttccgggatttatcgtattctgtgcccgaaggtccttggtggagaaagaaagggtataagaccctgctgaagggaatcagtggaaaatttaattccggtgagctcgtcgctatcatgggcccttccggtgctggcaagtccaccctgatgaacatcttggctggatatcgtgagactggaatgaagggcgcagtgctcataaacgggcttcctagagatttacggtgcttccggaaggtgagttgctacatcatgcaggacgacatgctcctgccccaccttaccgtccaggaagccatgatggtgagcgctcacctgaaattgcaggagaaggacgaggggagacgcgagatggtcaaagagattctcactgccctcggtcttctgtcttgtgctaatactcgcaccgggagcttaagcggaggtcagcgtaaaaggctcgctatcgctttagaactggtgaataacccccctgttatgttttttgatgagccaacttccggattggattccgcttcatgttttcaggtggttagcctgatgaagggccttgcacagggaggacgatctatcatctgcacaatccaccagcccagtgccaagttgttcgaacttttcgaccagctttacgtgctatctcaggggcagtgtgtgtatcggggtaaggtgtgcaatctggtcccttacctccgggacctgggcctgaattgccctacctatcataaccccgctgactttgtgatggaggtggcttcaggcgaatacggagaccagaatagcagactcgtgcgcgcagtcagggagggtatgtgtgactctgatcacaaacgggatctgggaggggacgctgaggtcaaccccttcttgtggcaccgcccttcagaagaggacagctcaagcatggagggttgccattcatttagtgcttcatgtcttacccagttttgtatcctcttcaagaggacatttctgagcattatgagggacagcgtgctgacacatctacggatcacaagccacatcggtataggattgctgatcggattgctgtatctgggcatcggaaacgaggcaaaaaaagttctatctaattccggtttcttattcttcagtatgctgtttctcatgttcgctgctctgatgcctactgtcttaaccttcccactggaaatgggggtgtttctgcgtgaacacctgaactattggtattctcttaaggcctattatcttgccaaaactatggcggatgttccattccagatcatgtttccagtagcttactgttctatcgtgtattggatgacatcccagccttcagacgcggtgcgatttgtgcttttcgcagccctcgggacaatgacctcactggtggcccagtccttgggactgctgatcggtgccgcttccacaagtttgcaggtggctacctttgtgggacccgtaacagcaatcccagtgttactcttctccggatttttcgtaagcttcgatacgatccccacctatttgcagtggatgtcatacatcagttacgtgagatacggcttcgaaggggtcattctgtccatctacggtctcgacagggaggacctccactgcgatatagatgagacctgtcacttccaaaagtcagaagccatacttagggaactagacgttgaaaacgcaaaattatatcttgattttatcgtgctaggcatttttttcataagtcttagacttatcgcctactttgttctcagatataagatacgagcagaaagatag

SEQ ID NO: 265584 - DNA, 2923 bp, Artificial Sequence
  derived and/or modified sequence
gctttataaaggggagtttccctgcacaagctctctctcttgtctgccgccatgtgagacatgcctttcaccttccgccatgatcatgaggcttccccagccacatggaactaatgccagcagttactctgcagagatgacggagcccaagtcggtgtgtgtctcggtggatgaggtggtgtccagcaacatggaggccactgagacggacctgctgaatggacatctgaaaaaagtagataataacctcacggaagcccagcgcttctcctccttgcctcggagggcagctgtgaacattgaattcagggacctttcctattcggttcctgaaggaccctggtggaggaagaaaggatacaagaccctcctgaaaggaatttccgggaagttcaatagtggtgagttggtggccattatgggtccttccggggccgggaagtccacgctgatgaacatcctggctggatacagggagacgggcatgaagggggccgtcctcatcaacggcctgccccgggacctgcgctgcttccggaaggtgtcctgctacatcatgcaggatgacatgctgctgccgcatctcactgtgcaggaggccatgatggtgtcggcacatctgaagcttcaggagaaggatgaaggcagaagggaaatggtcaaggagatactgacagcgctgggcttgctgtcttgcgccaacacgcggaccgggagcctgtcaggtggtcagcgcaagcgcctggccatcgcgctggagctggtgaacaaccctccagtcatgttcttcgatgagcccaccagcggcctggacagcgcctcctgcttccaggtggtctcgctgatgaaagggctcgctcaagggggtcgctccatcatttgcaccatccaccagcccagcgccaaactcttcgagctgttcgaccagctttacgtcctgagtcaaggacaatgtgtgtaccggggaaaagtctgcaatcttgtgccatatttgagggatttgggtctgaactgcccaacctaccacaacccagcagattttgtcatggaggttgcatccggcgagtacggtgatcagaacagtcggctggtgagagcggttcgggagggcatgtgtgactcagaccacaagagagacctcgggggtgatgccgaggtgaacccttttctttggcaccggccctctgaagaggactcctcgtccatggaaggctgccacagcttctctgccagctgcctcacgcagttctgcatcctcttcaagaggaccttcctcagcatcatgagggactcggtcctgacacacctgcgcatcacctcgcacattgggatcggcctcctcattggcctgctgtacttggggatcgggaacgaagccaagaaggtcttgagcaactccggcttcctcttcttctccatgctgttcctcatgttcgcggccctcatgcctactgttctgacatttcccctggagatgggagtctttcttcgggaacacctgaactactggtacagcctgaaggcctactacctggccaagaccatggcagacgtgccctttcagatcatgttcccagtggcctactgcagcatcgtgtactggatgacgtcgcagccgtccgacgccgtgcgctttgtgctgtttgccgcgctgggcaccatgacctccctggtggcacagtccctgggcctgctgatcggagccgcctccacgtccctgcaggtggccactttcgtgggcccagtgacagccatcccggtgctcctgttctcggggttcttcgtcagcttcgacaccatccccacgtacctacagtggatgtcctacatctcctatgtcaggtatgggttcgaaggggtcatcctctccatctatggcttagaccgggaagatctgcactgtgacatcgacgagacgtgccacttccagaagtcggaggccatcctgcgggagctggacgtggaaaatgccaagctgtacctggacttcatcgtactcgggattttcttcatctccctccgcctcattgcctattttgtcctcaggtacaaaatccgggcagagaggtaaaacacctgaatgccaggaaacaggaagattagacactgtggccgagggcacgtctagaatcgaggaggcaagcctgtgcccgaccgacgacacagagactcttctgatccaacccctagaaccgcgttgggtttgtgggtgtctcgtgctcagccactctgcccagctgggttggatcttctctccattcccctttctagctttaactaggaagatgtaggcagattggtggtttttttttttttaacatacagaattttaaataccacaactggggcagaatttaaagctgcaacacagctggtgatgagaggcttcctcagtccagtcgctccttagcaccaggcaccgtgggtcctggatggggaactgcaagcagcctctcagctgatggctgcacagtcagatgtctggtggcagagagtccgagcatggagcgattccattttatgactgttgtttttcacattttcatctttctaaggtgtgtctcttttccaatgagaagtcatttttgcaagccaaaagtcgatcaatcgcattcattttaagaaattatacctttttagtacttgctgaagaatgattcagggtaaatcacatactttgtttagagaggcgaggggtttaaccgagtcacccagctggtctcatacatagacagcacttgtgaaggattgaatgcaggttccaggtggagggaagacgtggacaccatctccactgagccatgcagacatttttaaaagctatacaaaaaattgtgagaagacattggccaactctttcaaagtctttctttttccacgtgcttcttattttaagcgaaatatattgtttgtttcttcctaa

SEQ ID NO: 265585 - DNA, 1992 bp, Artificial Sequence
  derived and/or modified sequence
atgatcatgagactgccccagccccacggcaccaacgccagcagctacagcgccgagatgaccgagcccaagagcgtgtgcgtgagcgtggacgaggtggtgagcagcaacatggaggccaccgagaccgacctgctgaacggccacctgaagaaggtggacaacaacctgaccgaggcccagagattcagcagcctgcccagaagagccgccgtgaacatcgagttcagagacctgagctacagcgtgcccgagggcccctggtggagaaagaagggctacaagaccctgctgaagggcatcagcggcaagttcaacagcggcgagctggtggccatcatgggccccagcggcgccggcaagagcaccctgatgaacatcctggccggctacagagagaccggcatgaagggcgccgtgctgatcaacggcctgcccagagacctgagatgcttcagaaaggtgagctgctacatcatgcaggacgacatgctgctgccccacctgaccgtgcaggaggccatgatggtgagcgcccacctgaagctgcaggagaaggacgagggcagaagagagatggtgaaggagatcctgaccgccctgggcctgctgagctgcgccaacaccagaaccggcagcctgagcggcggccagagaaagagactggccatcgccctggagctggtgaacaacccccccgtgatgttcttcgacgagcccaccagcggcctggacagcgccagctgcttccaggtggtgagcctgatgaagggcctggcccagggcggcagaagcatcatctgcaccatccaccagcccagcgccaagctgttcgagctgttcgaccagctgtacgtgctgagccagggccagtgcgtgtacagaggcaaggtgtgcaacctggtgccctacctgagagacctgggcctgaactgccccacctaccacaaccccgccgacttcgtgatggaggtggccagcggcgagtacggcgaccagaacagcagactggtgagagccgtgagagagggcatgtgcgacagcgaccacaagagagacctgggcggcgacgccgaggtgaaccccttcctgtggcacagacccagcgaggaggacagcagcagcatggagggctgccacagcttcagcgccagctgcctgacccagttctgcatcctgttcaagagaaccttcctgagcatcatgagagacagcgtgctgacccacctgagaatcaccagccacatcggcatcggcctgctgatcggcctgctgtacctgggcatcggcaacgaggccaagaaggtgctgagcaacagcggcttcctgttcttcagcatgctgttcctgatgttcgccgccctgatgcccaccgtgctgaccttccccctggagatgggcgtgttcctgagagagcacctgaactactggtacagcctgaaggcctactacctggccaagaccatggccgacgtgcccttccagatcatgttccccgtggcctactgcagcatcgtgtactggatgaccagccagcccagcgacgccgtgagattcgtgctgttcgccgccctgggcaccatgaccagcctggtggcccagagcctgggcctgctgatcggcgccgccagcaccagcctgcaggtggccaccttcgtgggccccgtgaccgccatccccgtgctgctgttcagcggcttcttcgtgagcttcgacaccatccccacctacctgcagtggatgagctacatcagctacgtgagatacggcttcgagggcgtgatcctgagcatctacggcctggacagagaggacctgcactgcgacatcgacgagacctgccacttccagaagagcgaggccatcctgagagagctggacgtggagaacgccaagctgtacctggacttcatcgtgctgggcatcttcttcatcagcctgagactgatcgcctacttcgtgctgagatacaagatcagagccgagagatag

SEQ ID NO: 265586 - protein, 579 aa, Artificial Sequence
  derived and/or modified sequence
MEIGTEISRKIRSAIKGKLQELGAYVDEELPDYIMVMVANKKSQDQMTEDLSLFLGNNTIRFTVWLHGVLDKLRSVTTEPSSLKSSDTNIFDSNVPSNKSNFSRGDERRHEAAVPPLAIPSARPEKRDSRVSTSSQESKTTNVRQTYDDGAATRLMSTVKPLREPAPSEDVIDIKPEPDDLIDEDLNFVQENPLSQKKPTVTLTYGSSRPSIEIYRPPASRNADSGVHLNRLQFQQQQNSIHAAKQLDMQSSWVYETGRLCEPEVLNSLEETYSPFFRNNSEKMSMEDENFRKRKLPVVSSVVKVKKFNHDGEEEEEDDDYGSRTGSISSSVSVPAKPERRPSLPPSKQANKNLILKAISEAQESVTKTTNYSTVPQKQTLPVAPRTRTSQEELLAEVVQGQSRTPRISPPIKEEETKGDSVEKNQAEMSELSVAQKPEKLLERCKYWPACKNGDECAYHHPISPCKAFPNCKFAEKCLFVHPNCKYDAKCTKPDCPFTHVSRRIPVLSPKPVAPPAPPSSSQLCRYFPACKKMECPFYHPKHCRFNTQCTRPDCTFYHPTINVPPRHALKWIRPQTSE

SEQ ID NO: 265587 - DNA, 1740 bp, Artificial Sequence
  derived and/or modified sequence
atggagatcggcaccgagatcagcagaaagatcagaagcgccatcaagggcaagctgcaggagctgggcgcctacgtggacgaggagctgcccgactacatcatggtgatggtggccaacaagaagagccaggaccagatgaccgaggacctgagcctgttcctgggcaacaacaccatcagattcaccgtgtggctgcacggcgtgctggacaagctgagaagcgtgaccaccgagcccagcagcctgaagagcagcgacaccaacatcttcgacagcaacgtgcccagcaacaagagcaacttcagcagaggcgacgagagaagacacgaggccgccgtgccccccctggccatccccagcgccagacccgagaagagagacagcagagtgagcaccagcagccaggagagcaagaccaccaacgtgagacagacctacgacgacggcgccgccaccagactgatgagcaccgtgaagcccctgagagagcccgcccccagcgaggacgtgatcgacatcaagcccgagcccgacgacctgatcgacgaggacctgaacttcgtgcaggagaaccccctgagccagaagaagcccaccgtgaccctgacctacggcagcagcagacccagcatcgagatctacagaccccccgccagcagaaacgccgacagcggcgtgcacctgaacagactgcagttccagcagcagcagaacagcatccacgccgccaagcagctggacatgcagagcagctgggtgtacgagaccggcagactgtgcgagcccgaggtgctgaacagcctggaggagacctacagccccttcttcagaaacaacagcgagaagatgagcatggaggacgagaacttcagaaagagaaagctgcccgtggtgagcagcgtggtgaaggtgaagaagttcaaccacgacggcgaggaggaggaggaggacgacgactacggcagcagaaccggcagcatcagcagcagcgtgagcgtgcccgccaagcccgagagaagacccagcctgccccccagcaagcaggccaacaagaacctgatcctgaaggccatcagcgaggcccaggagagcgtgaccaagaccaccaactacagcaccgtgccccagaagcagaccctgcccgtggcccccagaaccagaaccagccaggaggagctgctggccgaggtggtgcagggccagagcagaacccccagaatcagcccccccatcaaggaggaggagaccaagggcgacagcgtggagaagaaccaggccgagatgagcgagctgagcgtggcccagaagcccgagaagctgctggagagatgcaagtactggcccgcctgcaagaacggcgacgagtgcgcctaccaccaccccatcagcccctgcaaggccttccccaactgcaagttcgccgagaagtgcctgttcgtgcaccccaactgcaagtacgacgccaagtgcaccaagcccgactgccccttcacccacgtgagcagaagaatccccgtgctgagccccaagcccgtggccccccccgccccccccagcagcagccagctgtgcagatacttccccgcctgcaagaagatggagtgccccttctaccaccccaagcactgcagattcaacacccagtgcaccagacccgactgcaccttctaccaccccaccatcaacgtgccccccagacacgccctgaagtggatcagaccccagaccagcgagtag

SEQ ID NO: 265588 - DNA, 1740 bp, Artificial Sequence
  derived and/or modified sequence
atggagatcggaacagagatctccaggaagattaggagtgctatcaaaggtaagctgcaggagttgggagcatatgtcgatgaagaactgccggattacatcatggtgatggttgctaacaaaaagtcccaggatcagatgaccgaagacctgtcacttttccttggcaacaacactatacgctttaccgtttggttacacggggtcttagataaactgagatctgtgacaactgagccttcttccctgaagagtagcgacactaatattttcgactcaaatgtccctagcaacaaaagcaatttttccaggggcgacgagagacgccacgaagccgccgttccaccgctggccatcccctcagcacggccagagaaaagggattctcgagtctctacctcctcacaggagtccaagaccactaacgtgcggcaaacgtatgacgatggagctgccactcgcctaatgtctaccgtaaagcctcttcgagagccagctcccagcgaagatgtcatcgatatcaagcctgaaccagatgacctcatagatgaagacctgaacttcgtgcaggaaaaccccctcagtcagaagaagccaacagtaactctgacctatggctctagccgaccctcaattgagatttaccgaccacccgcctctcgcaatgctgacagcggagtccacttgaatcggttgcagttccaacagcaacagaatagcattcacgcagccaagcagctggatatgcagtcctcctgggtttacgagacggggaggttgtgcgaaccggaagtgttaaacagcttagaggagacatactcacctttctttaggaacaactctgagaagatgtctatggaggatgagaacttcaggaagagaaaattgcctgtggtaagctctgtggtgaaagtcaagaaattcaatcacgacggtgaagaggaggaagaggatgatgattacggaagcaggactggcagtatcagcagctcagtgtcagtgccagccaaaccggagcggaggcccagccttcccccctctaagcaggccaacaaaaatctgatactgaaggccatcagcgaagcccaggagtcagtgacaaagactacaaattattctacagttcctcagaagcagacactgccggtcgctccaaggactcgcacatctcaagaggagttgctcgctgaggtcgttcagggccagtcgcgcacacctaggatatctccacccatcaaggaggaggaaaccaagggggactcagtagaaaaaaatcaggcggagatgtcagagctttcagtggcacaaaagcctgaaaaactgcttgagagatgtaaatactggccggcttgtaagaacggggacgaatgcgcataccaccatcccatctctccatgcaaggctttccctaattgcaaatttgcggaaaaatgcctgttcgtgcaccccaactgcaagtatgacgcgaagtgtaccaaacccgactgtccttttacacatgtatccagaaggatccccgtgctgagccccaagcccgtggccccccccgcaccacccagctcgtcacaactgtgccggtacttccccgcctgcaaaaaaatggagtgccctttctaccatccaaagcactgccggttcaatactcaatgtacccgccctgattgcacgttttaccaccccactattaacgtccctcctcgtcatgccctcaaatggattcgtccccagacatctgagtag

SEQ ID NO: 265589 - DNA, 1740 bp, Artificial Sequence
  derived and/or modified sequence
atggagattggaacagagatcagcaggaagatccgcagcgccatcaagggcaagctgcaggagctgggcgcctacgtggatgaggagctgcctgactacatcatggtgatggtggccaacaagaagagccaggaccagatgacagaggacctgagcctcttcctgggcaacaacaccatccgcttcaccgtgtggctgcatggagtgctggacaagctgcggtctgtgaccacagagcccagcagcctgaagagcagtgacaccaacatctttgacagcaatgtgcccagcaacaagagcaacttcagcagaggagatgagaggagacatgaggccgctgtgccccccctggccatccccagcgcccggcctgagaagagggacagccgggtgtccaccagcagccaggagagcaagaccaccaacgtgcggcagacctatgatgatggagctgccacccggctgatgagcacagtgaagcccctgcgggagcccgcccccagtgaagatgtgattgacatcaagccagagccagatgacctgattgatgaggacctgaactttgtgcaggagaaccccctgagccagaagaagcccaccgtgaccctgacctacggcagcagccggcccagcattgagatctacagacctccagccagcagaaatgctgacagcggcgtgcacctgaaccggctgcagttccagcagcagcagaacagcatccatgctgccaagcagctggacatgcagagctcctgggtgtatgaaacaggccgcctgtgtgagcctgaggtgctgaacagcctggaggagacctacagccccttcttcaggaacaacagcgagaagatgtccatggaggatgagaacttcaggaagaggaagctgcctgtggtgtcctctgtggtgaaggtgaagaagttcaaccatgatggagaggaggaggaggaggatgatgattatggcagcaggacaggcagcatcagcagctctgtgtctgtgcctgccaagccagagcggcggcccagcctgccccccagcaagcaggccaacaagaacctgatcctgaaggccatcagcgaggcccaggagagcgtgaccaagaccaccaactacagcacagtgccccagaagcagaccctgcctgtggcccccaggaccaggaccagccaggaggagctgctggccgaggtggtgcagggccagagcaggaccccccgcatcagcccccccatcaaggaggaggagaccaagggggacagcgtggagaagaaccaggccgagatgtctgagctgtctgtggcccagaagccagagaagctgctggagcgctgcaagtactggccagcctgcaagaatggagatgaatgtgcctaccaccaccccatcagcccctgcaaggccttccccaactgcaagtttgctgagaagtgcctgtttgtgcaccccaactgcaagtatgatgccaagtgcaccaagccagactgccccttcacccacgtgtcccggcgcatccctgtgctgagccccaagcctgtggcccccccagccccacccagcagcagccagctgtgccgctacttccctgcctgcaagaagatggagtgccccttctaccaccccaagcactgccgcttcaacacccagtgcaccaggccagactgcaccttctaccaccccaccatcaacgtgcccccaagacatgccctgaagtggatccggccccagaccagcgagtag

SEQ ID NO: 265590 - DNA, 1740 bp, Artificial Sequence
  derived and/or modified sequence
atggagatcggcaccgagatcagccggaagatccggagcgccatcaagggaaagctgcaggaactgggagcgtacgtggacgaggagctgcctgactatatcatggttatggtcgccaacaagaagagccaggaccagatgacagaggacctctctctctttctgggcaacaataccattaggtttactgtgtggttgcacggtgtcctggataagctccggtcagtcacgacagaaccttcctctctgaaaagctcagacaccaatatatttgactcgaacgtcccctctaacaaatcaaacttttctcgaggggacgagcgcagacacgaggccgccgtgccgcctctggctatcccctccgcacgcccagagaagagagactcaagggtaagcacgtcaagtcaagagtctaagaccacaaacgtacgccaaacttacgacgatggggccgctacacgcctcatgtctacagttaagcccttgcgcgagcccgccccatcggaagatgtaatagacattaagcctgaacccgacgatttgatagatgaggatctgaactttgtccaggaaaaccctttgagtcagaaaaagcctaccgtgacactcacctacgggtcctctagaccctccattgagatctacaggccccctgcatcccgcaacgctgattcaggggtgcaccttaataggctgcagttccagcagcagcaaaactccattcacgctgccaaacagctggatatgcagagttcctgggtgtacgagaccggccgcttatgcgagccggaggtcctgaactcactggaagagacatatagcccatttttcaggaacaactctgaaaagatgagcatggaggacgaaaattttcgcaagcgcaaactgcccgtcgtttcttcagtggttaaggtaaaaaaattcaatcacgacggtgaggaggaggaggaggatgacgactatggctctagaaccggtagcattagctcaagtgtcagtgtgcccgccaaaccagagcggcggccttcactccccccgtcaaagcaggccaataagaaccttatcttaaaggcgatctctgaagctcaagagtccgtgacaaagacaacgaactatagtaccgttccacaaaagcagactctgcctgttgctccgagaactagaacttcgcaggaggaactgctggcggaggtcgtccagggtcagtccaggacaccccgcatatcacctccaatcaaggaagaggagaccaaaggcgattcagtcgagaaaaaccaggccgaaatgtctgaactctctgtggcccaaaaacccgagaaactactcgagcgctgtaaatattggcctgcatgcaagaacggggacgagtgtgcctatcatcacccaataagcccatgtaaagcatttcccaactgcaagttcgcagaaaagtgtttgttcgttcatcccaattgcaagtacgacgccaaatgtaccaagcccgattgtccttttacccatgtctcacgaagaattccagttctgtctccaaagcccgtggcgccacccgcacctccaagcagcagtcaactctgcagatatttcccggcgtgcaagaagatggagtgtcccttctatcatcccaaacactgccggttcaatacccaatgtacacgccctgactgcactttctaccatcccacaattaatgtgcctcctagacatgccctgaaatggattaggccacaaacctccgaatag

SEQ ID NO: 265591 - DNA, 1740 bp, Artificial Sequence
  derived and/or modified sequence
atggaaatcggcactgagatcagtcgtaagataagaagtgccataaagggtaaattgcaggagctgggggcatatgtggacgaggagctgcctgattatatcatggtgatggtcgctaataagaaaagccaagaccagatgacggaggacttgagtttattcctggggaacaataccatccgcttcaccgtgtggttacatggtgtgctcgacaagctcaggtcagtgaccacggagccatcaagcctcaaatcatctgatacaaatatcttcgactctaatgtcccgtctaataagtcgaactttagtcgcggtgacgagaggagacacgaggccgctgtgccaccgcttgcaatccccagcgccagaccagaaaagagggatagcagagtctccacgagtagccaggagtctaagacgaccaacgtgcgccagacttacgacgatggcgcagccacgagattgatgagtaccgttaaacccctccgagaacctgccccttccgaggatgtgattgatattaaaccggaacctgacgacttgatagatgaagatttaaatttcgtgcaagaaaatcctctgagccaaaaaaagcccaccgtcaccctcacatatggtagctctcgtccaagtatcgagatctacagaccccctgcatccagaaacgctgacagcggagtgcaccttaaccggcttcagtttcagcagcagcagaattccatccatgccgctaagcaactggatatgcagtcttcttgggtttatgagaccgggcgtctgtgcgaaccagaggtgctaaattccctcgaggagacctactcaccattcttcaggaacaacagtgaaaaaatgagcatggaggatgagaatttcaggaaaaggaaattaccagtagttagcagcgttgtgaaggtgaagaagttcaatcatgacggggaagaagaagaagaggacgacgactatggatccagaacaggaagtatcagtagcagtgtctcagttccggctaaacccgagaggcggccaagcctcccaccttccaagcaggccaataagaacctgattttgaaagcgatcagcgaggcccaggaaagcgtgaccaaaaccacaaactattccacagtcccacagaagcagacgctccctgtggcccctagaaccaggacatctcaggaggagctgctcgcggaggtggttcaggggcagtcacggaccccgcgtatctctcctccaatcaaggaggaggagactaagggagattctgtggagaaaaatcaggccgaaatgagcgagctttctgtggcccagaagcctgagaagctgctcgagaggtgcaagtactggccagcctgtaaaaacggagatgagtgtgcttaccaccaccctatttccccatgcaaggcctttcccaactgtaaattcgccgagaaatgcttgtttgttcatccaaactgtaaatacgatgccaaatgcacgaagccagattgtccatttactcatgtgagcagacggatacctgtgctcagtccaaagcccgtagctcccccagccccaccttcctcctcgcagctgtgtcgctatttccccgcttgtaagaagatggaatgtccattctatcacccaaaacattgcaggtttaatacccagtgtactcgccctgattgtaccttctatcacccaacaatcaacgtaccaccaaggcatgccctgaagtggatacggccacagacgtccgaatag

SEQ ID NO: 265592 - DNA, 2560 bp, Artificial Sequence
  derived and/or modified sequence
actccggcgcgcagtgccggccggggcggggatacgccgtgtgcgcggccgggggcggaacggaggaggaggcggtggtgtcccggctgcggggtaggagtccgcggcagcctccgggtaagccaagcgccgcgcagtgctgagttcccgcacgccgcagagccatggagatcggcaccgagatcagccgcaagatccggagtgccattaaggggaaattacaagaattaggagcttatgttgatgaagaacttcctgattacattatggtgatggtggccaacaagaaaagtcaggaccaaatgacagaggatctgtccctgtttctagggaacaacacaattcgattcaccgtatggcttcatggtgtattagataaacttcgctctgttacaactgaaccctctagtctgaagtcttctgataccaacatctttgatagtaacgtgccttcaaacaagagcaatttcagtcggggagatgagaggaggcatgaagctgcagtgccaccacttgccattcctagcgcgagacctgaaaaaagagattccagagtttctacaagttcgcaggagtcaaaaaccacaaatgtcagacagacttacgatgatggagctgcaacccgactaatgtcaacagtgaaacctttgagggagccagcaccctctgaagatgtgattgatattaagccagaaccagatgatctcattgacgaagacctcaactttgtgcaggagaatcccttatctcagaaaaaacctacagtgacacttacatatggttcttctcgcccttctattgaaatttatcgaccacctgcaagtagaaatgcagatagtggtgttcatttaaacaggttgcaatttcaacagcagcagaatagtattcatgctgccaagcagcttgatatgcagagtagttgggtatatgaaacaggacgtttgtgtgaaccagaggtgcttaacagcttagaagaaacgtatagtccgttctttagaaacaactcggagaaaatgagtatggaggatgaaaactttcggaagagaaagttgcctgtggtaagttcagttgttaaagtaaaaaaattcaatcatgatggagaagaggaggaagaagatgatgattacgggtctcgaacaggaagcatctccagcagtgtgtctgtgcctgcaaagcctgaaaggagaccttctcttccaccttctaaacaagctaacaagaatctgattttgaaggctatatctgaagctcaagaatccgtaacaaaaacaactaactactctacagttccacagaaacagacacttccagttgctcccagaactcgaacttctcaagaagaattgctagcagaagtggtccagggacaaagtaggacccccagaataagtccccccattaaagaagaggaaacaaaaggagattctgtagaaaaaaatcaagctgagatgagtgaactgagtgtggcacagaaaccagaaaaacttttggagcgctgcaagtactggcctgcttgtaaaaatggggatgagtgtgcctaccatcaccccatctcaccctgcaaagccttccccaattgtaaatttgctgaaaaatgtttgtttgttcacccaaattgtaaatatgatgcaaagtgtactaaaccagattgtcccttcactcatgtgagtagaagaattccagtactgtctccaaaaccagttgcaccaccagcaccaccttccagtagtcagctctgccgttacttccctgcttgtaagaagatggaatgtcccttctatcatccaaaacattgtaggtttaacactcaatgtacaagaccggactgcacattctaccatcccaccattaatgtcccaccacgacatgccttgaaatggattcgacctcaaaccagcgaatagcacccagtcctgcctggcagaagatcatgcagtttggaagttttcatgtactgatgaaagatactctacagaacttgtcaaatctttgaaacttggaatatattgctttcataatatgaagttttattgcctatctatctgaagtgtctaatttttcaagtttgtaagtttattatgtggttttaacattgggtgtttttgttttgtttttactatgaaaagacagcttaaggaagagctaaattctgttaaaatatttggggcatgtttgtgcactgctgttgtgaggatcagcatatgaaattgacatcatggttagtcatggtactgcagcttagggggctacacggttgctgtgtgagtggagagatgcagtgaggcagttgtcattattctaaaaattgtactactttcacttttcccaaagattatataatgttcataatccaccatgaaaacagcattggccaaaggtactgaggctgcttaaaatattcaattctgctttttaatttttaagtgaatttagtttgaaaagcatgattatacaggcctctcaggctgagtgctactttggtaaagttcccagttttcctgccttctgtgacaggatgaatgaggtgggtatggacagtggaggcagctggaatggcaag

SEQ ID NO: 265593 - protein, 72 aa, Artificial Sequence
  derived and/or modified sequence
MVMVANKKSQDQMTEDLSLFLGNNTIRFTVWLHGVLDKLRSVTTEPSSLKSSDTNIFDSNVPSNKSNFSRGD

SEQ ID NO: 265594 - protein, 133 aa, Artificial Sequence
  derived and/or modified sequence
MVMVANKKSQDQMTEDLSLFLGNNTIRFTVWLHGVLDKLRSVTTEPSSLKSSDTNIFDSNVPSNKSNFSRGDERRHEAAVPPLAIPSARPEKRDSRVSTSSQESKTTNVRQTYDDGAATRLMSTVKPLREPAP

SEQ ID NO: 265595 - DNA, 1716 bp, Artificial Sequence
  derived and/or modified sequence
atggtgatggtggccaacaagaagagccaggaccagatgaccgaggacctgagcctgttcctgggcaacaacaccatcagattcaccgtgtggctgcacggcgtgctggacaagctgagaagcgtgaccaccgagcccagcagcctgaagagcagcgacaccaacatcttcgacagcaacgtgcccagcaacaagagcaacttcagcagaggcgacgagagaagacacgaggccgccgtgccccccctggccatccccagcgccagacccgagaagagagacagcagagtgagcaccagcagccaggagagcaagaccaccaacgtgagacagacctacgacgacggcgccgccaccagactgatgagcaccgtgaagcccctgagagagcccgcccccagcgaggacgtgatcgacatcaagcccgagcccgacgacctgatcgacgaggacctgaacttcgtgcaggagaaccccctgagccagaagaagcccaccgtgaccctgacctacggcagcagcagacccagcatcgagatctacagaccccccgccagcagaaacgccgacagcggcgtgcacctgaacagactgcagttccagcagcagcagaacagcatccacgccgccaagcagctggacatgcagagcagctgggtgtacgagaccggcagactgtgcgagcccgaggtgctgaacagcctggaggagacctacagccccttcttcagaaacaacagcgagaagatgagcatggaggacgagaacttcagaaagagaaagctgcccgtggtgagcagcgtggtgaaggtgaagaagttcaaccacgacggcgaggaggaggaggaggacgacgactacggcagcagaaccggcagcatcagcagcagcgtgagcgtgcccgccaagcccgagagaagacccagcctgccccccagcaagcaggccaacaagaacctgatcctgaaggccatcagcgaggcccaggagagcgtgaccaagaccaccaactacagcaccgtgccccagaagcagaccctgcccgtggcccccagaaccagaaccagccaggaggagctgctggccgaggtggtgcagggccagagcagaacccccagaatcagcccccccatcaaggaggaggagaccaagggcgacagcgtggagaagaaccagggcacccagcagagacagctgctgagcagactgcagatcgaccccgtgatggccgagaccctgcagatgagccaggccgagatgagcgagctgagcgtggcccagaagcccgagaagctgctggagagatgcaagtactggcccgcctgcaagaacggcgacgagtgcgcctaccaccaccccatcagcccctgcaaggccttccccaactgcaagttcgccgagaagtgcctgttcgtgcaccccaactgcaagtacgacgccaagtgcaccaagcccgactgccccttcacccacgtgagcagaagaatccccgtgctgagccccaagcccgccgtggccccccccgccccccccagcagcagccagctgtgcagatacttccccgcctgcaagaagatggagtgccccttctaccaccccaagcactgcagattcaacacccagtgcaccagacccgactgcaccttctaccaccccaccatcaacgtgccccccagacacgccctgaagtggatcagaccccagaccagcgagtag

SEQ ID NO: 265596 - DNA, 1716 bp, Artificial Sequence
  derived and/or modified sequence
atggtgatggtggcaaataagaaaagccaggaccagatgacggaggaccttagcttattcctcgggaataatacaatccggttcacggtctggctgcatggcgtactggacaagttaaggagcgtgactacagagccttcaagcctgaaatcatccgatacaaatatatttgatagtaacgtgccttctaataaatccaatttcagtaggggcgatgaaaggcgccatgaggccgccgtaccgccattggccataccctccgccaggcctgaaaaacgtgacagtcgcgtctcgacatccagtcaggagtccaagactacgaacgtaagacagacatatgacgacggagcagcaacccgcctgatgtctaccgtgaaaccgctgcgagaaccagcaccctcagaggacgtcattgacattaaacctgaacccgacgatctaattgatgaagacctcaacttcgtgcaagaaaaccccctgtctcaaaagaagccaactgtgacgctaacgtacgggtcttctcgcccttctatcgagatttaccggccacctgcgtcccgtaacgcagattccggcgtgcaccttaatcggttacagtttcagcaacaacaaaacagcatccatgcggctaagcagctcgacatgcaatcctcgtgggtctatgagacaggaagactgtgcgagcccgaagtgctgaacagtttagaggagacttactcccccttttttagaaacaacagtgaaaagatgtccatggaggacgaaaactttagaaagaggaaactgcccgtggtgtcttccgtcgtgaaggtgaagaagtttaatcatgatggagaagaggaagaagaggatgatgattatgggagccggaccggctccattagctcatcggtgagcgtgccagccaagcccgaaaggcggccctctctgcccccatccaagcaagccaataaaaacctgatccttaaggccatctccgaagcccaggaatccgtcactaaaacgaccaattattcgaccgttccacagaaacagactctgcctgtggccccaaggacacggacaagccaagaggaactactggccgaggtggtgcagggacagtcccggacccctcgaataagcccccccattaaagaagaggaaacaaaaggcgattcagtagaaaagaatcagggcacccagcagcgccagctactgagtcggttgcagattgaccccgtgatggcagaaacacttcagatgagccaggccgagatgagtgagcttagcgtggctcagaagccggagaagctcctagagagatgtaaatattggccagcctgtaaaaatggcgatgaatgtgcctaccaccatcctatttcaccctgcaaggccttccccaactgcaaatttgcggagaaatgtctgttcgtacatcccaactgtaaatatgatgccaaatgcactaagccagactgtccatttacacatgtgagccgcagaatcccggtcctctctccaaagccggctgtcgcccccccagcccctccaagcagctcccagctatgcagatatttcccagcctgtaagaaaatggaatgtcccttctaccatcccaagcattgccggtttaacactcagtgtacaaggcctgattgcaccttttatcatccgacaatcaatgtccctcctagacatgcactcaaatggattagacctcagacaagcgagtag

SEQ ID NO: 265597 - DNA, 1716 bp, Artificial Sequence
  derived and/or modified sequence
atggtcatggtcgcaaataaaaaatcacaagatcagatgacagaggacttgtccctgttccttgggaataacactatccgcttcaccgtgtggctgcatggcgtgctcgataagctgaggtccgtaactactgagccctcttccctgaagtcctccgatactaatatcttcgattctaacgtcccctctaataagtcgaatttcagcagaggcgatgagcggaggcacgaggcagctgtccccccgctcgctatcccctccgccagacctgaaaaaagagacagcagagtatcaacttctagccaggagtcaaagacgacgaatgtgaggcagacatacgatgatggagctgcgacaagattaatgtccacagtaaagccattgcgcgaacctgccccatccgaagatgtaatcgatataaagcccgaaccggacgatctgatcgacgaggatctgaactttgtgcaggagaatcctttatcccagaaaaaacctactgtgactctcacctatggcagttccaggcctagcattgaaatctatagacctcccgccagtcgaaacgccgactctggcgtacacctgaatcgccttcagttccagcagcaacagaacagtatacacgctgctaagcaactcgacatgcagagcagctgggtttatgagactggccgcctgtgcgagcctgaagtgctgaacagtttggaagagacttatagcccattttttagaaacaattccgagaagatgtctatggaagacgaaaatttccggaaaagaaaactgcccgtcgtcagttccgtcgtcaaggtcaaaaaattcaatcacgacggcgaggaggaagaagaagacgacgactacggaagccggacaggttccatttcttcctctgtatcagtgcctgctaagcctgaacgcaggccatcacttcctccatctaagcaggcgaacaaaaatctaatactgaaagctatctcagaggctcaggagtcggttacaaagacaactaactattcaactgtgccacagaagcagaccttacctgtcgctccaagaacacggaccagccaggaggagttgttagccgaagtagtccagggccagagcagaaccccaagaatatcccctcccataaaagaggaggaaaccaagggggattcagtggagaagaaccagggaacacagcaaaggcagctgctgtccaggttacagatagaccctgtgatggccgagaccctccagatgtcccaagcagaaatgagcgaactgagcgtggcgcagaaaccggagaagctgctggaacggtgcaaatactggcctgcatgtaaaaacggtgacgagtgtgcataccatcaccctatatcaccttgcaaagcctttcccaattgtaaatttgccgaaaaatgcctcttcgttcatcctaactgcaagtacgatgccaaatgcaccaaacctgactgtcccttcactcatgtatcgcgccgcatccctgtgctgagcccgaaacccgccgtggctcctcccgctcccccatcctcctcacagctttgcaggtattttcctgcctgcaaaaagatggagtgtccgttttatcacccaaagcattgccgctttaacacccagtgcacccggcccgactgcacattttaccatcccacaattaatgtgcccccccggcacgcacttaaatggatcaggccccaaactagcgaatag

SEQ ID NO: 265598 - DNA, 1716 bp, Artificial Sequence
  derived and/or modified sequence
atggtgatggtggccaacaagaagagccaggaccagatgacagaggacctgagcctcttcctgggcaacaacaccatccgcttcaccgtgtggctgcatggagtgctggacaagctgcggtctgtgaccacagagcccagcagcctgaagagcagtgacaccaacatctttgacagcaatgtgcccagcaacaagagcaacttcagcagaggagatgagaggagacatgaggccgctgtgccccccctggccatccccagcgcccggcctgagaagagggacagccgggtgtccaccagcagccaggagagcaagaccaccaacgtgcggcagacctatgatgatggagctgccacccggctgatgagcacagtgaagcccctgcgggagcccgcccccagtgaagatgtgattgacatcaagccagagccagatgacctgattgatgaggacctgaactttgtgcaggagaaccccctgagccagaagaagcccaccgtgaccctgacctacggcagcagccggcccagcattgagatctacagacctccagccagcagaaatgctgacagcggcgtgcacctgaaccggctgcagttccagcagcagcagaacagcatccatgctgccaagcagctggacatgcagagctcctgggtgtatgaaacaggccgcctgtgtgagcctgaggtgctgaacagcctggaggagacctacagccccttcttcaggaacaacagcgagaagatgtccatggaggatgagaacttcaggaagaggaagctgcctgtggtgtcctctgtggtgaaggtgaagaagttcaaccatgatggagaggaggaggaggaggatgatgattatggcagcaggacaggcagcatcagcagctctgtgtctgtgcctgccaagccagagcggcggcccagcctgccccccagcaagcaggccaacaagaacctgatcctgaaggccatcagcgaggcccaggagagcgtgaccaagaccaccaactacagcacagtgccccagaagcagaccctgcctgtggcccccaggaccaggaccagccaggaggagctgctggccgaggtggtgcagggccagagcaggaccccccgcatcagcccccccatcaaggaggaggagaccaagggggacagcgtggagaagaaccagggcacccagcagaggcagctgctgagccggctgcagattgatcctgtgatggccgagaccctgcagatgagccaggccgagatgtctgagctgtctgtggcccagaagccagagaagctgctggagcgctgcaagtactggccagcctgcaagaatggagatgaatgtgcctaccaccaccccatcagcccctgcaaggccttccccaactgcaagtttgctgagaagtgcctgtttgtgcaccccaactgcaagtatgatgccaagtgcaccaagccagactgccccttcacccacgtgagccgccgcatccctgtgctgagccccaagccagctgtggcccccccagccccacccagcagcagccagctgtgccgctacttccctgcctgcaagaagatggagtgccccttctaccaccccaagcactgccgcttcaacacccagtgcaccaggccagactgcaccttctaccaccccaccatcaacgtgcccccaagacatgccctgaagtggatccggccccagaccagcgagtag

SEQ ID NO: 265599 - DNA, 1716 bp, Artificial Sequence
  derived and/or modified sequence
atggtgatggtggccaacaagaagagccaggaccagatgaccgaggatttgtcactcttcttaggtaacaatactattcggtttacagtgtggctgcacggagttttggacaaattgagaagcgtgactacagagccctcctctctcaagtcaagcgataccaacattttcgattctaacgtccctagcaataaaagcaacttctctagaggagatgagcgcaggcatgaggccgccgtgccgcctctggctatcccctcggctcgaccagaaaagcgggatagtcgggtctccacatcctcacaggaatccaaaaccacaaacgttcgccagacatatgacgacggggccgctaccagactgatgtctacagtgaagcccctgagagagcctgcgccttcggaggacgtaattgacataaagcctgaacctgacgacctcattgacgaagaccttaatttcgtgcaggagaatcccctttcccagaagaaacctacagtgactttaacatatggatcctctcgccccagcatcgaaatctataggccacctgctagtcggaacgcagattctggggtgcacctcaacagattgcaatttcagcaacagcagaacagcattcacgcagccaaacaactggatatgcagagcagctgggtgtatgaaacgggcaggttgtgtgagcctgaggtgctcaatagcctggaggagacatactctccgttctttcgcaataacagtgagaaaatgagcatggaggatgagaactttagaaagaggaagttacctgttgtgagctcagttgttaaagtcaaaaaatttaaccatgatggcgaggaggaagaggaggatgacgactacggctctaggacaggtagcatctcatcaagtgtttccgtgcctgctaagcccgaaaggcggcctagcctgccaccctccaagcaggctaataaaaaccttatcctgaaggccatcagcgaggcccaggaatcggtgaccaagacaaccaattatagcactgtgccacagaagcagaccttacccgtggctcctagaactcgcaccagccaggaagagctgttggccgaagtggtacaggggcagtccaggaccccgagaattagcccacccatcaaggaggaggaaactaagggtgactctgtcgaaaagaatcagggaacccaacagaggcagctcttatccagacttcaaattgaccctgtaatggccgaaactctgcagatgtcccaggctgagatgtcagaactctctgtcgcgcagaaaccagagaagctcctggaaaggtgcaagtactggcccgcctgtaagaacggtgacgaatgcgcatatcaccacccgatctcaccatgcaaggcctttccaaactgtaaatttgcggagaaatgcctcttcgttcatccaaattgcaagtatgatgcgaagtgcaccaagcccgactgccccttcacgcatgtctctcgccgcatcccagttctgagcccaaaacctgccgtcgcaccccctgcaccacctagttcctcccagctttgccgctattttccagcatgtaagaagatggagtgccctttctatcaccccaaacactgtaggtttaatacccagtgcacacgtcccgattgtaccttttatcatcccacaatcaacgttccccctcgccacgctctgaagtggattaggccacaaacctcagagtag

SEQ ID NO: 265600 - DNA, 1716 bp, Artificial Sequence
  derived and/or modified sequence
atggtgatggtggccaacaagaagagccaggaccagatgaccgaggacctcagcctgttcttgggaaacaataccatacgatttactgtgtggctgcacggagttttagacaaacttagaagcgtgaccacagagcccagctccctgaagtcatccgatacgaatatctttgatagcaacgtgcccagcaacaagtccaatttctcacgtggcgacgagagaaggcatgaggcagcagtacctcctctggcaatacccagcgctaggcctgaaaaaagagatagtcgggtcagcaccagcagccaggagtccaaaactaccaacgttagacaaacctatgacgacggcgcagcaactcgcttgatgagtacagttaaacctctgcgcgagccggccccaagcgaggatgtgatagatattaagcccgagcctgatgatctgatcgatgaagatctaaactttgtgcaagaaaaccccctctcacaaaaaaaacccaccgttacactcacctacggtagctcacgtccctccatcgaaatttaccggccaccagcctctaggaatgctgatagtggtgtgcacttaaaccgtcttcaattccagcagcaacaaaactccatacacgctgctaagcaactagatatgcagagttcatgggtgtacgagaccggcaggctttgcgaacccgaggtgttaaattccttggaggaaacatactcgccattctttagaaataattcagagaagatgtccatggaggacgaaaacttcagaaagaggaaactcccagtcgttagctctgtcgttaaagtgaagaagtttaatcacgacggcgaggaggaggaagaggatgacgactacggtagtcgaacagggagcatctcttcctccgtgagcgttcccgctaagccagaacgcaggccaagtctgcctccttccaagcaagccaacaagaacttgatacttaaggcaatctcagaagcccaggagtccgtcacgaagacgactaattacagcacggtgccccagaaacagacactcccagtcgctccccgaacccggactagccaagaagaactcctggcagaggtggtgcaggggcaaagtcggactcctagaattagccctcccattaaagaggaggaaacaaaaggtgatagcgtggaaaaaaatcagggcactcaacagcgccagctcttatcacgactccagatcgacccagttatggctgagacgctccagatgtcacaggctgagatgtcagagctatcggtcgctcagaaaccagaaaagctcctggaacggtgcaaatactggccagcctgtaaaaatggtgatgaatgcgcttaccaccacccaattagcccatgtaaagcttttcctaattgtaaattcgcagagaaatgtttattcgtccaccctaactgcaaatacgatgctaaatgcaccaagccagactgccctttcactcacgtgtctagacgaatccctgtgttgagtcccaagcctgccgtggccccaccagccccacccagctcctcacagttatgtcgctattttcctgcatgcaagaagatggaatgtccgttctaccaccccaagcattgcaggttcaacactcagtgcacccgcccagattgcaccttttaccaccctacaatcaatgttccaccacgccatgcgcttaagtggatacgtccccaaacctctgagtag

SEQ ID NO: 265601 - DNA, 1716 bp, Artificial Sequence
  derived and/or modified sequence
atggtcatggtggcaaacaagaaatcacaggaccaaatgactgaggacctgagtctgttcctggggaacaacacgattcgattcacggtgtggctccatggagtgttggacaagctgagatctgttacgaccgagccctcaagtctcaagagtagtgacacaaacatcttcgacagtaacgtgccctcgaacaagtccaacttttctcgcggagacgagcggaggcatgaagcagccgtgcctcctttagccattccctccgccaggccagaaaagcgcgattctcgcgtctccacttcctcacaggagtctaaaaccactaacgttcggcagacttatgacgacggggcagccacaaggctcatgagtaccgtcaaaccccttcgtgagcccgcaccctccgaagacgtcatcgatatcaagcctgagcccgacgaccttatcgatgaggaccttaactttgtgcaggagaatccactgtcccagaaaaaacctacagtaactctgacttacgggtcttccagaccttccattgaaatatataggcccccagccagccggaacgctgatagtggagtgcacctcaataggcttcaattccagcaacagcaaaattctattcacgccgcaaaacagctggatatgcagtcatcttgggtatacgaaactggaaggctgtgcgagcccgaggtcttgaattccctggaggagacctacagcccattctttcgcaacaatagcgagaagatgtcgatggaggatgaaaatttcaggaaaagaaagctcccagtcgtaagctctgtagttaaagtgaagaaattcaaccatgatggagaggaagaagaggaggatgatgactatgggtctcgtacaggaagtatttctagcagcgtatctgtgcccgctaagcccgagcgccgtccctcgctccctccatcaaaacaggccaacaagaatctgatattgaaggcaattagcgaggcacaggagagtgtcactaaaactaccaactattccacagttccacaaaaacagacccttcccgtggccccaaggacaaggacctcgcaggaggagctgctggcagaagtcgtccagggtcagtccaggacacctaggatctccccacccattaaggaggaggaaaccaagggtgacagcgttgaaaaaaatcagggtacacagcaacggcagttactgtcccgacttcagatcgacccagtgatggcagagacactgcagatgagtcaggccgaaatgagcgaactgtcagttgcacagaaacctgagaagttactagagcgctgcaagtactggccagcgtgtaaaaacggtgatgagtgtgcatatcaccaccccatatcaccctgtaaggccttcccgaactgcaaattcgctgaaaagtgcctgttcgttcaccccaattgtaaatacgacgctaaatgcacaaagccggactgccctttcacgcatgtatctcggaggatacctgtcctcagcccaaagcccgctgtagctccacccgctcccccatctagctcacagctttgccgatatttcccagcctgtaagaaaatggagtgccccttctatcatccaaaacattgtcggtttaacacccaatgcacccgaccagattgtactttctaccaccctaccatcaacgtcccaccccgacatgcacttaagtggatcagacctcagacctcagaatag

SEQ ID NO: 265602 - DNA, 1716 bp, Artificial Sequence
  derived and/or modified sequence
atggttatggtggccaacaagaaatcccaggatcagatgaccgaggatctgagcctattcctcggcaataatactatccgatttaccgtgtggctccatggggttctcgataagctccggagcgtcaccaccgaaccttcatccctgaagagtagcgataccaacatttttgattcaaatgtgcctagcaataaaagcaacttttcaagaggcgatgagaggagacacgaggccgcagtcccacccctcgccatcccgagcgcacgacccgagaaacgggacagtagagtttccacaagttctcaagagagcaagaccaccaatgtgcgccagacgtacgacgacggagccgctactcggctgatgtccaccgtgaagcctctgcgcgaaccggctccatcagaagatgtgatcgatatcaagcccgagcccgatgacctgattgacgaggacctgaactttgtgcaggagaatcctctgagtcagaagaagcccactgttacgctcacatacggatcatccaggccttcaatcgaaatctataggcctccagcttccaggaatgctgacagcggagtccacctgaacagactgcagtttcagcaacagcaaaacagcatccatgccgcaaaacagctagacatgcagagctcatgggtatacgagacgggccgactgtgtgagcccgaagtgctgaattccttggaggagacatactcacccttctttaggaataactctgagaagatgagcatggaagacgagaacttccgcaagaggaagttgcccgtggtgtcaagcgtggtgaaggtaaaaaaattcaaccatgacggtgaggaagaggaggaagatgatgactatgggtcacgaacaggctctatttccagtagcgtttctgtgccggctaagcctgagcgacggccttccttgccgccaagcaaacaggcgaacaagaacttgattctgaaggctatatcagaagcacaggagtccgtcacgaagacaacaaactacagtacagtgccacagaagcagacattacctgtggcccctcggacaaggacaagtcaggaggagctgctcgccgaagtggttcagggccagagtaggacaccgaggattagtcccccaatcaaggaagaggagactaaaggggactcagttgagaaaaatcagggaacgcagcaaagacagctcctcagccgtcttcagattgaccccgtgatggcggaaactctccagatgtcacaggccgaaatgtccgaactaagcgtggcccagaaacccgagaaactgctcgaacgctgtaagtactggcctgcctgcaagaatggggacgaatgcgcctaccaccaccccatcagtccctgtaaggcgttcccgaactgtaaattcgcggagaaatgtttgtttgtacacccaaattgcaaatatgacgcgaagtgcactaagcctgactgtccatttacgcacgtgtcaaggcgcatccccgtcctgtctccaaaacctgcggtggctcctccggctcctccctctagttcgcagctatgtaggtactttcccgcttgtaaaaaaatggaatgccctttttaccacccaaagcactgcagattcaacactcaatgcacgcggcctgactgtacgttttatcaccccaccatcaatgtgcccccacgccacgcactgaaatggatccggccacagacaagcgagtag

SEQ ID NO: 265603 - protein, 306 aa, Artificial Sequence
  derived and/or modified sequence
MRMSSKFPSPPLPIFLPPEPVDLGSITSSSCSLNELDNISHLLRKISADINEIKGMKAAILTVEANLFDLNVRVSKNEAKISSLEVKMNEYSTTYECNRQFEDQEEDTESQSRTTDVKIIGFLRNVEKGTQQRQLLSRLQIDPVMAETLQMSQAEMSELSVAQKPEKLLERCKYWPACKNGDECAYHHPISPCKAFPNCKFAEKCLFVHPNCKYDAKCTKPDCPFTHVSRRIPVLSPKPVAPPAPPSSSQLCRYFPACKKMECPFYHPKHCRFNTQCTRPDCTFYHPTINVPPRHALKWIRPQTSE

SEQ ID NO: 265604 - protein, 282 aa, Artificial Sequence
  derived and/or modified sequence
MRMSSKFPSPPLPIFLPPEPVDLGSITSSSCSLNELDNISHLLRKISADINEIKGMKAAILTVEANLFDLNVRVSKNEAKISSLEVKMNEYSTTYECNRQFEDQEEDTESQSRTTDVKIIGFLRNVEKAEMSELSVAQKPEKLLERCKYWPACKNGDECAYHHPISPCKAFPNCKFAEKCLFVHPNCKYDAKCTKPDCPFTHVSRRIPVLSPKPAVAPPAPPSSSQLCRYFPACKKMECPFYHPKHCRFNTQCTRPDCTFYHPTINVPPRHALKWIRPQTSE

SEQ ID NO: 265605 - DNA, 921 bp, Artificial Sequence
  derived and/or modified sequence
atgagaatgagcagcaagttccccagcccccccctgcccatcttcctgccccccgagcccgtggacctgggcagcatcaccagcagcagctgcagcctgaacgagctggacaacatcagccacctgctgagaaagatcagcgccgacatcaacgagatcaagggcatgaaggccgccatcctgaccgtggaggccaacctgttcgacctgaacgtgagagtgagcaagaacgaggccaagatcagcagcctggaggtgaagatgaacgagtacagcaccacctacgagtgcaacagacagttcgaggaccaggaggaggacaccgagagccagagcagaaccaccgacgtgaagatcatcggcttcctgagaaacgtggagaagggcacccagcagagacagctgctgagcagactgcagatcgaccccgtgatggccgagaccctgcagatgagccaggccgagatgagcgagctgagcgtggcccagaagcccgagaagctgctggagagatgcaagtactggcccgcctgcaagaacggcgacgagtgcgcctaccaccaccccatcagcccctgcaaggccttccccaactgcaagttcgccgagaagtgcctgttcgtgcaccccaactgcaagtacgacgccaagtgcaccaagcccgactgccccttcacccacgtgagcagaagaatccccgtgctgagccccaagcccgtggccccccccgccccccccagcagcagccagctgtgcagatacttccccgcctgcaagaagatggagtgccccttctaccaccccaagcactgcagattcaacacccagtgcaccagacccgactgcaccttctaccaccccaccatcaacgtgccccccagacacgccctgaagtggatcagaccccagaccagcgagtag

SEQ ID NO: 265606 - DNA, 849 bp, Artificial Sequence
  derived and/or modified sequence
atgagaatgagcagcaagttccccagcccccccctgcccatcttcctgccccccgagcccgtggacctgggcagcatcaccagcagcagctgcagcctgaacgagctggacaacatcagccacctgctgagaaagatcagcgccgacatcaacgagatcaagggcatgaaggccgccatcctgaccgtggaggccaacctgttcgacctgaacgtgagagtgagcaagaacgaggccaagatcagcagcctggaggtgaagatgaacgagtacagcaccacctacgagtgcaacagacagttcgaggaccaggaggaggacaccgagagccagagcagaaccaccgacgtgaagatcatcggcttcctgagaaacgtggagaaggccgagatgagcgagctgagcgtggcccagaagcccgagaagctgctggagagatgcaagtactggcccgcctgcaagaacggcgacgagtgcgcctaccaccaccccatcagcccctgcaaggccttccccaactgcaagttcgccgagaagtgcctgttcgtgcaccccaactgcaagtacgacgccaagtgcaccaagcccgactgccccttcacccacgtgagcagaagaatccccgtgctgagccccaagcccgccgtggccccccccgccccccccagcagcagccagctgtgcagatacttccccgcctgcaagaagatggagtgccccttctaccaccccaagcactgcagattcaacacccagtgcaccagacccgactgcaccttctaccaccccaccatcaacgtgccccccagacacgccctgaagtggatcagaccccagaccagcgagtag

SEQ ID NO: 265607 - DNA, 921 bp, Artificial Sequence
  derived and/or modified sequence
atgagaatgtccagcaaattcccatctccaccgctccctatcttcctccctccagaacctgttgacctcggctccatcacaagttcgtcgtgcagcctcaatgagttagataatatctcgcatctcttaagaaaaatcagtgcggacattaacgagatcaagggcatgaaagccgcaattcttacagtggaggctaatctgtttgacctgaacgtccgggtgagtaagaatgaggctaaaatttcctcattggaggttaaaatgaatgaatactccaccacatatgaatgtaacaggcaatttgaagaccaagaggaggacacagagtcgcagtccagaacaactgacgtcaaaatcattggttttttacgaaacgtggaaaaggggacccagcagcgccagctgctctcaagactgcaaattgatcccgtgatggcagaaacattgcagatgtcgcaggcagaaatgtcagagctcagcgtggctcaaaagcccgaaaaattgctggagagatgtaagtactggcctgcttgtaagaatggggacgagtgtgcctaccatcatcccatcagtccttgcaaagcttttcccaactgtaagtttgccgaaaagtgccttttcgtgcatcccaactgtaaatacgatgctaaatgcactaagccggattgtccatttacccacgtaagtagacggatccctgtcctaagtcccaagcccgttgcccccccagcaccacccagctcaagtcagctttgccggtacttcccggcctgtaagaagatggagtgtcctttttatcaccccaaacattgtagattcaatacccagtgcacacggccagactgcacattttatcaccccacaatcaacgtgccccctcgccacgccttgaaatggattcggccacagacatcggaatag

SEQ ID NO: 265608 - DNA, 849 bp, Artificial Sequence
  derived and/or modified sequence
atgagaatgagcagtaagtttcctagccccccgctgcctatctttctcccccccgagcctgttgacctaggaagcatcacaagctcctcctgttctctcaatgagcttgataacataagccatctgctgagaaaaatttcagccgacatcaacgagattaaaggcatgaaggcagccatcttgacagtggaagcaaacctattcgacctgaatgtaagggtgagtaaaaatgaggccaaaatttcatctttggaagtgaagatgaatgagtactctacaacttacgaatgtaaccggcaattcgaggaccaagaggaagacaccgagtcccagtccaggaccacggacgtgaagataatcggatttctgcggaatgttgaaaaggcagagatgtccgagctaagcgtggcacaaaagccagagaaattgctggagaggtgcaaatattggcctgcatgcaaaaacggggacgagtgcgcatatcatcatcccatatcgccatgcaaggcgttccccaactgcaagtttgcggagaaatgcctattcgtgcaccctaattgcaaatatgacgcaaagtgtaccaagcctgattgccccttcactcatgtgtcacggcgaatccccgtcctcagtcctaaacctgctgtcgctcccccggctccgcccagttcctcacaactgtgtaggtattttccagcatgtaaaaagatggaatgccccttctatcaccctaaacactgccggtttaacacccagtgcactaggcccgattgcactttttaccatcctacaatcaatgtgccaccaaggcacgccctgaagtggatccggccacagacgtccgagtag

SEQ ID NO: 265609 - DNA, 921 bp, Artificial Sequence
  derived and/or modified sequence
atgaggatgagcagcaagttccccagcccccccctgcccatcttcctgcccccagagcctgtggacctgggcagcatcaccagcagcagctgcagcctgaatgagctggacaacatcagccacctgctgaggaagatctctgctgacatcaatgagatcaagggcatgaaggccgccatcctgactgtggaggccaacctgtttgacctgaatgtgcgggtgtccaagaatgaggccaagatcagcagcctggaggtgaagatgaatgagtacagcaccacctatgagtgcaaccggcagtttgaggaccaggaggaggacacagagagccagagcaggaccacagatgtgaagatcatcggcttcctgagaaatgtggagaagggcacccagcagaggcagctgctgagccggctgcagattgatcctgtgatggccgagaccctgcagatgagccaggccgagatgtctgagctgtctgtggcccagaagccagagaagctgctggagcgctgcaagtactggccagcctgcaagaatggagatgaatgtgcctaccaccaccccatcagcccctgcaaggccttccccaactgcaagtttgctgagaagtgcctgtttgtgcaccccaactgcaagtatgatgccaagtgcaccaagccagactgccccttcacccacgtgagccgccgcatccctgtgctgagccccaagcctgtggcccccccagccccacccagcagcagccagctgtgccgctacttccctgcctgcaagaagatggagtgccccttctaccaccccaagcactgccgcttcaacacccagtgcaccaggccagactgcaccttctaccaccccaccatcaacgtgccccccaggcatgccctgaagtggatccggccccagaccagcgagtag

SEQ ID NO: 265610 - DNA, 849 bp, Artificial Sequence
  derived and/or modified sequence
atgaggatgagcagcaagttccccagcccccccctgcccatcttcctgcccccagagcctgtggacctgggcagcatcaccagcagcagctgcagcctgaatgagctggacaacatcagccacctgctgaggaagatctctgctgacatcaatgagatcaagggcatgaaggccgccatcctgactgtggaggccaacctgtttgacctgaatgtgcgggtgtccaagaatgaggccaagatcagcagcctggaggtgaagatgaatgagtacagcaccacctatgagtgcaaccggcagtttgaggaccaggaggaggacacagagagccagagcaggaccacagatgtgaagatcatcggcttcctgagaaatgtggagaaggccgagatgtctgagctgtctgtggcccagaagccagagaagctgctggagcgctgcaagtactggccagcctgcaagaatggagatgaatgtgcctaccaccaccccatcagcccctgcaaggccttccccaactgcaagtttgctgagaagtgcctgtttgtgcaccccaactgcaagtatgatgccaagtgcaccaagccagactgccccttcacccacgtgtcccggcgcatccctgtgctgagccccaagccagctgtggcccccccagccccacccagcagcagccagctgtgccgctacttccctgcctgcaagaagatggagtgccccttctaccaccccaagcactgccgcttcaacacccagtgcaccaggccagactgcaccttctaccaccccaccatcaacgtgccccccaggcatgccctgaagtggatccggccccagaccagcgagtag

SEQ ID NO: 265611 - DNA, 921 bp, Artificial Sequence
  derived and/or modified sequence
atgcggatgagcagcaagttccccagcccccccctgcccatcttcctgccccctgagcctgtcgatctgggaagcatcacatcatcatcctgcagcctgaatgagctggacaacatatcccacctgctgagaaaaatctctgctgacattaacgaaattaaaggaatgaaggccgcgatcctcactgtggaggcaaacctctttgatctgaatgttcgcgtgtccaagaacgaggctaagatttcatcactggaagtcaaaatgaatgagtattccacaacttatgaatgcaatcggcaattcgaggaccaggaggaggatacagagagccagtctcgcacaacggacgttaaaatcatcggcttccttcgcaatgtggagaagggcactcagcagcgccagttgctgtctaggctgcagattgaccctgtaatggctgaaacattacagatgtcacaagctgaaatgagtgaactgtcggttgctcagaagcccgaaaagcttctggaaagatgtaagtattggcctgcttgcaagaatggagatgaatgtgcgtaccaccacccgataagcccctgcaaagcattccccaactgtaagttcgccgaaaagtgcctgtttgtccacccaaattgtaagtacgatgccaagtgcactaaaccggattgtcccttcacacatgtgtctcgcagaatacctgtgctgagtcctaagcctgtggctcctcctgccccacctagcagctcccaactttgcaggtattttccagcatgcaagaaaatggaatgtccattctaccacccaaaacattgccgcttcaatacccagtgtacacggcccgactgcaccttctaccatcccaccatcaacgtcccccctcggcacgccctgaaatggatccgtccccaaacatcagagtag

SEQ ID NO: 265612 - DNA, 849 bp, Artificial Sequence
  derived and/or modified sequence
atgcggatgagcagcaagttccccagcccccccctgcccatcttccttccccctgagccagtagatctgggcagcattaccagctcctcatgttcactgaatgagctcgacaacattagtcatctgcttagaaagatcagtgctgacattaacgagattaaaggaatgaaggctgctattctgactgtggaagccaatttgttcgatttgaacgttcgcgtgtcgaaaaatgaggcaaaaattagtagtcttgaggtgaaaatgaatgagtactcgactacctatgagtgcaaccgccaattcgaggaccaggaagaagatacggagagccagtcaagaaccaccgacgttaagattattggttttctcaggaacgttgagaaggccgagatgtcagaattgagtgtggcccaaaagccggaaaaattgcttgagagatgcaagtactggcctgcttgtaagaacggcgacgagtgtgcgtaccatcatcctattagcccctgcaaggccttccccaattgcaagtttgccgagaaatgcctgtttgtacatccgaactgcaagtatgatgccaagtgtaccaaacccgactgtccttttactcatgtatctcgaaggatcccagtcttaagccctaagcctgctgtcgccccgcctgcgccaccatcatcctcccaactttgccgttacttccccgcgtgtaaaaaaatggaatgtcctttttatcaccccaagcattgcaggtttaacacacagtgcacccgacctgactgcactttctaccaccctacaatcaacgtgcccccccgacacgctctgaaatggatccggccccagacatccgagtag

SEQ ID NO: 265613 - DNA, 921 bp, Artificial Sequence
  derived and/or modified sequence
atgcgaatgagcagcaagtttccgagtcccccactccctattttccttcccccagagcccgtcgacctcggctctattacttctagcagttgcagcctgaacgagttggataacattagtcatctgttgcggaaaatatctgctgacattaacgaaatcaaaggaatgaaagctgccatcctcacggtcgaagctaatctcttcgacctgaacgtgagggtcagtaaaaatgaggctaagatctcgtcactggaagtgaaaatgaatgaatactctactacatatgaatgtaaccggcaattcgaagaccaagaggaggacaccgagtctcagtcgcgcaccaccgacgtgaaaatcatcggcttcctgcggaatgtcgaaaagggcacccagcagagacagctgctgtccagattgcaaattgacccagtgatggctgagaccctacagatgtctcaggccgagatgtccgagttatctgtggctcaaaagccggagaagctcctggaacgatgtaaatactggcctgcctgcaagaacggcgatgagtgcgcgtaccatcaccccatctccccgtgcaaggcctttcctaattgtaagttcgcagaaaaatgcttgtttgtgcaccctaactgcaagtatgatgctaaatgcacaaaacctgactgtccattcacacacgtgtcccgtagaatccccgttctgtccccaaagcctgttgcccctccggctccgccatcaagctcgcagctgtgtagatacttcccagcctgtaagaagatggagtgcccattttaccacccaaaacattgcaggttcaatactcagtgtacacgaccagactgcacattttatcacccaactatcaacgtaccccctaggcatgcactgaagtggattaggccacaaacatctgagtag

SEQ ID NO: 265614 - DNA, 849 bp, Artificial Sequence
  derived and/or modified sequence
atgcgaatgagcagcaaatttccttcaccacccttgccaattttcttacctcccgaaccggttgacctgggatctattacttcttcctcttgctctttaaatgaactcgacaatatttcacacttgcttagaaaaataagcgccgacattaacgaaatcaaggggatgaaggccgcaatcctaacagttgaagctaatctgtttgatcttaatgtcagggtgtcaaaaaatgaggctaaaatcagctcgctggaagtcaaaatgaatgagtatagcactacctatgagtgcaaccgccaattcgaggaccaggaggaggacacagagtctcagtcgcgaacgacagatgtgaaaatcattggctttctgagaaacgtagagaaagccgagatgagtgagctgtccgtggcccagaagcccgagaagttacttgaacgatgcaaatactggcctgcctgcaaaaatggcgacgagtgcgcctatcaccatcctatttccccttgcaaagcatttcccaactgcaagtttgccgagaaatgcctcttcgttcatccaaactgcaagtacgacgctaaatgtacgaaacctgactgcccctttactcacgtctcccgtcggattcctgtgctgtcacccaagcctgctgttgctccccctgcacctccttccagctcacagctatgtcgatatttcccggcttgcaagaagatggaatgcccattctaccacccaaaacactgccggttcaatacacagtgcaccaggccggactgtacattttatcatccgacaatcaacgtgcccccacggcatgctctgaaatggattagaccccaaacaagcgagtag

SEQ ID NO: 265615 - DNA, 1384 bp, Artificial Sequence
  derived and/or modified sequence
gggtttactggaagaggagctatacagatggtacttagaggatgtagggccctacgtattagggcttcttagttgtagcgaagagcaattggtctggtacgtttagctttttcacatttagttttgaattctgactctagaaatgtacaaccccatcttttgaattacaggttttaagatgttatttgctcttaatacgtcttaaggtaacagccttgatcactgcttttactttcgatgaaataacttaatgagctgtgaagaaaaaattatcagattttaagggagagaattttatgaaaatgtctttgaggttcctgtcacctttatgagaatgtcttcaaagtttccatcaccacctctaccaatttttcttccaccggagccagtggacttaggttccataacaagctcctcttgttcactgaatgagctagacaatatttcccaccttttaaggaaaatatcagctgatatcaatgaaattaaaggaatgaaagcagctattttgacagtggaagcaaatctttttgatctaaatgttagagtgtccaagaatgaagcaaaaatttcatctttggaggttaaaatgaatgaatattcaacaacatatgaatgcaacagacagtttgaagatcaagaagaagatactgaatcacagtcaagaactactgatgtaaaaataatcggcttccttagaaacgttgagaaaggaactcaacagaggcaattattatcccgactgcaaatcgacccagtaatggcagaaactctgcagatgagtcaagctgagatgagtgaactgagtgtggcacagaaaccagaaaaacttttggagcgctgcaagtactggcctgcttgtaaaaatggggatgagtgtgcctaccatcaccccatctcaccctgcaaagccttccccaattgtaaatttgctgaaaaatgtttgtttgttcacccaaattgtaaatatgatgcaaagtgtactaaaccagattgtcccttcactcatgtgagtagaagaattccagtactgtctccaaaaccagttgcaccaccagcaccaccttccagtagtcagctctgccgttacttccctgcttgtaagaagatggaatgtcccttctatcatccaaaacattgtaggtttaacactcaatgtacaagaccggactgcacattctaccatcccaccattaatgtcccaccacgacatgccttgaaatggattcgacctcaaaccagcgaatagcacccagtcctgcctggcagaagatcatgcagtttggaagttttcatgtactgatgaaagatactctacagaacttgtcaaatctttgaaacttggaatatattgctttcataatatgaagttttattgcctatc

SEQ ID NO: 265616 - DNA, 1341 bp, Artificial Sequence
  derived and/or modified sequence
agaggatgtagggccctacgtattagggcttcttagttgtagcgaagagcaattggtctggtacgtttagctttttcacatttagttttgaattctgactctagaaatgtacaaccccatcttttgaattacaggttttaagatgttatttgctcttaatacgtcttaaggtaacagccttgatcactgcttttactttcgatgaaataacttaatgagctgtgaagaaaaaattatcagattttaagggagagaattttatgaaaatgtctttgaggttcctgtcacctttatgagaatgtcttcaaagtttccatcaccacctctaccaatttttcttccaccggagccagtggacttaggttccataacaagctcctcttgttcactgaatgagctagacaatatttcccaccttttaaggaaaatatcagctgatatcaatgaaattaaaggaatgaaagcagctattttgacagtggaagcaaatctttttgatctaaatgttagagtgtccaagaatgaagcaaaaatttcatctttggaggttaaaatgaatgaatattcaacaacatatgaatgcaacagacagtttgaagatcaagaagaagatactgaatcacagtcaagaactactgatgtaaaaataatcggcttccttagaaacgttgagaaagctgagatgagtgaactgagtgtggcacagaaaccagaaaaacttttggagcgctgcaagtactggcctgcttgtaaaaatggggatgagtgtgcctaccatcaccccatctcaccctgcaaagccttccccaattgtaaatttgctgaaaaatgtttgtttgttcacccaaattgtaaatatgatgcaaagtgtactaaaccagattgtcccttcactcatgtgagtagaagaattccagtactgtctccaaaaccagcagttgcaccaccagcaccaccttccagtagtcagctctgccgttacttccctgcttgtaagaagatggaatgtcccttctatcatccaaaacattgtaggtttaacactcaatgtacaagaccggactgcacattctaccatcccaccattaatgtcccaccacgacatgccttgaaatggattcgacctcaaaccagcgaatagcacccagtcctgcctggcagaagatcatgcagtttggaagttttcatgtactgatgaaagatactctacagaacttgtcaaatctttgaaacttggaatatattgctttcataatatgaagttttattgcctatctatctgaagtgtctaatttttcaagtttgtaagtttattatgtggttttaacattgggtgttttt

SEQ ID NO: 265617 - protein, 439 aa, Artificial Sequence
  derived and/or modified sequence
MKTKFCTGGEAEPSPLGLLLSCGSGSAAPAPGVGQQRDAASDLESKQLGGQQPPLALPPPPPLPLPLPLPQPPPPQPPADEQPEPRTRRRAYLWCKEFLPGAWRGLREDEFHISVIRGGLSNMLFQCSLPDTTATLGDEPRKVLLRLYGAILQMGAEAMVLESVMFAILAERSLGPKLYGIFPQGRLEQFIPSRRLDTEELSLPDISAEIAEKMATFHGMKMPFNKEPKWLFGTMEKYLKEVLRIKFTEESRIKKLHKLLSYNLPLELENLRSLLESTPSPVVFCHNDCQEGNILLLEGRENSEKQKLMLIDFEYSSYNYRGFDIGNHFCEWMYDYSYEKYPFFRANIRKYPTKKQQLHFISSYLPAFQNDFENLSTEEKSIIKEEMLLEVNRFALASHFLWGLWSIVQAKISSIEFGYMDYAQARFDAYFHQKRKLGV

SEQ ID NO: 265618 - DNA, 1320 bp, Artificial Sequence
  derived and/or modified sequence
atgaagacaaagttctgcaccggtggagaagcagagccctctcctttggggctgttgcttagctgtgggtccggcagcgctgcacctgccccaggtgtgggtcagcagcgcgacgcagcatcagatctggaatctaagcagctaggagggcagcagccaccactggccctgccacccccccctcctctcccacttccgcttcccctcccccagcctcccccaccccaacctccagcggacgagcagccggaaccacgcacccgccgccgcgcttacctctggtgtaaagagttcttgcccggcgcatggcgcggcctcagagaggacgaattccatatttctgtgattaggggtggtctaagcaatatgctttttcagtgtagtctccccgacacgaccgccacactgggtgatgagcctaggaaagttctgctccgtctgtatggggccatcttgcagatgggagcagaagccatggtgctggagagcgtgatgttcgcgatcctggccgagaggtcactaggaccgaaactctatggtatcttcccacaaggccgcctcgaacagttcattccatcacggcgactggacaccgaagagttgtccctgccggatatcagcgccgaaatcgctgagaagatggccacctttcacgggatgaaaatgccattcaataaggagccgaagtggctgtttggcaccatggagaagtacctcaaagaagtgctgcgcatcaaatttactgaagagtcgaggatcaaaaaactgcataagttgctgtcttacaatctccccctcgaactggaaaatctcagatctctgttagagtcgactccttcgcctgttgtgttttgccataatgattgtcaggagggcaatattctgctgttggagggccgggagaattcggaaaagcagaagctcatgttgatcgactttgaatacagcagttacaactacaggggattcgacatcggcaaccacttttgtgagtggatgtacgactacagttatgagaagtacccctttttccgcgcgaacatcagaaagtaccccaccaagaagcagcagctgcactttatttcaagctacttgccagctttccagaacgatttcgagaatctcagcaccgaagaaaagtccatcattaaggaggagatgctcctagaggtcaatcggttcgccttagctagccacttcctctggggcctgtggagcatcgtgcaggcaaaaatatcgagcattgagttcgggtatatggattatgcacaggcacgattcgatgcatactttcaccagaagagaaagctgggagtgtag

SEQ ID NO: 265619 - DNA, 1320 bp, Artificial Sequence
  derived and/or modified sequence
atgaagaccaagttctgcacaggaggagaggccgagcccagccccctgggcctgctgctgagctgtggcagcggcagcgctgccccagcccctggggtgggccagcagagagatgctgccagtgacctggagagcaagcagctgggcggccagcagccccccctggccctgcccccacctccacccctgcccctgcccctgcccctgccccagcccccaccaccccagcccccagcagatgagcagcctgagcccaggaccaggagaagagcctacctgtggtgcaaggagttcctgcccggggcctggaggggcctgcgggaggatgagttccacatcagcgtcatccggggcggcctgagcaacatgctgttccagtgcagcctgcctgacaccacagccaccctgggagatgagcccaggaaggtgctgctgcggctgtatggagccatcctgcagatgggcgctgaggccatggtgctggagagcgtgatgtttgccatcctggccgagaggagcctgggccccaagctgtatggcatcttcccccagggccgcctggagcagttcatccccagccggcggctggacacagaggagctgagcctgcctgacatctctgctgagattgctgagaagatggccaccttccacggcatgaagatgcccttcaacaaggagcccaagtggctgtttggcaccatggagaagtacctgaaggaggtgctgcgcatcaagttcacagaggagagccgcatcaagaagctgcacaagctgctgagctacaacctgcccctggagctggagaacctgcggagcctgctggagagcacccccagccctgtggtgttctgccacaatgactgccaggagggcaacatcctgctgctggagggcagagaaaattctgagaagcagaagctgatgctgattgactttgagtacagcagctacaactaccggggctttgatattggcaaccacttctgtgagtggatgtatgactacagctatgagaagtaccccttcttccgggccaacatcaggaagtaccccaccaagaagcagcagctgcacttcatcagcagctacctgcctgccttccagaatgactttgagaacctgagcacagaggagaagagcatcatcaaggaggagatgctgctggaggtgaacagatttgccctggccagccacttcctgtggggcctgtggagcatcgtgcaggccaagatcagcagcattgaatttggctacatggactatgcccaggccaggtttgatgcctacttccaccagaagaggaagctgggcgtgtag

SEQ ID NO: 265620 - DNA, 1320 bp, Artificial Sequence
  derived and/or modified sequence
atgaagaccaagttctgcaccggcggcgaggccgagcccagccccttaggactgttactgtcctgcggcagtggatctgcagcccctgctcctggcgttggccaacaaagggacgctgccagcgacctcgagtcgaaacaattgggcggccaacaaccccctttggccctgccaccgccacctcctctcccactgcctctgcctttaccacaaccaccgcctccccaaccacctgcagatgagcagcccgagccacggactcgacgcagggcctatctgtggtgcaaggaattcttaccaggggcttggagaggacttagagaggacgaattccacattagcgtaatccgaggtggactgtcaaacatgctctttcagtgctctttgccggacacaacagcgacattaggtgatgaaccacggaaggtgctcctgcggctctacggagcgattttgcaaatgggcgcagaagcaatggtgctggaaagtgtaatgttcgccatcctggctgagaggagccttgggcccaaattgtacggaattttccctcaagggaggctggaacagtttattcccagcagacgactggatactgaagaactcagtttacctgatataagcgctgaaatcgcggagaagatggcaactttccacggaatgaaaatgccttttaataaagagcctaagtggctctttggaacaatggaaaaatatcttaaggaagtgctacgcataaagtttacggaggaaagcagaattaaaaaactacataagttactctcttacaatctaccgctggagctggaaaaccttcgcagcctccttgagtccacccctagtccagtggtgttctgtcacaacgattgtcaagagggtaacatattgcttctggaagggcgagagaatagcgaaaagcagaagctgatgctcatagattttgaatatagcagttataattatcgcggatttgatatcggaaatcacttttgtgagtggatgtacgattactcctacgaaaagtatccattcttcagagccaatatccgaaaataccccacaaagaagcagcagctgcatttcatctcttcgtacctccccgctttccagaacgacttcgagaatctcagcactgaggagaaatcaatcatcaaggaagagatgctgctcgaggttaaccggttcgccttggcaagccacttcctgtgggggttgtggagcattgtgcaggccaagatctctagtatcgaatttggttatatggactatgcgcaagccagatttgacgcgtatttccatcagaaacgcaaactcggagtctag

SEQ ID NO: 265621 - DNA, 1320 bp, Artificial Sequence
  derived and/or modified sequence
atgaagaccaagttctgcactggtggggaagccgaaccgagccccctcggcctgttactgagctgtggtagcggctctgccgcacctgcaccgggagtcggccagcagagggacgccgcttctgatcttgagagtaagcaactgggagggcagcagcccccactcgctctcccccctcctccaccacttcctcttcctctgccccttccgcaacccccacccccacagcctcccgctgacgagcagccggaaccgagaacaagaaggcgggcatacctgtggtgcaaggagttcttacctggggcttggaggggactgcgagaggacgagttccatatatctgtgattagaggcggtctttccaacatgctatttcaatgtagcctgcccgataccactgctaccctgggggacgagcccaggaaggtgctcctccgattatatggagccatactccaaatgggcgctgaggctatggtgctggaatctgtgatgttcgccattttggccgaacgatcgctgggaccgaaactctatggtattttcccccagggtcgcctggaacaatttatcccatctaggcggctagatacggaggaactttcactccccgatatttcagccgagattgcagagaagatggctacattccatgggatgaagatgcctttcaataaagagccaaagtggctatttggtaccatggaaaaatatctgaaggaggtcctgaggatcaagtttaccgaagaatcccgcataaagaagttgcataagttgttatcctacaatcttcctctcgaactggaaaatctccgctctctgctggaatccactccaagtccagtggtgttctgtcataatgactgtcaggaaggcaacatactgctgctcgaaggaagagagaacagtgaaaaacagaaacttatgctcatagatttcgagtacagcagttacaactatcgcggttttgacattgggaaccatttttgtgaatggatgtatgactacagttatgagaaatacccattttttcgggcaaacatacggaaatacccaactaagaaacagcagctacacttcataagtagctatttaccagcctttcagaacgacttcgagaatctgtcgacagaggaaaaatccattattaaggaggagatgctcctcgaagtgaatcgatttgcactggccagtcactttttatggggactgtggtcaattgtccaggctaagatctccagcattgaattcggctatatggattatgcccaggccaggttcgatgcctacttccatcagaagcgaaaactgggggtgtag

SEQ ID NO: 265622 - DNA, 1580 bp, Artificial Sequence
  derived and/or modified sequence
agtgagagagcggcgagggggcgcccggccggactctgagcctagtcctctcgcgctgcggccgcccgcgcctcctcggccgcctgtcgggcatgaaaaccaaattctgcaccgggggcgaggcggagccctcgccgctcgggctgctgctgagctgcggtagcggcagcgcggccccggcgcccggcgtggggcagcagcgcgacgccgccagcgacctcgagtccaagcagctgggcggccaacagccgccgctcgcgctgccccctccgccgccgctgccgctgccgctgccgctgccccagcccccgccgccgcagccgcccgcagacgagcagccggagccccggacgcggcgcagggcctatctgtggtgcaaggagttcctgcccggcgcctggcggggcctccgcgaggacgagttccacatcagtgtcatcagaggcggccttagcaacatgctgttccagtgctccctacctgacaccacagccacccttggtgatgagcctcggaaagtgctcctgcggctgtatggagcgattttgcagatgggggctgaggccatggttctggagagcgttatgtttgccattctcgcagagaggtcacttgggccaaaactctatggcatctttccccaaggccgactggagcagttcatcccgagccggcgattagatactgaagaattaagtttgccagatatttctgcagaaatcgccgagaaaatggctacatttcatggtatgaaaatgccattcaataaggaaccaaaatggctttttggcacaatggaaaagtatctaaaggaagtgctgagaattaaatttactgaggaatccagaattaaaaagctccacaaattgctcagttacaatctgcccttggaactggaaaacctgagatcattgcttgaatctactccatctccagttgtattttgtcataatgactgtcaagaaggtaatatcttgttgctggaaggccgagagaattctgaaaaacagaaactgatgctcattgatttcgaatacagcagttacaattacaggggattcgacattggaaatcacttctgtgagtggatgtatgattatagctatgaaaaatacccttttttcagagcaaacatccggaagtatcccaccaagaaacaacagctccattttatttccagttacttgcctgcattccaaaatgactttgaaaacctcagtactgaagaaaaatccattataaaagaagaaatgttgcttgaagttaataggtttgcccttgcatctcatttcctctggggactgtggtccattgtacaagccaagatttcatctattgaatttgggtacatggactacgcccaagcaaggtttgatgcctatttccaccagaagaggaagcttggggtgtgactgtggggaggactccatccacctcatcactggactgcatggggaggcagcagagcggggtcccctctgtgcttcgactactgctcctgtggcaggaggctttgggtggctcactactgaacacatgtgtatgatactaaagacggtattaaaatggagcgacgttta

SEQ ID NO: 265623 - DNA, 1320 bp, Artificial Sequence
  derived and/or modified sequence
atgaagaccaagttctgcaccggcggcgaggccgagcccagccccctgggcctgctgctgagctgcggcagcggcagcgccgcccccgcccccggcgtgggccagcagagagacgccgccagcgacctggagagcaagcagctgggcggccagcagccccccctggccctgcccccccccccccccctgcccctgcccctgcccctgccccagcccccccccccccagccccccgccgacgagcagcccgagcccagaaccagaagaagagcctacctgtggtgcaaggagttcctgcccggcgcctggagaggcctgagagaggacgagttccacatcagcgtgatcagaggcggcctgagcaacatgctgttccagtgcagcctgcccgacaccaccgccaccctgggcgacgagcccagaaaggtgctgctgagactgtacggcgccatcctgcagatgggcgccgaggccatggtgctggagagcgtgatgttcgccatcctggccgagagaagcctgggccccaagctgtacggcatcttcccccagggcagactggagcagttcatccccagcagaagactggacaccgaggagctgagcctgcccgacatcagcgccgagatcgccgagaagatggccaccttccacggcatgaagatgcccttcaacaaggagcccaagtggctgttcggcaccatggagaagtacctgaaggaggtgctgagaatcaagttcaccgaggagagcagaatcaagaagctgcacaagctgctgagctacaacctgcccctggagctggagaacctgagaagcctgctggagagcacccccagccccgtggtgttctgccacaacgactgccaggagggcaacatcctgctgctggagggcagagagaacagcgagaagcagaagctgatgctgatcgacttcgagtacagcagctacaactacagaggcttcgacatcggcaaccacttctgcgagtggatgtacgactacagctacgagaagtaccccttcttcagagccaacatcagaaagtaccccaccaagaagcagcagctgcacttcatcagcagctacctgcccgccttccagaacgacttcgagaacctgagcaccgaggagaagagcatcatcaaggaggagatgctgctggaggtgaacagattcgccctggccagccacttcctgtggggcctgtggagcatcgtgcaggccaagatcagcagcatcgagttcggctacatggactacgcccaggccagattcgacgcctacttccaccagaagagaaagctgggcgtgtag

SEQ ID NO: 265624 - protein, 2176 aa, Artificial Sequence
  derived and/or modified sequence
MLRGPGPGLLLLAVQCLGTAVPSTGASKSKRQAQQMVQPQSPVAVSQSKPGCYDNGKHYQINQQWERTYLGNALVCTCYGGSRGFNCESKPEAEETCFDKYTGNTYRVGDTYERPKDSMIWDCTCIGAGRGRISCTIANRCHEGGQSYKIGDTWRRPHETGGYMLECVCLGNGKGEWTCKPIAEKCFDHAAGTSYVVGETWEKPYQGWMMVDCTCLGEGSGRITCTSRNRCNDQDTRTSYRIGDTWSKKDNRGNLLQCICTGNGRGEWKCERHTSVQTTSSGSGPFTDVRAAVYQPQPHPQPPPYGHCVTDSGVVYSVGMQWLKTQGNKQMLCTCLGNGVSCQETAVTQTYGGNSNGEPCVLPFTYNGRTFYSCTTEGRQDGHLWCSTTSNYEQDQKYSFCTDHTVLVQTRGGNSNGALCHFPFLYNNHNYTDCTSEGRRDNMKWCGTTQNYDADQKFGFCPMAAHEEICTTNEGVMYRIGDQWDKQHDMGHMMRCTCVGNGRGEWTCIAYSQLRDQCIVDDITYNVNDTFHKRHEEGHMLNCTCFGQGRGRWKCDPVDQCQDSETGTFYQIGDSWEKYVHGVRYQCYCYGRGIGEWHCQPLQTYPSSSGPVEVFITETPSQPNSHPIQWNAPQPSHISKYILRWRPKNSVGRWKEATIPGHLNSYTIKGLKPGVVYEGQLISIQQYGHQEVTRFDFTTTSTSTPVTSNTVTGETTPFSPLVATSESVTEITASSFVVSWVSASDTVSGFRVEYELSEEGDEPQYLDLPSTATSVNIPDLLPGRKYIVNVYQISEDGEQSLILSTSQTTAPDAPPDTTVDQVDDTSIVVRWSRPQAPITGYRIVYSPSVEGSSTELNLPETANSVTLSDLQPGVQYNITIYAVEENQESTPVVIQQETTGTPRSDTVPSPRDLQFVEVTDVKVTIMWTPPESAVTGYRVDVIPVNLPGEHGQRLPISRNTFAEVTGLSPGVTYYFKVFAVSHGRESKPLTAQQTTKLDAPTNLQFVNETDSTVLVRWTPPRAQITGYRLTVGLTRRGQPRQYNVGPSVSKYPLRNLQPASEYTVSLVAIKGNQESPKATGVFTTLQPGSSIPPYNTEVTETTIVITWTPAPRIGFKLGVRPSQGGEAPREVTSDSGSIVVSGLTPGVEYVYTIQVLRDGQERDAPIVNKVVTPLSPPTNLHLEANPDTGVLTVSWERSTTPDITGYRITTTPTNGQQGNSLEEVVHADQSSCTFDNLSPGLEYNVSVYTVKDDKESVPISDTIIPAVPPPTDLRFTNIGPDTMRVTWAPPPSIDLTNFLVRYSPVKNEEDVAELSISPSDNAVVLTNLLPGTEYVVSVSSVYEQHESTPLRGRQKTGLDSPTGIDFSDITANSFTVHWIAPRATITGYRIRHHPEHFSGRPREDRVPHSRNSITLTNLTPGTEYVVSIVALNGREESPLLIGQQSTVSDVPRDLEVVAATPTSLLISWDAPAVTVRYYRITYGETGGNSPVQEFTVPGSKSTATISGLKPGVDYTITVYAVTGRGDSPASSKPISINYRTEIDKPSQMQVTDVQDNSISVKWLPSSSPVTGYRVTTTPKNGPGPTKTKTAGPDQTEMTIEGLQPTVEYVVSVYAQNPSGESQPLVQTAVTTIPAPTDLKFTQVTPTSLSAQWTPPNVQLTGYRVRVTPKEKTGPMKEINLAPDSSSVVVSGLMVATKYEVSVYALKDTLTSRPAQGVVTTLENVSPPRRARVTDATETTITISWRTKTETITGFQVDAVPANGQTPIQRTIKPDVRSYTITGLQPGTDYKIYLYTLNDNARSSPVVIDASTAIDAPSNLRFLATTPNSLLVSWQPPRARITGYIIKYEKPGSPPREVVPRPRPGVTEATITGLEPGTEYTIYVIALKNNQKSEPLIGRKKTGQEALSQTTISWAPFQDTSEYIISCHPVGTDEEPLQFRVPGTSTSATLTGLTRGATYNVIVEALKDQQRHKVREEVVTVGNSVNEGLNQPTDDSCFDPYTVSHYAVGDEWERMSESGFKLLCQCLGFGSGHFRCDSSRWCHDNGVNYKIGEKWDRQGENGQMMSCTCLGNGKGEFKCDPHEATCYDDGKTYHVGEQWQKEYLGAICSCTCFGGQRGWRCDNCRRPGGEPSPEGTTGQSYNQYSQRYHQRTNTNVNCPIECFMPLDVQADREDSRE

SEQ ID NO: 265625 - DNA, 6531 bp, Artificial Sequence
  derived and/or modified sequence
atgctgagaggccccggccccggcctgctgctgctggccgtgcagtgcctgggcaccgccgtgcccagcaccggcgccagcaagagcaagagacaggcccagcagatggtgcagccccagagccccgtggccgtgagccagagcaagcccggctgctacgacaacggcaagcactaccagatcaaccagcagtgggagagaacctacctgggcaacgccctggtgtgcacctgctacggcggcagcagaggcttcaactgcgagagcaagcccgaggccgaggagacctgcttcgacaagtacaccggcaacacctacagagtgggcgacacctacgagagacccaaggacagcatgatctgggactgcacctgcatcggcgccggcagaggcagaatcagctgcaccatcgccaacagatgccacgagggcggccagagctacaagatcggcgacacctggagaagaccccacgagaccggcggctacatgctggagtgcgtgtgcctgggcaacggcaagggcgagtggacctgcaagcccatcgccgagaagtgcttcgaccacgccgccggcaccagctacgtggtgggcgagacctgggagaagccctaccagggctggatgatggtggactgcacctgcctgggcgagggcagcggcagaatcacctgcaccagcagaaacagatgcaacgaccaggacaccagaaccagctacagaatcggcgacacctggagcaagaaggacaacagaggcaacctgctgcagtgcatctgcaccggcaacggcagaggcgagtggaagtgcgagagacacaccagcgtgcagaccaccagcagcggcagcggccccttcaccgacgtgagagccgccgtgtaccagccccagccccacccccagccccccccctacggccactgcgtgaccgacagcggcgtggtgtacagcgtgggcatgcagtggctgaagacccagggcaacaagcagatgctgtgcacctgcctgggcaacggcgtgagctgccaggagaccgccgtgacccagacctacggcggcaacagcaacggcgagccctgcgtgctgcccttcacctacaacggcagaaccttctacagctgcaccaccgagggcagacaggacggccacctgtggtgcagcaccaccagcaactacgagcaggaccagaagtacagcttctgcaccgaccacaccgtgctggtgcagaccagaggcggcaacagcaacggcgccctgtgccacttccccttcctgtacaacaaccacaactacaccgactgcaccagcgagggcagaagagacaacatgaagtggtgcggcaccacccagaactacgacgccgaccagaagttcggcttctgccccatggccgcccacgaggagatctgcaccaccaacgagggcgtgatgtacagaatcggcgaccagtgggacaagcagcacgacatgggccacatgatgagatgcacctgcgtgggcaacggcagaggcgagtggacctgcatcgcctacagccagctgagagaccagtgcatcgtggacgacatcacctacaacgtgaacgacaccttccacaagagacacgaggagggccacatgctgaactgcacctgcttcggccagggcagaggcagatggaagtgcgaccccgtggaccagtgccaggacagcgagaccggcaccttctaccagatcggcgacagctgggagaagtacgtgcacggcgtgagataccagtgctactgctacggcagaggcatcggcgagtggcactgccagcccctgcagacctaccccagcagcagcggccccgtggaggtgttcatcaccgagacccccagccagcccaacagccaccccatccagtggaacgccccccagcccagccacatcagcaagtacatcctgagatggagacccaagaacagcgtgggcagatggaaggaggccaccatccccggccacctgaacagctacaccatcaagggcctgaagcccggcgtggtgtacgagggccagctgatcagcatccagcagtacggccaccaggaggtgaccagattcgacttcaccaccaccagcaccagcacccccgtgaccagcaacaccgtgaccggcgagaccacccccttcagccccctggtggccaccagcgagagcgtgaccgagatcaccgccagcagcttcgtggtgagctgggtgagcgccagcgacaccgtgagcggcttcagagtggagtacgagctgagcgaggagggcgacgagccccagtacctggacctgcccagcaccgccaccagcgtgaacatccccgacctgctgcccggcagaaagtacatcgtgaacgtgtaccagatcagcgaggacggcgagcagagcctgatcctgagcaccagccagaccaccgcccccgacgccccccccgacaccaccgtggaccaggtggacgacaccagcatcgtggtgagatggagcagaccccaggcccccatcaccggctacagaatcgtgtacagccccagcgtggagggcagcagcaccgagctgaacctgcccgagaccgccaacagcgtgaccctgagcgacctgcagcccggcgtgcagtacaacatcaccatctacgccgtggaggagaaccaggagagcacccccgtggtgatccagcaggagaccaccggcacccccagaagcgacaccgtgcccagccccagagacctgcagttcgtggaggtgaccgacgtgaaggtgaccatcatgtggaccccccccgagagcgccgtgaccggctacagagtggacgtgatccccgtgaacctgcccggcgagcacggccagagactgcccatcagcagaaacaccttcgccgaggtgaccggcctgagccccggcgtgacctactacttcaaggtgttcgccgtgagccacggcagagagagcaagcccctgaccgcccagcagaccaccaagctggacgcccccaccaacctgcagttcgtgaacgagaccgacagcaccgtgctggtgagatggaccccccccagagcccagatcaccggctacagactgaccgtgggcctgaccagaagaggccagcccagacagtacaacgtgggccccagcgtgagcaagtaccccctgagaaacctgcagcccgccagcgagtacaccgtgagcctggtggccatcaagggcaaccaggagagccccaaggccaccggcgtgttcaccaccctgcagcccggcagcagcatccccccctacaacaccgaggtgaccgagaccaccatcgtgatcacctggacccccgcccccagaatcggcttcaagctgggcgtgagacccagccagggcggcgaggcccccagagaggtgaccagcgacagcggcagcatcgtggtgagcggcctgacccccggcgtggagtacgtgtacaccatccaggtgctgagagacggccaggagagagacgcccccatcgtgaacaaggtggtgacccccctgagcccccccaccaacctgcacctggaggccaaccccgacaccggcgtgctgaccgtgagctgggagagaagcaccacccccgacatcaccggctacagaatcaccaccacccccaccaacggccagcagggcaacagcctggaggaggtggtgcacgccgaccagagcagctgcaccttcgacaacctgagccccggcctggagtacaacgtgagcgtgtacaccgtgaaggacgacaaggagagcgtgcccatcagcgacaccatcatccccgccgtgcccccccccaccgacctgagattcaccaacatcggccccgacaccatgagagtgacctgggcccccccccccagcatcgacctgaccaacttcctggtgagatacagccccgtgaagaacgaggaggacgtggccgagctgagcatcagccccagcgacaacgccgtggtgctgaccaacctgctgcccggcaccgagtacgtggtgagcgtgagcagcgtgtacgagcagcacgagagcacccccctgagaggcagacagaagaccggcctggacagccccaccggcatcgacttcagcgacatcaccgccaacagcttcaccgtgcactggatcgcccccagagccaccatcaccggctacagaatcagacaccaccccgagcacttcagcggcagacccagagaggacagagtgccccacagcagaaacagcatcaccctgaccaacctgacccccggcaccgagtacgtggtgagcatcgtggccctgaacggcagagaggagagccccctgctgatcggccagcagagcaccgtgagcgacgtgcccagagacctggaggtggtggccgccacccccaccagcctgctgatcagctgggacgcccccgccgtgaccgtgagatactacagaatcacctacggcgagaccggcggcaacagccccgtgcaggagttcaccgtgcccggcagcaagagcaccgccaccatcagcggcctgaagcccggcgtggactacaccatcaccgtgtacgccgtgaccggcagaggcgacagccccgccagcagcaagcccatcagcatcaactacagaaccgagatcgacaagcccagccagatgcaggtgaccgacgtgcaggacaacagcatcagcgtgaagtggctgcccagcagcagccccgtgaccggctacagagtgaccaccacccccaagaacggccccggccccaccaagaccaagaccgccggccccgaccagaccgagatgaccatcgagggcctgcagcccaccgtggagtacgtggtgagcgtgtacgcccagaaccccagcggcgagagccagcccctggtgcagaccgccgtgaccaccatccccgcccccaccgacctgaagttcacccaggtgacccccaccagcctgagcgcccagtggaccccccccaacgtgcagctgaccggctacagagtgagagtgacccccaaggagaagaccggccccatgaaggagatcaacctggcccccgacagcagcagcgtggtggtgagcggcctgatggtggccaccaagtacgaggtgagcgtgtacgccctgaaggacaccctgaccagcagacccgcccagggcgtggtgaccaccctggagaacgtgagcccccccagaagagccagagtgaccgacgccaccgagaccaccatcaccatcagctggagaaccaagaccgagaccatcaccggcttccaggtggacgccgtgcccgccaacggccagacccccatccagagaaccatcaagcccgacgtgagaagctacaccatcaccggcctgcagcccggcaccgactacaagatctacctgtacaccctgaacgacaacgccagaagcagccccgtggtgatcgacgccagcaccgccatcgacgcccccagcaacctgagattcctggccaccacccccaacagcctgctggtgagctggcagccccccagagccagaatcaccggctacatcatcaagtacgagaagcccggcagcccccccagagaggtggtgcccagacccagacccggcgtgaccgaggccaccatcaccggcctggagcccggcaccgagtacaccatctacgtgatcgccctgaagaacaaccagaagagcgagcccctgatcggcagaaagaagaccggccaggaggccctgagccagaccaccatcagctgggcccccttccaggacaccagcgagtacatcatcagctgccaccccgtgggcaccgacgaggagcccctgcagttcagagtgcccggcaccagcaccagcgccaccctgaccggcctgaccagaggcgccacctacaacgtgatcgtggaggccctgaaggaccagcagagacacaaggtgagagaggaggtggtgaccgtgggcaacagcgtgaacgagggcctgaaccagcccaccgacgacagctgcttcgacccctacaccgtgagccactacgccgtgggcgacgagtgggagagaatgagcgagagcggcttcaagctgctgtgccagtgcctgggcttcggcagcggccacttcagatgcgacagcagcagatggtgccacgacaacggcgtgaactacaagatcggcgagaagtgggacagacagggcgagaacggccagatgatgagctgcacctgcctgggcaacggcaagggcgagttcaagtgcgacccccacgaggccacctgctacgacgacggcaagacctaccacgtgggcgagcagtggcagaaggagtacctgggcgccatctgcagctgcacctgcttcggcggccagagaggctggagatgcgacaactgcagaagacccggcggcgagcccagccccgagggcaccaccggccagagctacaaccagtacagccagagataccaccagagaaccaacaccaacgtgaactgccccatcgagtgcttcatgcccctggacgtgcaggccgacagagaggacagcagagagtag

SEQ ID NO: 265626 - DNA, 6531 bp, Artificial Sequence
  derived and/or modified sequence
atgctgcgaggccccgggcctggcctcctgctgcttgccgtgcagtgtctgggcacagcagtgcctagtacaggggcttccaagtccaagcgccaagcgcagcagatggtccagccccagagccctgtcgcagtgtctcaaagcaagcctggttgctacgacaacggtaaacattatcagataaatcaacaatgggagcgcacatatctcggcaacgcactggtgtgtacctgctatggtggctctagggggtttaattgcgagagtaagcctgaggctgaggagacctgctttgacaagtataccgggaacacctatcgtgttggcgacacttatgagcggcctaaggatagtatgatctgggactgcacatgcatcggcgctggaaggggcaggatatcttgcaccatcgccaaccggtgccatgaaggagggcagtcctataagattggggatacctggcgccggccccacgagacaggcggctacatgctcgagtgtgtgtgcctcggcaacggcaaaggtgagtggacctgtaaaccaatagccgaaaaatgcttcgaccacgccgcagggacttcatatgtagtgggcgaaacgtgggagaagccataccaggggtggatgatggtggactgcacttgcctgggcgaagggtcaggacggatcacatgtacgtcacgcaatagatgtaatgaccaggacacccgcacaagctatcgcataggcgacacttggtccaaaaaggacaatcgcggtaaccttctgcagtgcatctgtacagggaacggacgtggcgaatggaagtgtgagaggcatacctccgtgcagactacgagctccggctcagggccgtttactgatgtccgcgcggcagtataccaacctcagccacacccccaaccacccccttatgggcactgcgtgacagatagcggcgttgtctattctgtggggatgcagtggctcaaaacgcagggaaataaacaaatgttgtgcacatgccttggcaatggagtatcctgccaggaaaccgcagtcacacagacttacggcggaaactccaacggcgaaccctgtgtgttgccattcacgtataacggaagaaccttttactcctgtaccactgagggtcgtcaggatggccacctttggtgcagtaccacttcgaactacgagcaggaccagaagtatagtttctgtaccgatcacacggtcctcgtgcaaacgcgcggcggtaactcaaacggggctctctgtcatttcccatttttatacaataaccataactacaccgattgtacatctgaaggtagacgggataacatgaagtggtgtggcacaacccagaattatgacgcagaccagaagtttggcttctgtccgatggcagcacatgaagagatctgcacaaccaacgagggggtgatgtaccgaataggtgatcagtgggataagcagcacgatatgggtcacatgatgaggtgcacctgtgtgggtaatggccgaggagagtggacctgtatagcttactcccagttacgagaccaatgcatagtggacgatataacctacaatgtgaacgacaccttccacaagcgtcatgaagagggccacatgctgaattgtacctgtttcgggcagggtcggggcagatggaagtgcgacccagtcgatcaatgccaggatagtgagactggcactttctaccagataggcgactcttgggagaaatacgtgcacggggttaggtatcaatgctactgctacggaagggggataggagaatggcactgccaaccactgcaaacatacccatcgagtagcggcccagtcgaggtgtttattacagagaccccgtctcagcctaactctcatcccatccagtggaatgctcctcaaccctcacacatctcgaagtatatcctgagatggaggcctaaaaactctgtgggccgatggaaagaggcaactattcctggccatctgaactcgtatactattaagggcctgaagccgggagtcgtgtacgaagggcaactgatttccatccagcaatatgggcaccaggaggtgactaggttcgactttaccactaccagcacatccacaccagtgactagtaacacagtgaccggcgagaccactccattttcacccctcgtggcaacctctgaatctgtgactgagatcaccgctagtagctttgtggtctcctgggtctcagctagtgacaccgtttctggtttccgagtcgaatacgaactgtccgaggagggcgacgaaccacagtacctggatctcccatctaccgcaacttccgttaatatacccgacttgctgcctggtcgtaaatatattgtgaatgtgtatcaaatttcggaagatggcgagcaatccctgatacttagcacatcacagaccacagcacccgatgcccctcctgatacgaccgtggatcaggtcgatgacacaagcattgtggtgagatggtcacgtccgcaggctccaattaccggatatcgtatcgtctattcgccgtcggtggaaggctcatcaacagagctcaacctgcctgagactgcaaactccgtgacactgtctgacctccagccgggtgtacagtacaacatcactatatatgcggtggaggagaatcaggagagtactccagtggtcatacagcaggagacaaccggaacgccgcggagtgatactgtgccaagccctagggatctgcagtttgtggaagtgacagatgtgaaagtcactataatgtggacgccacccgaaagcgctgttactggctaccgagtggatgtaatcccagtgaacctcccaggagagcacggacaaagactgcctatctcacgcaataccttcgccgaggttaccggactctcaccaggtgtgacatactattttaaagtcttcgccgtgtcccatggtcgagaaagtaaacccctgacggctcaacagacaaccaaactagacgctccaacaaaccttcagtttgttaatgagactgactccacggtgttggtccgatggacaccaccgcgcgctcagatcactgggtaccggcttacagttggcttaacaaggagaggacagcccaggcagtataatgttggtccatccgtttctaagtacccacttaggaatctgcagcccgcctccgaatataccgtttccctcgtggctattaagggaaaccaagaatcacctaaagctaccggtgtgttcactaccctgcagccaggcagttcaatcccaccttacaataccgaagttaccgagacaaccatagtcataacatggacaccggccccgcgcatcggcttcaagctgggggttaggccatcacaagggggcgaagctccaagggaggtgacctccgattccggttcaatagtcgtatccggcctaacaccaggagtcgaatacgtgtacacaatacaggtcttgcgagatggacaggaaagagacgcacctattgtgaataaagtggtcactccactgtccccccctaccaatttgcacctagaagccaaccctgataccggtgtacttacggtcagctgggagcggtcaactactccagacataactgggtacaggattacaaccacccccactaatggtcagcaaggcaattctctcgaggaggtggttcatgcagatcagtctagttgtacttttgacaatctaagtcctggccttgagtataacgtttccgtctacactgtcaaagacgataaggagagcgtgcctatcagcgacaccatcatccccgcggtgcctccgcctactgatctcaggtttactaatattggtcctgacactatgcgggtcacttgggcccctccacccagcattgatctgacaaactttctcgtcagatattctccagtcaagaatgaggaagacgtggcagagttgtctatctctccaagcgacaatgcagtggtcctaactaatctgctgccagggactgaatacgtggtttcggtctcctccgtttatgaacagcacgagtccaccccccttaggggacgacagaaaaccggattggatagtcctactgggatagacttttccgacataaccgcaaacagtttcacagttcattggattgccccaagggccactatcacaggctacaggattaggcatcatcctgaacacttctcagggagacctagagaagaccgagtccctcactcccgtaactcgattacactcacaaatctgacccccggtaccgaatacgttgtttctattgtagccctaaacggtcgagaggagtctccccttctaatcggacagcaatccaccgtctcagacgttcccagagatctggaggtcgtcgccgcaacaccgacatctcttttaatatcatgggacgcccctgcggtaaccgtacgctactataggatcacatacggcgagacgggaggtaacagccctgtgcaggagttcacagtccctggctccaagtctaccgctacgatctcgggactcaaacccggagtagactatacaatcaccgtttacgcggtgacagggcgtggagacagcccggccagtagtaaacccatctccatcaactataggaccgagatcgataagccaagccaaatgcaagtgacagatgtgcaagataactccatctcagtgaagtggttaccatcttcaagccccgtgaccggataccgggttaccaccactcctaaaaacggaccgggtcctaccaagactaaaacggcaggcccggatcagactgaaatgaccatcgagggcctccaaccaactgtcgagtacgtcgtttcagtgtatgcgcagaaccccagtggtgaatcgcaacctcttgtgcaaactgcagttacaacgattccagccccaactgacctgaagtttacacaggtgactccaacatcactgtcagcccagtggaccccaccaaacgtgcagctcaccggatatagagtacgggtaacccccaaggaaaaaacaggccccatgaaagagattaacctggcacccgatagctcatctgtggtggtcagcgggctcatggtggccaccaagtacgaagttagtgtgtacgccctcaaagacaccttgacctctcgtccagcccagggggtggttacaactttagagaatgtcagcccacctcgcagggctagagtcacagacgctaccgaaacaactatcactatatcctggcggaccaaaacggagaccatcaccggcttccaagtggacgctgtcccagccaacgggcagactcccatccagagaactatcaaacccgatgtccgatcctataccattaccggcctgcagccgggcacggattataaaatctacttgtatactctgaacgacaacgcccggtcttctcctgtggtcatcgacgcctctactgcaattgacgcaccctccaatctgcgttttctagccacgactccgaacagcctgttggtttcttggcagccacccagagcccgcataaccgggtatatcattaagtacgaaaagccaggttctcctcctcgggaggtggtgccaagacctagacccggtgttacagaggctacaatcacaggcctggagcccggtaccgagtacacaatttatgtgattgccctgaagaataaccagaaatctgaacctctgatcgggaggaagaagactggtcaggaagccttgtcacagacaaccatttcctgggccccctttcaggatacaagcgagtatatcatctcctgtcatcctgtaggaacggacgaggagcccctccagtttagggtgccagggactagtacgagcgccaccctgacgggactaaccaggggcgcaacgtacaacgtgatcgtggaggctttgaaagaccagcagcgccacaaggtgcgggaggaagtggtgaccgtgggaaacagcgtgaatgaaggcctgaatcaacctactgacgactcttgcttcgacccatatacggttagtcattacgccgtgggagacgaatgggagaggatgtccgaatccggatttaagctcctgtgtcaatgcctggggttcggaagcggccatttccggtgcgattcctctagatggtgtcacgataacggggtgaattataaaatcggggagaagtgggatagacagggggagaatggccagatgatgtcctgcacttgcttaggcaacggcaagggcgaatttaaatgcgatccacacgaggcgacatgttacgacgatgggaaaacctaccatgtaggcgagcaatggcagaaggagtacctgggggccatctgctcttgtacctgttttggaggtcaaagaggctggagatgtgataattgtagacgacccggaggtgaaccttcgcccgaaggcaccactggccagagctacaatcagtatagccagaggtaccaccagagaacaaataccaatgtaaactgtccaatcgagtgtttcatgcctctggacgtgcaggccgatagagaggattccagggagtag

SEQ ID NO: 265627 - DNA, 7898 bp, Artificial Sequence
  derived and/or modified sequence
gcccgcgccggctgtgctgcacagggggaggagagggaaccccaggcgcgagcgggaagaggggacctgcagccacaacttctctggtcctctgcatcccttctgtccctccacccgtccccttccccaccctctggcccccaccttcttggaggcgacaacccccgggaggcattagaagggatttttcccgcaggttgcgaagggaagcaaacttggtggcaacttgcctcccggtgcgggcgtctctcccccaccgtctcaacatgcttaggggtccggggcccgggctgctgctgctggccgtccagtgcctggggacagcggtgccctccacgggagcctcgaagagcaagaggcaggctcagcaaatggttcagccccagtccccggtggctgtcagtcaaagcaagcccggttgttatgacaatggaaaacactatcagataaatcaacagtgggagcggacctacctaggcaatgcgttggtttgtacttgttatggaggaagccgaggttttaactgcgagagtaaacctgaagctgaagagacttgctttgacaagtacactgggaacacttaccgagtgggtgacacttatgagcgtcctaaagactccatgatctgggactgtacctgcatcggggctgggcgagggagaataagctgtaccatcgcaaaccgctgccatgaagggggtcagtcctacaagattggtgacacctggaggagaccacatgagactggtggttacatgttagagtgtgtgtgtcttggtaatggaaaaggagaatggacctgcaagcccatagctgagaagtgttttgatcatgctgctgggacttcctatgtggtcggagaaacgtgggagaagccctaccaaggctggatgatggtagattgtacttgcctgggagaaggcagcggacgcatcacttgcacttctagaaatagatgcaacgatcaggacacaaggacatcctatagaattggagacacctggagcaagaaggataatcgaggaaacctgctccagtgcatctgcacaggcaacggccgaggagagtggaagtgtgagaggcacacctctgtgcagaccacatcgagcggatctggccccttcaccgatgttcgtgcagctgtttaccaaccgcagcctcacccccagcctcctccctatggccactgtgtcacagacagtggtgtggtctactctgtggggatgcagtggctgaagacacaaggaaataagcaaatgctttgcacgtgcctgggcaacggagtcagctgccaagagacagctgtaacccagacttacggtggcaactcaaatggagagccatgtgtcttaccattcacctacaatggcaggacgttctactcctgcaccacagaagggcgacaggacggacatctttggtgcagcacaacttcgaattatgagcaggaccagaaatactctttctgcacagaccacactgttttggttcagactcgaggaggaaattccaatggtgccttgtgccacttccccttcctatacaacaaccacaattacactgattgcacttctgagggcagaagagacaacatgaagtggtgtgggaccacacagaactatgatgccgaccagaagtttgggttctgccccatggctgcccacgaggaaatctgcacaaccaatgaaggggtcatgtaccgcattggagatcagtgggataagcagcatgacatgggtcacatgatgaggtgcacgtgtgttgggaatggtcgtggggaatggacatgcattgcctactcgcagcttcgagatcagtgcattgttgatgacatcacttacaatgtgaacgacacattccacaagcgtcatgaagaggggcacatgctgaactgtacatgcttcggtcagggtcggggcaggtggaagtgtgatcccgtcgaccaatgccaggattcagagactgggacgttttatcaaattggagattcatgggagaagtatgtgcatggtgtcagataccagtgctactgctatggccgtggcattggggagtggcattgccaacctttacagacctatccaagctcaagtggtcctgtcgaagtatttatcactgagactccgagtcagcccaactcccaccccatccagtggaatgcaccacagccatctcacatttccaagtacattctcaggtggagacctaaaaattctgtaggccgttggaaggaagctaccataccaggccacttaaactcctacaccatcaaaggcctgaagcctggtgtggtatacgagggccagctcatcagcatccagcagtacggccaccaagaagtgactcgctttgacttcaccaccaccagcaccagcacacctgtgaccagcaacaccgtgacaggagagacgactcccttttctcctcttgtggccacttctgaatctgtgaccgaaatcacagccagtagctttgtggtctcctgggtctcagcttccgacaccgtgtcgggattccgggtggaatatgagctgagtgaggagggagatgagccacagtacctggatcttccaagcacagccacttctgtgaacatccctgacctgcttcctggccgaaaatacattgtaaatgtctatcagatatctgaggatggggagcagagtttgatcctgtctacttcacaaacaacagcgcctgatgcccctcctgacacgactgtggaccaagttgatgacacctcaattgttgttcgctggagcagaccccaggctcccatcacagggtacagaatagtctattcgccatcagtagaaggtagcagcacagaactcaaccttcctgaaactgcaaactccgtcaccctcagtgacttgcaacctggtgttcagtataacatcactatctatgctgtggaagaaaatcaagaaagtacacctgttgtcattcaacaagaaaccactggcaccccacgctcagatacagtgccctctcccagggacctgcagtttgtggaagtgacagacgtgaaggtcaccatcatgtggacaccgcctgagagtgcagtgaccggctaccgtgtggatgtgatccccgtcaacctgcctggcgagcacgggcagaggctgcccatcagcaggaacacctttgcagaagtcaccgggctgtcccctggggtcacctattacttcaaagtctttgcagtgagccatgggagggagagcaagcctctgactgctcaacagacaaccaaactggatgctcccactaacctccagtttgtcaatgaaactgattctactgtcctggtgagatggactccacctcgggcccagataacaggataccgactgaccgtgggccttacccgaagaggacagcccaggcagtacaatgtgggtccctctgtctccaagtacccactgaggaatctgcagcctgcatctgagtacaccgtatccctcgtggccataaagggcaaccaagagagccccaaagccactggagtctttaccacactgcagcctgggagctctattccaccttacaacaccgaggtgactgagaccaccattgtgatcacatggacgcctgctccaagaattggttttaagctgggtgtacgaccaagccagggaggagaggcaccacgagaagtgacttcagactcaggaagcatcgttgtgtccggcttgactccaggagtagaatacgtctacaccatccaagtcctgagagatggacaggaaagagatgcgccaattgtaaacaaagtggtgacaccattgtctccaccaacaaacttgcatctggaggcaaaccctgacactggagtgctcacagtctcctgggagaggagcaccaccccagacattactggttatagaattaccacaacccctacaaacggccagcagggaaattctttggaagaagtggtccatgctgatcagagctcctgcacttttgataacctgagtcccggcctggagtacaatgtcagtgtttacactgtcaaggatgacaaggaaagtgtccctatctctgataccatcatcccagctgttcctcctcccactgacctgcgattcaccaacattggtccagacaccatgcgtgtcacctgggctccacccccatccattgatttaaccaacttcctggtgcgttactcacctgtgaaaaatgaggaagatgttgcagagttgtcaatttctccttcagacaatgcagtggtcttaacaaatctcctgcctggtacagaatatgtagtgagtgtctccagtgtctacgaacaacatgagagcacacctcttagaggaagacagaaaacaggtcttgattccccaactggcattgacttttctgatattactgccaactcttttactgtgcactggattgctcctcgagccaccatcactggctacaggatccgccatcatcccgagcacttcagtgggagacctcgagaagatcgggtgccccactctcggaattccatcaccctcaccaacctcactccaggcacagagtatgtggtcagcatcgttgctcttaatggcagagaggaaagtcccttattgattggccaacaatcaacagtttctgatgttccgagggacctggaagttgttgctgcgacccccaccagcctactgatcagctgggatgctcctgctgtcacagtgagatattacaggatcacttacggagagacaggaggaaatagccctgtccaggagttcactgtgcctgggagcaagtctacagctaccatcagcggccttaaacctggagttgattataccatcactgtgtatgctgtcactggccgtggagacagccccgcaagcagcaagccaatttccattaattaccgaacagaaattgacaaaccatcccagatgcaagtgaccgatgttcaggacaacagcattagtgtcaagtggctgccttcaagttcccctgttactggttacagagtaaccaccactcccaaaaatggaccaggaccaacaaaaactaaaactgcaggtccagatcaaacagaaatgactattgaaggcttgcagcccacagtggagtatgtggttagtgtctatgctcagaatccaagcggagagagtcagcctctggttcagactgcagtaaccactattcctgcaccaactgacctgaagttcactcaggtcacacccacaagcctgagcgcccagtggacaccacccaatgttcagctcactggatatcgagtgcgggtgacccccaaggagaagaccggaccaatgaaagaaatcaaccttgctcctgacagctcatccgtggttgtatcaggacttatggtggccaccaaatatgaagtgagtgtctatgctcttaaggacactttgacaagcagaccagctcagggagttgtcaccactctggagaatgtcagcccaccaagaagggctcgtgtgacagatgctactgagaccaccatcaccattagctggagaaccaagactgagacgatcactggcttccaagttgatgccgttccagccaatggccagactccaatccagagaaccatcaagccagatgtcagaagctacaccatcacaggtttacaaccaggcactgactacaagatctacctgtacaccttgaatgacaatgctcggagctcccctgtggtcatcgacgcctccactgccattgatgcaccatccaacctgcgtttcctggccaccacacccaattccttgctggtatcatggcagccgccacgtgccaggattaccggctacatcatcaagtatgagaagcctgggtctcctcccagagaagtggtccctcggccccgccctggtgtcacagaggctactattactggcctggaaccgggaaccgaatatacaatttatgtcattgccctgaagaataatcagaagagcgagcccctgattggaaggaaaaagacaggacaagaagctctctctcagacaaccatctcatgggccccattccaggacacttctgagtacatcatttcatgtcatcctgttggcactgatgaagaacccttacagttcagggttcctggaacttctaccagtgccactctgacaggcctcaccagaggtgccacctacaacgtcatagtggaggcactgaaagaccagcagaggcataaggttcgggaagaggttgttaccgtgggcaactctgtcaacgaaggcttgaaccaacctacggatgactcgtgctttgacccctacacagtttcccattatgccgttggagatgagtgggaacgaatgtctgaatcaggctttaaactgttgtgccagtgcttaggctttggaagtggtcatttcagatgtgattcatctagatggtgccatgacaatggtgtgaactacaagattggagagaagtgggaccgtcagggagaaaatggccagatgatgagctgcacatgtcttgggaacggaaaaggagaattcaagtgtgaccctcatgaggcaacgtgttatgatgatgggaagacataccacgtaggagaacagtggcagaaggaatatctcggtgccatttgctcctgcacatgctttggaggccagcggggctggcgctgtgacaactgccgcagacctgggggtgaacccagtcccgaaggcactactggccagtcctacaaccagtattctcagagataccatcagagaacaaacactaatgttaattgcccaattgagtgcttcatgcctttagatgtacaggctgacagagaagattcccgagagtaaatcatctttccaatccagaggaacaagcatgtctctctgccaagatccatctaaactggagtgatgttagcagacccagcttagagttcttctttctttcttaagccctttgctctggaggaagttctccagcttcagctcaactcacagcttctccaagcatcaccctgggagtttcctgagggttttctcataaatgagggctgcacattgcctgttctgcttcgaagtattcaataccgctcagtattttaaatgaagtgattctaagatttggtttgggatcaataggaaagcatatgcagccaaccaagatgcaaatgttttgaaatgatatgaccaaaattttaagtaggaaagtcacccaaacacttctgctttcacttaagtgtctggcccgcaatactgtaggaacaagcatgatcttgttactgtgatattttaaatatccacagtactcactttttccaaatgatcctagtaattgcctagaaatatctttctcttacctgttatttatcaatttttcccagtatttttatacggaaaaaattgtattgaaaacacttagtatgcagttgataagaggaatttggtataattatggtgggtgattattttttatactgtatgtgccaaagctttactactgtggaaagacaactgttttaataaaagatttacattccacaacttgaagttcatctatttgatataagacaccttcgggggaaataattcctgtgaatattctttttcaattcagcaaacatttgaaaatctatgatgtgcaagtctaattgttgatttcagtacaagattttctaaatcagttgctacaaaaactgattggtttttgtcacttcatctcttcactaatggagatagctttacactttctgctttaatagatttaagtggaccccaatatttattaaaattgctagtttaccgttcagaagtataatagaaataatctttagttgctcttttctaaccattgtaattcttcccttcttccctccacctttccttcattgaataaacctctgttcaaagagattgcctgcaagggaaataaaaatgactaagatattaaaa

SEQ ID NO: 265628 - DNA, 6531 bp, Artificial Sequence
  derived and/or modified sequence
atgctgcggggccctggccctggcctgctgctgctggccgtgcagtgcctgggcacagctgtgcccagcactggagccagcaagagcaagaggcaggcccagcagatggtgcagccccagagccctgtggccgtgtcccagagcaagccaggctgctatgacaatggcaagcactaccagatcaaccagcagtgggagaggacctacctgggcaatgccctggtgtgcacctgctatggaggcagccggggcttcaactgtgagagcaagccagaggccgaggagacctgctttgacaagtacacaggcaacacctacagagtgggggacacctatgaaagacccaaggacagcatgatctgggactgcacctgcatcggggccggccggggccgcatcagctgcaccatcgccaaccgctgccacgagggcggccagagctacaagatcggggacacctggaggcggccccatgagaccggcggctacatgctggagtgtgtgtgcctgggcaatggcaagggggagtggacctgcaagcccatcgccgagaagtgctttgaccacgccgccggcaccagctatgtggtgggggagacctgggagaagccctaccagggctggatgatggtggactgcacctgcctgggggagggcagcggccgcatcacctgcaccagcaggaaccgctgcaatgaccaggacaccaggaccagctaccgcatcggggacacctggagcaagaaggacaacagaggcaacctgctgcagtgcatctgcacaggaaatggccgcggggagtggaagtgtgagcggcacacctctgtgcagaccaccagcagcggcagcggccccttcacagatgtgcgggctgctgtgtaccagccccagccccacccccagcccccaccctacggccactgtgtgacagacagcggcgtggtgtacagcgtgggcatgcagtggctgaagacccagggcaacaagcagatgctgtgcacctgcctgggcaatggagtgtcctgccaggagacagctgtgacccagacctatggaggcaacagcaatggagagccctgtgtgctgcccttcacctacaatggaagaaccttctacagctgcaccacagagggccggcaggacggccacctgtggtgcagcaccaccagcaactatgagcaggaccagaagtacagcttctgcacagaccacacagtgctggtgcagacccggggcggcaacagcaatggagccctgtgccacttccccttcctgtacaacaaccacaactacacagactgcaccagcgagggcagaagagacaacatgaagtggtgtggcaccacccagaactatgatgctgaccagaagtttggcttctgccccatggccgcccacgaggagatctgcaccaccaatgaaggagtgatgtaccgcatcggggaccagtgggacaagcagcacgacatgggccacatgatgcgctgcacctgtgtgggcaatggccgcggggagtggacctgcatcgcctacagccagctgcgggaccagtgcatcgtggatgacatcacctacaacgtgaatgacaccttccacaagagacatgaggagggccacatgctgaactgcacctgcttcggccagggccggggccgctggaagtgtgaccctgtggaccagtgccaggacagcgagaccggcaccttctaccagatcggggacagctgggagaagtatgtgcatggagtgcgctaccagtgctactgctacggccggggcatcggggagtggcactgccagcccctgcagacctaccccagcagcagcggccctgtggaggtgttcatcacagagacccccagccagcccaacagccaccccatccagtggaatgccccccagcccagccacatcagcaagtacatcctgcgctggaggcccaagaacagcgtgggccgctggaaggaggccaccatccctggccacctgaacagctacaccatcaagggcctgaagccaggagtggtgtatgagggccagctgatcagcatccagcagtatggccaccaggaggtgaccaggtttgacttcaccaccaccagcaccagcacccctgtgaccagcaacacagtgactggagagaccacccccttcagccccctggtggccaccagcgagagcgtgacagagatcacagccagcagctttgtggtgtcctgggtgtctgccagtgacacagtgtctggcttccgggtggagtatgagctgtctgaggagggagatgagccccagtacctggacctgcccagcacagccacctctgtgaacatcccagacctgctgcccggcaggaagtacatcgtgaatgtgtaccagatcagtgaagatggagagcagagcctcatcctgagcaccagccagaccacagccccagatgcccccccagacaccaccgtggaccaggtggatgacaccagcatcgtggtgcgctggagccggccccaggcccccatcaccggctacagaattgtgtacagccccagcgtggagggcagcagcacagagctgaacctgcctgagacagccaacagcgtgaccctgagtgacctgcagcccggggtgcagtacaacatcaccatctatgctgtggaggagaaccaggagagcacccctgtggtgatccagcaggagaccaccggcacccccaggagtgacacagtgcccagcccccgggacctgcagtttgtggaggtgacagatgtgaaggtgaccatcatgtggaccccacctgagagcgctgtgacaggctacagagtggatgtgattcctgtgaacctgcctggagagcacggccagaggctgcccatcagcaggaacacctttgctgaggtgacaggcctgagccctggggtgacctactacttcaaggtgtttgctgtgagccacggccgggagagcaagcccctgacagcccagcagaccaccaagctggatgcccccaccaacctgcagtttgtgaatgaaacagacagcacagtgctggtgcgctggaccccaccccgggcccagatcaccggctaccgcctgactgtgggcctgacccggcggggccagccccggcagtacaacgtgggccccagcgtgtccaagtaccccctgaggaacctgcagcctgccagcgagtacacagtgtccctggtggccatcaagggcaaccaggagagccccaaggccactggagtcttcaccaccctgcagcccggcagcagcatccccccctacaacacagaggtgacagagaccaccatcgtcatcacctggaccccagcccccagaattggcttcaagctgggcgtgcggcccagccagggcggggaggccccccgggaggtgaccagtgacagcggcagcatcgtggtgtctggcctgaccccaggagtggagtatgtgtacaccatccaggtgctgagagatggccaggagagagatgcccccatcgtgaacaaggtggtgacccccctgagcccccccaccaacctgcacctggaggccaacccagacaccggggtgctgactgtgtcctgggagaggagcaccaccccagacatcaccggctaccgcatcaccaccacccccaccaacggccagcagggcaacagcctggaggaggtggtgcatgctgaccagagcagctgcacctttgacaacctgagccctggcctggagtacaacgtgtctgtgtacacagtgaaggatgacaaggagagcgtgcccatcagtgacaccatcatcccagctgtgcccccacccacagacctgcgcttcaccaacatcggccctgacaccatgagggtgacctgggcccccccacccagcattgacctgaccaacttcctggtgcgctacagccctgtgaagaatgaagaagatgtggccgagctgagcatcagccccagcgacaatgctgtggtgctgaccaacctgctgcccggcacagaatatgtggtgtctgtgtcctctgtgtatgagcagcacgagagcacccccctgcggggccggcagaagacaggcctggacagccccaccggcatcgacttcagtgacatcacagccaacagcttcaccgtgcactggatcgccccccgggccaccatcaccggctaccgcatccgccaccaccctgagcacttcagcggccggcccagagaagatagagtgccccacagcaggaacagcatcaccctgaccaacctgaccccaggcacagaatatgtggtgtccatcgtggccctgaatggccgggaggagagccccctgctgattggccagcagagcacagtgtctgatgtgccccgggacctggaggtggtggccgccacccccaccagcctgctgatctcctgggatgccccagctgtgacagtgcgctactaccgcatcacctacggggagactggaggcaacagccctgtgcaggagttcaccgtgcccggcagcaagagcacagccaccatcagcggcctgaagccaggagtggactacaccatcaccgtgtatgctgtgacaggccgcggggacagccctgccagcagcaagcccatcagcatcaactacagaacagaaattgacaagcccagccagatgcaggtgacagatgtgcaggacaacagcatctctgtgaagtggctgcccagcagcagccctgtgacaggctacagagtgaccaccacccccaagaatggacctggccccaccaagaccaagacagctggccctgaccagacagagatgaccatcgagggcctgcagcccaccgtggagtatgtggtgtctgtgtatgcccagaaccccagcggggagagccagcccctggtgcagacagctgtgaccaccatcccagcccccacagacctgaagttcacccaggtgacccccaccagcctgagcgcccagtggaccccacccaacgtgcagctgaccggctacagagtgcgggtgacccccaaggagaagacaggccccatgaaggagatcaacctggccccagacagcagctctgtggtggtgtctggcctgatggtggccaccaagtatgaggtgtctgtgtatgccctgaaggacaccctgaccagcaggcctgcccagggcgtggtgaccaccctggagaatgtgagccccccccggcgggcccgggtgacagatgccacagagaccaccatcaccatctcctggaggaccaagacagagaccatcaccggcttccaggtggatgctgtgcctgccaacggccagacccccatccagaggaccatcaagccagatgtgcgcagctacaccatcaccggcctgcagcctggaacagactacaagatctacctgtacaccctgaatgacaatgcccggagcagccctgtggtgattgatgccagcacagccattgatgcccccagcaacctgcgcttcctggccaccacccccaacagcctgctggtgtcctggcagcccccccgggcccgcatcaccggctacatcatcaagtatgagaagccaggcagccccccccgggaggtggtgccccggcccaggcctggggtgacagaggccaccatcaccggcctggagcctggaacagagtacaccatctacgtgattgccctgaagaacaaccagaagtctgagcccctcatcggcaggaagaagacaggccaggaggccctgagccagaccaccatctcctgggcccccttccaggacaccagcgagtacatcatcagctgccaccctgtgggcacagatgaggagcccctgcagttccgggtgcccggcaccagcaccagcgccaccctgaccggcctgaccaggggggccacctacaacgtgattgtggaggccctgaaggaccagcagaggcacaaggtgcgggaggaggtggtgacagtgggcaacagcgtgaatgaaggcctgaaccagcccacagatgacagctgctttgacccctacacagtgagccactatgctgtgggagatgagtgggagaggatgtctgagagcggcttcaagctgctgtgccagtgcctgggcttcggcagcggccacttccgctgtgacagcagccgctggtgccacgacaacggggtgaactacaagatcggggagaagtgggaccggcagggagaaaatggccagatgatgagctgcacctgcctgggcaatggaaaaggagagttcaagtgtgacccccatgaggccacctgctatgatgatggcaagacctaccacgtgggggagcagtggcagaaggagtacctgggcgccatctgcagctgcacctgcttcggcggccagaggggctggaggtgtgacaactgccggcggcctggaggagagcccagccctgagggcaccaccggccagagctacaaccagtacagccagcgctaccaccagaggaccaacaccaacgtgaactgccccatcgagtgcttcatgcccctggatgtgcaggccgaccgggaggacagccgggagtag

SEQ ID NO: 265629 - DNA, 6531 bp, Artificial Sequence
  derived and/or modified sequence
atgctgcggggccccggccccggcctgctgctgctggccgtgcagtgcctgggtacagctgttccgagcaccggcgcctcaaaaagtaagcgacaggcgcagcaaatggtgcaaccccagtctcccgtcgctgtctctcaatccaaacccggatgctatgataatggcaagcactaccagatcaaccagcaatgggagcggacctatctcgggaatgccctggtctgtacatgttacggaggatcccgtggatttaattgtgaatctaaacctgaggcagaagaaacatgcttcgataagtataccgggaacacatatagagtgggggatacatacgagagaccaaaggacagcatgatctgggactgcacctgcatcggcgctggaagggggagaatctcttgtactatcgcaaaccgctgtcatgagggtggccagagctacaaaattggagatacatggcggcgccctcacgagactggcggttacatgctggagtgtgtttgcttggggaacgggaagggcgagtggacgtgcaagccgatcgctgagaaatgttttgatcacgctgctggcacctcatacgtagttggagagacatgggaaaagccctaccagggttggatgatggtcgactgcacctgtttgggcgagggctcaggacgaattacctgtacctcacggaaccggtgtaacgatcaggacacacgtaccagctaccggatcggcgatacatggagcaaaaaggacaataggggtaatctgctgcagtgtatctgcaccggcaatggacggggagagtggaaatgcgaacggcatacaagcgtacagacgacatcttccggcagcgggccatttaccgatgttcgtgcagccgtgtatcagccacagcctcatccccagcctcctccatacgggcattgcgtgactgactccggggtagtgtatagcgtcggaatgcagtggctgaagacgcagggtaacaagcagatgctctgtacgtgtcttggaaacggggtcagttgtcaggagacagccgtgacccagacctatggcgggaattccaacggcgagccgtgcgttttacccttcacatacaatggacgaactttctactcatgtaccactgaggggcgccaggacggtcatttgtggtgttcaacaacaagcaattacgagcaagaccagaaatactctttctgcactgatcacaccgtgttagtgcagaccaggggagggaatagcaatggggcgttgtgtcattttccatttctgtacaataaccacaattatacagattgtacttctgagggcaggcgcgataacatgaagtggtgtggcacaactcaaaactatgacgccgaccagaagtttggtttctgccctatggctgcccatgaagaaatatgcacgaccaatgagggagtcatgtatagaatcggggatcagtgggacaagcagcacgatatggggcatatgatgcgctgcacctgcgtggggaatggcagaggcgaatggacctgtatagcgtacagccagctcagggaccagtgtatagtggatgacattacttataacgtcaacgatactttccacaagcgccacgaagagggacacatgctcaactgtacttgctttggacagggccggggtaggtggaagtgtgaccccgtcgatcagtgccaggatagtgagaccggcacattctaccaaatcggggactcttgggagaaatacgtccacggggttcggtatcagtgctactgctatggccgagggataggcgagtggcattgtcagcctctccagacttacccaagcagctctggcccagtcgaggtttttattacggagaccccctctcagcccaactcccaccccatccagtggaatgctcctcagccttcgcatattagcaaatatattctcaggtggaggcccaagaattccgtcgggcgttggaaagaggcaactatacccggccacctaaattcatacacgatcaaaggtctcaagcccggggtggtgtatgagggacaactgatcagcatccagcaatatggacatcaagaggtgacgagattcgattttacgacgacttcaacatctactcctgtcacttcaaatacagtgacaggcgaaacaaccccgtttagccccttagtggctacctcggagtcggtaaccgaaataacggctagcagttttgttgtctcgtgggtcagcgcatcggatactgtctctgggtttagggtggagtacgaactctctgaagaaggtgatgaaccccaatacctcgatctgcctagcactgccacttcggtaaacatacctgacctgctgcctgggcgcaaatatatcgtgaatgtgtatcagatctcagaagacggggaacagtccctaatcctctccacttcacagactactgctcctgatgctccaccagatacaacagtagaccaggtggacgatacgtcaatagtagtccggtggtcccggcctcaggctccaatcaccgggtatcggatagtgtattctccctctgtggaaggatcatctacagagctcaatttgcccgagactgccaacagcgttaccttgtctgacctgcagccgggtgtccaatataatataactatatacgctgtggaagagaaccaagagagcacacctgtggttatccagcaagagacaacagggacccctagatcagacacggtcccgtcacctcgggatctgcaatttgtggaggtgactgatgttaaagtcactattatgtggactcctccagagagcgccgttactgggtacagagtcgacgtgattcccgtgaacctgcccggggagcatgggcagcgcctccccataagccgcaacacctttgcggaggtgactgggcttagccccggcgtgacatattacttcaaagtgttcgcagtctcacatggtcgcgagagcaagcccctcacagctcaacaaacaactaaactcgatgctccaaccaacctgcaatttgtgaatgagacagactctactgtgctcgtgagatggacccctccaagagctcagatcactgggtatagattgactgttgggcttactaggcgcggccagccgagacaatacaacgtgggacctagtgtctcgaagtatccccttaggaatctccagcccgcatccgaatatacggtgagcctggtggccatcaagggtaaccaagagtccccaaaggcaacaggcgtgtttactactctgcagccggggagctctatccctccttacaatacggaggtgacggaaactaccatagtaataacgtggaccccagccccccggatcgggttcaaactgggtgtccgcccgtcccagggaggagaggcccctcgggaggtgacatccgatagcggcagtatagtcgtgtctgggctgaccccaggggtggagtacgtctacacgatccaggtgctgcgcgacgggcaggaacgcgacgcgccgattgtgaataaggtggtgactcctctttctcccccaactaaccttcatctggaggctaatcctgacaccggagtattgaccgtgtcttgggaacggtcgactacacccgatattaccggatatcggatcaccacaactccaaccaacggacagcaggggaactccctggaagaagtggtccatgccgatcagtccagctgtacttttgacaacctgagcccgggcctggagtataacgtgtcagtgtacacagtaaaggatgacaaggaaagtgtgccaatctctgacaccatcataccagccgtgcccccaccaaccgatctccgattcacaaatatcgggcccgatactatgcgcgtcacatgggcaccgccgccctctatcgatctgacgaactttctagtccggtactcacccgtcaaaaacgaagaggacgtcgccgaactgtccatttctccatctgacaatgccgtggtcttaaccaatttactgccaggcacagagtacgtggtatctgtctcttcggtctatgagcaacacgagagcacccccctgcgcggccggcagaagaccgggttggattcccctacagggattgacttttccgatataaccgctaacagttttaccgtccactggatcgcccccagagcaaccattacgggatataggatccggcatcatccagaacacttctccggccgaccccgggaagaccgcgtaccacacagtcggaatagcattaccctgacaaacctgacaccgggcaccgagtacgtcgtgtcaattgttgccctcaacggccgagaggagagcccacttctgataggccagcaatcgacagtttcagacgtgcctagagatctggaagtggttgcggctacacccacttccttgttaatctcctgggatgcccctgctgtaacagttcgctactatcgcatcacctatggagagactggcggaaactcacctgtgcaagagtttaccgtgcccggtagcaagtccacggctaccatctcaggccttaagccgggtgtggactatacgatcacggtatacgcggtgaccggccgcggggattcccctgccagctccaaacctataagcattaactatagaacagaaattgacaaaccttctcagatgcaggtgactgacgtgcaggacaactctatcagtgtgaaatggcttccttccagtagtcccgtcacgggctaccgtgttacaaccactcccaagaacggcccgggtcccactaaaactaaaaccgccggcccagatcagactgaaatgaccatagaaggacttcagccgacggtagaatatgtagtaagtgtgtatgcccagaatccatctggcgagtcccaaccattggtccagactgccgtgaccaccatccctgcgccaacagatctgaagtttacccaagttacccctacgagtctcagtgcgcagtggactcctcccaacgtgcagctcacaggatatagagtgcgcgtgactcctaaagagaagaccggtccgatgaaggaaatcaaccttgcgcctgactcaagctctgttgtcgtgagtggactgatggtcgcaactaaatatgaagtgagcgtgtatgcccttaaagatacattaacctccagaccggcccagggcgtggtcaccaccctcgagaatgtatcaccaccgcggagagctcgggtgactgacgccaccgaaactacaatcactataagctggcgcacaaaaacagagacaatcacaggttttcaagtagatgcagtccccgctaatgggcaaaccccaatccagcgtacaatcaagccggacgtccggagttacactattaccgggttacagccagggaccgactacaagatctatctatacactctcaacgacaacgcgaggagctcaccagtggtgattgacgcttccacggccatcgacgccccaagcaacctgcggttcctggcgactacacccaattcccttttggtgtcctggcagccccctagggctcggatcaccgggtacatcattaagtatgagaagcccggtagtcccccacgagaggttgttccaaggccaaggcctggagtgactgaggctaccatcaccggattggagcctggtactgagtataccatctacgtaatcgcattgaagaacaaccagaaatcggagcccctgatcgggaggaaaaagacgggccaagaggctctcagccagaccactatcagctgggcgccattccaggatactagtgagtacatcatctcctgtcaccctgtcggtaccgatgaggaaccattgcaattcagagtgcccggtacttctacctcagccaccctgactggtttaactaggggggccacttacaatgttattgtggaagcactcaaggaccagcagaggcataaagtgagagaagaggtggtgactgtaggcaacagcgtgaacgagggcctgaatcagcccacagatgattcttgtttcgacccttatacagtgagccactatgcagtaggcgatgaatgggagagaatgtccgaatcaggttttaagctgctctgccagtgtcttgggttcggttctgggcactttagatgtgacagctcaagatggtgtcacgacaacggtgttaattacaagataggtgaaaaatgggatcgccagggcgagaacggccagatgatgagctgcacctgtttgggcaacggaaagggtgaattcaaatgcgatccacatgaagccacctgttacgatgacggtaaaacctatcacgttggagagcagtggcagaaagaatatttgggggctatttgctcttgcacctgttttggtgggcagcggggctggcggtgcgataactgcaggaggcctggcggagagcccagtccagaaggtaccaccggtcaatcctataatcaatattcccaaaggtatcaccaacgcactaataccaatgtgaactgccccatcgagtgcttcatgccactggacgtgcaggcagacagggaggacagccgggagtag

SEQ ID NO: 265630 - DNA, 6531 bp, Artificial Sequence
  derived and/or modified sequence
atgctccgtgggccaggtcccggtcttctgttattggctgttcagtgccttggaaccgctgtaccttcaacaggcgcatccaagagtaagagacaggctcagcaaatggtacagccgcagtccccagtggctgtctcccaatccaagcccggttgctatgacaacggaaaacattaccaaatcaaccagcagtgggaacgaacttacttgggaaacgcattagtgtgtacttgttacggcggatcccggggtttcaattgtgagtcaaaaccagaggcagaggaaacatgtttcgataaatacaccggaaacacgtacagagtgggagacacctacgaacgcccaaaggattctatgatatgggactgtacatgtattggcgctggaagaggaaggatctcatgtaccattgctaacaggtgccatgaggggggacagagctacaaaattggggatacctggcgacggccacacgagaccggcggttacatgctggaatgcgtgtgcttgggcaacggaaagggcgaatggacctgcaagcccatagccgagaagtgcttcgatcatgccgcaggcacctcttacgtggtcggagagacctgggaaaaaccttaccaaggctggatgatggttgactgtacatgtctaggagaggggtctggacgcatcacatgcacgagccgcaatcgctgtaacgaccaagacactaggactagctataggattggggacacatggagcaaaaaggacaatcgaggcaacctgctgcaatgcatctgtacaggcaacggccgaggggagtggaaatgcgaaagacatacatccgtgcagacaaccagttctggaagtggcccattcacagacgtccgcgctgcggtctatcagccccagccccacccccagccaccaccgtacggtcactgcgtgaccgactcaggtgtggtgtattcagttggcatgcaatggttgaaaactcagggcaacaaacagatgctgtgcacctgcctggggaatggtgtcagctgccaggaaaccgcagttacacaaacatacggtgggaactcgaatggcgagccatgcgtcctcccattcacgtacaacggtcgtacattctatagttgtacaacagaaggccgacaggacggccacctgtggtgctctacaaccagcaattacgaacaggaccaaaagtatagcttctgcaccgatcatacagtccttgttcagacacgaggaggcaactccaatggagcgctgtgtcatttcccctttctgtacaacaatcataactataccgactgcacatcagaaggtcgcagggataacatgaagtggtgcggcaccacgcaaaattacgatgccgaccaaaaatttggtttctgtcccatggccgcacatgaagagatctgcacaacaaatgaaggagtcatgtatcgcattggggaccagtgggacaaacagcacgacatgggccacatgatgcgttgtacttgtgtgggtaacggtcgaggagaatggacatgcatcgcatactcccagctgagagaccaatgtattgtagatgatatcacatataatgtgaacgataccttccacaaaagacacgaggaaggacacatgctgaattgtacctgtttcggtcagggtaggggcagatggaaatgtgaccccgtagatcagtgtcaggatagcgaaaccggcactttctatcaaataggcgatagctgggagaagtacgtgcatggtgtgaggtaccaatgctattgctacggtcgtggtatcggagaatggcactgccagcccctccagacttatccctcgtcctccggcccagtggaagtctttataacagagaccccctctcagccaaattcgcaccctattcaatggaacgcaccccagccatcacatatctctaagtacattttacgatggagacctaagaacagtgtgggacgttggaaggaggcgacaatccccggacacctaaactcgtacaccattaaggggctcaagccaggcgtggtgtacgagggccagctcattagcattcagcagtacggccatcaggaggtgacgcggtttgatttcacgacaacctcaacgagcacacccgttacatctaacaccgtgactggcgaaactacaccattctccccgctagtggcaacctccgagtcagttacagagatcacggccagctctttcgtcgtgtcatgggtctcagcttccgatacagttagcggatttagggtggaatacgaactaagtgaggagggggatgagccgcagtacctcgacttaccctctactgcaacttctgtgaacatacccgatctgctgccagggaggaaatatattgtcaatgtctaccagataagcgaagacggggagcagtccctcattctttccacaagccaaactaccgcacccgacgcaccaccggacaccaccgtcgaccaggtggatgacactagcattgtcgtgaggtggtccaggccgcaagcgccaatcacagggtatagaatcgtgtactcaccctccgtcgagggtagttccaccgagctgaacttacccgagaccgcaaattccgtgacgctgtctgatttgcagcctggagtccagtacaacatcacgatctatgctgtggaggagaaccaagagagcacaccagtcgtcatccagcaggaaaccaccgggacaccacgttcagataccgtgccatcccctcgggacctccagtttgtcgaggtgacagatgtgaaggtcacgattatgtggaccccccctgagtctgcagtcacaggttatcgggtggatgtcattcccgtcaacctgccaggggaacacggccagaggctgcctatttcgaggaatacctttgccgaggtcacaggcctgagtccaggcgtgacttattactttaaagtttttgccgtgtcccacgggagagaatccaagcccttgactgcacagcaaaccaccaagcttgacgccccaactaacttgcaattcgtcaatgagacggactcaaccgtgctggtgcgatggactccccctcgggctcagatcactggctaccgactgactgttggcctgaccaggaggggccaaccaaggcagtacaacgtcggcccatcagtgagcaaatatcctctccgcaatctgcaaccagcatctgaatacactgtttcgctggtagcaataaaaggcaaccaggagtcaccgaaggctaccggagtcttcacgactttgcaacctggaagctctattcccccttacaatactgaagtcactgagacaacaattgttattacgtggacccctgcaccccgtataggattcaaactgggggtgcgcccatctcaaggcggagaagccccaagagaagtgactagtgattcagggtcaatcgtcgtgtctggcctaacacctggagtggagtatgtctatactattcaagtgctgcgtgatgggcaggaaagggatgcaccgattgtcaataaagtcgtgacacccctgtcccctccaactaatctgcatttagaagccaacccagacacaggggtattgacagtgagttgggaacggtcaacaaccccagacatcactgggtaccggataacaaccacacccacgaacgggcagcagggcaactccctggaggaggtcgtacacgctgatcagtcatcctgcactttcgataacctgagtccgggtctagaatataacgtgagcgtatacaccgtgaaagacgataaggaatccgtaccaatttctgacactattatccccgcagttcctccccctaccgacctaagattcacaaatattggaccagatacaatgcgagtgacatgggctcctcccccttcaattgacttaacaaatttccttgtgaggtactcccctgtgaaaaacgaggaggacgttgcagagcttagcatctccccttcagataatgcagtagtgttgactaatctcctcccgggaactgaatatgtggtctccgtctcttccgtatatgagcagcatgagtctactccgttacgcggtcggcagaagactggcctggactctccaacagggatcgactttagtgacatcacagcaaattcgttcaccgtgcactggatcgcccctagggctacaatcacaggttaccgcatccggcatcaccctgaacacttttcaggcaggccacgggaggaccgagtgccccacagcaggaattccataactttaactaacttgactccaggcactgaatatgtagtcagtatcgtcgctttgaatgggcgagaagaatcacctctgctgatcgggcagcaaagcacagtgtcagatgtcccacgggacctggaggtggtagccgcaacaccgacaagtctcctcatttcctgggacgccccagctgtgaccgtacgctattatagaatcacctatggagagaccggaggcaacagcccagtccaggaattcaccgttccaggttccaagtctactgccaccataagcggcctgaagccgggtgtcgattacactattacggtttacgctgtgacgggaaggggagattcccccgcttcctctaagcctatctctattaattatcgcactgagatagataagccttcccaaatgcaggtaacggacgtccaggataatagtattagtgttaaatggctgccttctagctcccccgtgaccggttatcgtgtgaccacaacgcctaaaaatggccctgggcctaccaagacgaagaccgccggacccgatcagacagaaatgactattgagggtcttcagcctacagtggagtatgttgtcagcgtgtatgcccagaatcccagcggggaatcccagcctctggtgcagactgcagtcacaacaatccctgcacccacagatctgaaattcactcaggtgactcccacctccctgtcagctcagtggacaccgcctaatgtgcagttgacaggctaccgggtgagggtcacgcctaaagaaaaaactggaccaatgaaagagatcaatttggctccagatagcagcagtgttgttgtcagtggactgatggttgccactaaatacgaagtgagcgtttatgctctgaaggatacgctcacctcccgcccagcccagggcgttgtaaccaccctcgaaaacgtctcaccccctcgcagggcccgtgtaactgacgcaacagagaccacaattaccatctcctggcgcaccaaaaccgagaccatcactggattccaggtggacgctgtgccagccaacggtcagactcctatacagcgtactatcaagcccgacgtgcggagttatacaattaccggcctgcaacccggaacagattataaaatttatctctacacgcttaacgacaacgcgcgttccagtcctgtggtgatcgatgccagtaccgcaatcgacgcccctagcaatctgcgctttcttgctacaacaccaaacagtctgctggtctcatggcagccgccaagggctagaattacaggctacatcatcaaatatgaaaaaccaggcagcccgcctcgcgaggtcgtacctaggccgagacccggtgttaccgaagctacaattaccggcctggaacccggtacagaatacacaatttatgtaattgccctgaaaaacaaccagaagtccgagcctctcattggacgaaagaagaccggtcaggaagccttgtcgcaaacaacaattagctgggcaccgtttcaggatacaagcgagtacatcatctcatgccacccagtggggacagacgaggagcctctgcagttccgggtacccggaaccagcacttccgccacgctgaccgggcttacacgcggagccacgtacaatgttatcgtggaggcgctcaaagatcagcagcgtcacaaagtccgagaggaggtggtaacagttggaaattccgtcaacgagggccttaatcagcccacggacgacagttgtttcgacccatacacagtgtcccactatgccgtgggggacgagtgggaaaggatgtcagaatcaggtttcaagctgctttgtcagtgtttggggtttgggtccggtcacttcaggtgcgattctagccggtggtgccacgacaacggtgtcaattataaaataggcgaaaaatgggatcgccagggagagaacgggcagatgatgtcttgcacatgtctgggaaacggcaaaggggagttcaagtgtgatccccatgaggcaacttgctacgatgacggcaaaacttatcacgtgggtgaacagtggcagaaggagtatctcggggcaatttgcagctgcacctgcttcggaggccagcgtggatggcggtgcgacaactgtcgccgaccaggtggagaaccctcaccagagggcacaaccggacagagctacaaccaatacagccagcgctatcaccagaggaccaacaccaacgtgaattgtcctattgagtgctttatgcctttggacgtccaagcagaccgcgaagattctcgagaataa

SEQ ID NO: 265631 - DNA, 6531 bp, Artificial Sequence
  derived and/or modified sequence
atgttaagggggccgggccccgggctcttgttactggccgtgcagtgtctgggcactgcagtcccctctaccggcgcatccaagtcaaagcggcaagcccagcagatggtccagccacagtctccagtggccgtgtcgcaaagcaaaccagggtgctacgacaatggcaagcactaccagattaaccagcagtgggagcgaacatatctcgggaatgccctggtctgtacctgttacggtggcagtcgcggtttcaactgcgagtccaagcctgaagccgaggaaacttgctttgacaagtataccggcaatacgtaccgagttggagatacctacgaacggcccaaggacagcatgatctgggactgcacgtgcatcggcgctgggcgcgggcggatttcatgcacaattgcaaataggtgtcacgaaggtggccagagctataagatcggcgacacctggaggagaccccatgaaactggcggctacatgttagaatgtgtttgtcttggaaatggaaagggggaatggacatgcaagcccattgcggaaaaatgctttgatcacgccgccgggacatcttacgtggtgggcgaaacctgggagaagccttatcagggttggatgatggtggactgtacctgcctgggagagggaagcggaaggattacttgcactagccgcaaccgttgcaatgatcaggacacccgcacgtcgtatcggatcggcgacacttggtctaagaaggacaataggggcaacctgttacagtgcatctgcaccggaaatggcagaggagaatggaaatgcgagcgccatacctccgtccagacaacttcaagcggatctgggccatttactgatgtgagagcagctgtctatcaaccccagccacacccacagccaccaccctatggccattgtgttaccgactcgggtgtggtctactcagtcggaatgcagtggttgaaaacccaaggtaacaaacaaatgctctgcacatgtttgggcaatggcgtgtcttgccaagagaccgcggtcactcaaacttatggaggcaatagcaacggcgagccttgcgtacttccttttacctataatggcaggaccttttactcttgcactactgaggggcggcaggacgggcatctttggtgctcaactacctccaactatgaacaagaccagaaatacagcttctgcacggaccataccgtccttgtacagaccagaggcggaaattccaacggagcactgtgccactttccattcctgtataataaccacaattacaccgactgcaccagcgaggggagacgtgataatatgaaatggtgtgggacaactcagaattatgatgcagaccagaagttcggcttctgcccaatggccgcgcatgaagaaatctgtacaaccaacgaaggcgttatgtataggatcggggatcagtgggacaagcagcacgatatggggcacatgatgcgatgtacttgcgttggcaatggaaggggtgaatggacctgtattgcttattcccagctgagagaccagtgcattgtggatgacatcacctacaacgtgaatgacaccttccataaaaggcacgaagaggggcacatgctaaactgcacctgttttggccaggggcgtggaagatggaaatgtgatcctgttgaccagtgtcaagacagtgagacagggacattttatcagatcggcgacagctgggagaagtatgtccatggtgtccggtaccagtgttactgctacgggcggggtattggcgaatggcattgtcagccactgcagacttatccctcgagctccggcccagttgaggtcttcattactgagactccgagccaacccaacagtcaccctatccagtggaatgcgcctcaaccctctcatatctcaaagtacattctcagatggcgacccaaaaactccgtaggccgctggaaagaagccaccattcctggacacctgaactcctataccatcaagggcctgaaacctggcgtcgtgtatgagggacagttaattagtatccaacagtacgggcatcaggaagtgaccagattcgacttcactactacatccacgtccacgcctgtgaccagcaacaccgtgactggagagaccacacctttttcacctcttgtcgcgactagtgagtccgtaactgagattactgccagtagctttgtggttagctgggtctccgcaagcgatactgtctccggcttccgggtggagtacgaactatctgaggaaggtgacgagccccaatacctggatctccctagcacggccactagcgtcaacatcccagatctccttccggggcgaaaatatatagtaaatgtctaccagatcagtgaggatggcgagcaatctctcattctgtctacctctcaaaccaccgccccagacgccccccctgatacaactgttgaccaggtcgatgacacaagcatagtcgtgcgttggtcacgaccgcaggctcctataaccggatataggatcgtctactcgccatctgtcgaaggcagctccacagaactgaatctccccgagaccgccaatagtgtgaccctgtccgacttgcagcccggcgttcagtacaacattacaatctacgccgttgaagagaaccaggagagtactccagtcgtgattcagcaggaaactacaggcactccaaggagcgacaccgtgccgagtcctcgtgacctgcaattcgtggaggtgaccgatgttaaggtgaccatcatgtggactccacctgaatccgctgtgaccggctacagggtcgatgtgattcctgtgaacctgccaggggaacatggacagagactaccgatttcccgtaatacctttgcagaagttaccggcctcagtccaggcgtgacatactactttaaggtttttgctgtatcccacggacgggagagtaaacccctcacggcacaacagaccactaagttagatgccccaacaaatctccagtttgtcaacgagaccgacagcacagttctagtccggtggacaccacctcgcgcgcaaataacagggtaccggctcactgtgggcctgacaagaagaggacagccccgtcagtataatgtagggccttccgtcagtaagtatcccctgaggaatttacagccagcttccgagtatacagtgtctctagtcgcaataaaaggaaaccaagagtcccccaaggctaccggggtgtttacaacactccaacctggctcaagcatacctccgtacaacaccgaggtgactgaaacaactatcgtaattacgtggacccctgctccacgcatcggcttcaaattgggcgtgcgcccgtcgcagggaggcgaggccccccgggaggtgacctctgactctgggtctattgtggtatccggattaacccctggagtcgaatacgtttatacaattcaggtgctccgggacggacaagaaagagacgccccaatcgtaaataaagtcgttacgccgctgtcccctcccactaatttgcatctagaagcaaatcccgacaccggagtgctgacagttagctgggagagatccactacccctgatattacgggttaccggattactacaacgccgaccaatggacagcaaggcaattcactggaggaggttgtccatgccgatcagtcgagctgcaccttcgacaacctgtcaccagggctcgagtataacgtgagtgtctacactgttaaggacgacaaggaaagtgtgccaatctctgatactatcattcctgccgtgccccccccaactgacctgagatttaccaacatcggtccagacaccatgagggtgacctgggccccgccccctagcattgacttaacaaatttcttagtgagatattcccctgtcaaaaacgaggaggatgtggctgaactctcaattagccccagtgataatgcagtggtgctcaccaacttgctcccggggacagagtatgtggtctctgtctcaagtgtctatgagcagcatgaaagtactcccctgcgcggccggcaaaaaactggtctggactcccccacgggcatagacttcagcgatataacggctaatagtttcaccgtgcactggattgccccccgcgccacgataaccgggtatcggatacggcaccaccccgagcactttagcggcagacctcgagaggatagagtgcctcattcccgcaactccatcacattgacaaacctgacccctggaaccgaatatgtcgtatccatcgtggctttgaacggtcgagaggaatctcctctactgattgggcagcagtcgactgttagtgatgtgcccagggacctggaggttgtggctgccactcctacttcactactgatctcctgggatgctccagccgtgaccgtcaggtattacagaataacctacggagagactgggggcaattctcccgtacaggagttcactgtgcccggtagcaaatctaccgcgaccatcagcggcctcaagcctggcgtcgactacacaatcacggtgtatgccgtcaccggacgtggggactcccccgcatcaagcaagcctatttccatcaactatcgcaccgaaatcgacaagccctctcagatgcaggtcaccgatgtccaagataacagtattagcgtgaagtggctgccatcctccagcccagtgactggatatagagtgaccaccacaccgaagaacgggcctggacctactaagacgaagactgctgggcccgaccagacagagatgacgatcgaggggctgcagcctaccgtcgagtacgtggtttcagtgtatgcccagaatcctagtggcgagtcacaaccactcgtccaaaccgcggttacgaccataccggcacccacagacttaaaattcacgcaggtgaccccaacatctctttccgcccagtggactccacctaatgttcaacttaccgggtatcgagtaagggtgaccccgaaggaaaaaacgggaccaatgaaggagataaatcttgcccccgactcgtctagcgtcgtcgtgtccgggctgatggtagctactaagtatgaagtctccgtgtacgcgcttaaagatactttaacttccaggccggcccagggagtagtgactacattagagaatgtgtctccacctaggagagccagggtgacagacgccaccgaaacgacaattactatctcgtggcgtacgaaaacagaaacaattacggggtttcaggtggatgccgtaccagccaacggccagaccccgattcagagaactatcaagcccgacgtgagaagttataccattacaggcctgcagcccggcaccgattataagatttacctttacacactcaacgataacgctcggagttccccagtcgtgatcgacgcttctaccgccattgatgcaccttccaatcttaggttcctcgcaaccacccccaactctctgctggtgagttggcagccaccaagagctagaataaccggctacatcattaagtacgagaaaccagggtcccccccccgcgaggtggtgcccagacccaggcccggcgtcacggaggccaccatcactggcctggaaccaggcactgaatacacaatctatgtcatcgcactgaaaaacaaccagaagagcgagccgctgatcgggaggaagaagactgggcaggaggctctcagccagaccacaatatcatgggccccgttccaagacacctcggagtacattatctcttgtcatcctgttgggacggatgaagaacctttgcagtttcgggtgccaggaacctccactagcgctactctgactggtctgacacgaggagcgacatacaatgtcattgtggaggccttgaaggatcaacagagacacaaagtcagagaggaggtggtaactgtgggcaattctgtgaatgagggtctgaaccagcccacggacgactcctgttttgatccttacacagtgtcacattatgctgtaggtgatgagtgggaaagaatgtccgaatcaggtttcaagctgctctgccagtgtctcggctttggcagcggccatttcaggtgtgattctagtaggtggtgtcacgacaatggggtgaattataaaattggagaaaagtgggacaggcagggagagaacggtcaaatgatgagttgcacctgccttggaaacgggaaaggcgagtttaagtgtgacccacacgaagctacatgttacgatgatggaaaaacatatcacgtgggggagcagtggcagaaggaatatctcggggctatttgtagttgcacctgctttgggggtcaacgtggatggcggtgtgacaactgcagacgccctggcggtgagccatcccctgaagggaccacgggtcaatcatacaatcagtatagccaacgctatcaccaacgaactaacactaacgtgaactgtccaattgagtgtttcatgcctcttgatgtacaggcggaccgcgaagactcccgagagtag

SEQ ID NO: 265632 - DNA, 6531 bp, Artificial Sequence
  derived and/or modified sequence
atgttaagaggacccgggccaggcctactcctgctggcagtgcaatgcctcggcactgcagtcccatccactggagcctccaagtcaaagcgccaggcacaacagatggtacagccccaatccccagtggcagtttcgcaaagtaaaccaggttgctatgacaatggaaagcactaccagatcaaccagcaatgggagcggacctatcttggcaacgccctcgtctgtacatgctatggcggaagcaggggttttaattgtgagtccaagcctgaggctgaagagacatgttttgataagtatactgggaatacgtacagggttggtgatacctacgaaagaccaaaggatagcatgatatgggactgtacatgcataggagcggggagaggcaggatctcatgtaccattgcaaatagatgccacgaaggcgggcagagttataaaataggggacacttggcgacggccacatgaaactggaggctacatgctggaatgtgtgtgtttaggaaatggcaaaggagaatggacgtgtaagcccatagcagaaaagtgttttgatcacgccgcaggtacaagttatgtggttggagagacatgggagaagccatatcaaggctggatgatggtggactgtacctgtttgggtgagggatcaggtagaatcacttgtacatcacgtaacagatgcaatgatcaggacacgagaacaagttataggataggcgacacctggtcaaaaaaagataacagaggcaatttactccaatgcatatgcaccggtaatgggaggggggaatggaaatgtgagagacacactagtgttcaaacaacaagctctggcagcggccccttcacagatgtacgggccgctgtctaccagccacagccccaccctcagccccccccatatgggcactgtgtcactgacagcggcgtggtgtatagcgtcggaatgcaatggttgaaaacccaagggaacaaacagatgttatgtacttgcttaggaaatggtgtgtcatgtcaggaaactgctgtgacacagacatacggtggaaactctaatggcgaaccgtgcgtgttgccctttacttacaacggtaggaccttctattcttgcacgacagagggaagacaggacggacatttgtggtgctctacaacatctaactacgaacaggaccagaagtattctttttgtaccgatcataccgtcttagtccagactcgaggggggaacagtaatggtgctctgtgtcatttccccttcctttacaataatcataactacaccgactgcacatccgaggggaggcgggataacatgaaatggtgcggaaccacacaaaactacgatgcagaccaaaagtttggcttttgtccaatggctgcacatgaagaaatctgtacaacaaatgaaggagtgatgtatagaatcggggatcagtgggataagcagcatgacatgggacatatgatgcgatgcacatgcgtgggaaatggccggggggaatggacctgtatcgcctatagccagctcagagaccaatgcattgtcgacgatattacttacaacgtaaatgatacctttcacaagagacatgaggaagggcatatgctgaactgtacatgttttgggcagggtagggggaggtggaaatgtgatccagtagaccagtgccaagactccgaaaccggcacgttctatcagattggggactcctgggaaaagtacgtacatggcgtgcgctatcagtgttactgttacggcagagggataggggagtggcattgccaaccactgcagacctacccgtcatcttctgggccagtggaggtctttataacagaaacaccatcccaaccaaattctcaccctatacagtggaatgcgccccagccttcacacatctcaaaatacatcctgcgatggagaccaaaaaatagcgtaggaagatggaaagaagcgaccatccccggccacctgaattcttacactatcaaaggtctgaaacccggggtggtctatgaaggacaattaatctcaattcagcagtatggacaccaggaagttacaagatttgattttactacgacaagcacttccacaccagtcacaagcaatacagtcaccggcgagacgacccctttcagccccttagtcgccacaagtgaatccgtcacagagataaccgcttcctcatttgtcgtttcgtgggtcagcgcatcggatacggtctctggctttagagtggaatacgagctgtccgaggagggagacgaaccacaatatctggatctccctagtactgccacctccgttaacatccctgacctgttacccggccgtaagtacatcgttaatgtgtatcagatttccgaggatggagagcagtctttgatccttagcacctcacagactacagcaccagacgcaccacccgatacaacagttgaccaggtagacgacacaagcatcgttgtccggtggagtagacctcaagccccaatcaccggatatagaattgtgtactcaccaagcgtggaaggctccagcaccgaactgaacctcccagagactgctaatagcgtgaccctctcagacctgcagccaggcgtgcaatacaatattaccatttacgccgtcgaagagaatcaggagtctacaccagtagtaatccaacaggagacaacaggcacaccacgatcagacaccgtgccttcccctagagacttgcaatttgttgaagtaacagacgttaaagtcaccatcatgtggactcctcccgaatcagcggttactggatatagagtggacgtgatacctgtgaacttgcctggcgagcatggccagcggctgccgattagccgcaatactttcgccgaagtgactggactttcccctggcgttacatactatttcaaggtgttcgccgtgtctcatggtagggagtctaagccgcttaccgcccagcagaccactaaactggacgcccctacgaacctccagtttgtgaacgaaacggacagtaccgtcttagtaagatggacacctccccgcgcccagattaccggctatcggctgactgtgggcctaaccagaagaggacagcctcgccagtataacgttggaccctctgttagcaaatatcccctgcgcaatctgcagcctgcttctgaatacactgtctcactggttgctatcaagggaaaccaagaatcccccaaggctacaggcgtttttaccactctccaacctggaagcagcatccccccctataataccgaagtgacagagaccacaattgtgataacatggaccccggccccacgaattgggttcaaactcggcgtccgaccaagccagggtggcgaggctccaagagaggtgacatcagactccggttcaatcgttgtttcagggctcacccctggtgtggaatatgtctatacgatccaagtattgcgggacggccaagagcgcgacgccccgatcgtcaataaagttgtgaccccattgtccccacccacgaatctccatctggaagccaatcccgacacaggtgttcttactgtatcttgggagcggtctacaacccctgacattacaggctacaggattactactaccccgaccaacggtcagcaaggcaactctcttgaggaggtggtccacgctgatcagagttcatgcacattcgataacttatccccaggcctggaatataacgtatccgtctatactgtcaaagacgacaaagagtcggtgccaatatcagacactatcattcccgcagtgccccctcctacagacctgagatttactaatatcggcccagatacaatgagagtcacatgggcacctcccccatctatcgacctgaccaatttcctagttaggtactccccagtgaagaatgaggaagacgttgctgaactatcaatttccccctctgataacgctgttgtcctgaccaatctgctccctggaaccgaatatgttgtgtctgtttcctcagtgtatgaacaacacgagtccactccactacgcggccgtcagaagacaggcctagacagtcccactggcattgacttctctgacattacagctaatagctttaccgtccattggattgccccacgcgctacaattacaggatacaggattagacaccatcctgagcatttttctggcaggccccgggaagatcgagtgcctcatagcaggaacagcatcaccctaacaaatctgacgcccggcaccgagtatgttgtctcaattgttgccctcaatggtagagaagagtcgcctctcttaatcggacaacagtccacagtatccgacgttcctcgggaccttgaagttgtggccgcaactccgacatctctgctgatatcatgggacgctccggccgttaccgttcgttattatcgcataacttacggcgagacaggagggaactcacctgtgcaagagtttactgtgcctggatccaagtcaaccgctaccatctctgggctcaaacctggagttgattataccatcacagtttacgctgttaccggacgtggcgacagtcccgcttctagtaagcctatttctataaattacagaaccgagatcgacaaaccctcacaaatgcaagtgaccgatgtgcaagataactcaatctccgtcaaatggctgcccagttccagccctgtgacaggctacagagtgactacaacaccaaagaatggacccggcccgaccaagacaaaaacagcgggacctgaccaaaccgaaatgacaatcgaaggtctacagcctaccgttgaatatgtggtgagtgtatatgctcagaacccatcaggcgagtcccaaccactggtgcagacggccgtaacaacaatacctgcacctacagatctaaagttcacccaggtgacccccacgtccctgagcgcccagtggaccccccctaatgtgcagctcactggatatagagtgcgtgttacccccaaggaaaagacaggacctatgaaagagataaatctggcccccgactcctcaagcgttgtagtttccggacttatggtcgccaccaaatacgaggtgtcagtttacgcccttaaagatacacttactagcagaccagcccagggagtcgtaaccacactggaaaatgttagtccgccacgacgagctcgagtgacagacgctaccgaaacaacaatcaccatctcatggagaacgaaaaccgaaactataactggctttcaggtggatgcggtgcctgctaatggacagacacccatccagcgtacaatcaagcctgacgtgcgaagttacaccattactggccttcaacctgggaccgattacaaaatctatctgtacacacttaacgataacgcccgctccagccccgttgttattgatgcatctaccgctatcgacgcccccagcaacctacgctttctagcaacaacacccaatagcctgttagtttcttggcagcccccaagagcccggattaccggttacattattaaatatgagaagcccgggagccctcctcgcgaagttgtgcctcggccacgaccaggagtgaccgaagctaccatcacaggcctcgagcctggcaccgagtacacaatctacgtcattgccctgaaaaacaatcaaaagagtgaacctctcattgggcgcaagaaaacaggccaggaagccttatctcagacaaccatctcctgggccccatttcaagatacatccgagtacatcatttcttgccaccccgtgggaaccgacgaggagcctttgcaatttagagtaccggggacgtccacaagtgcgaccctgaccggactgaccagaggagccacctacaatgtgatagtcgaagcgttaaaagatcagcagcgccacaaagttagagaagaagtcgtaactgtcggaaattctgtgaatgagggtttaaaccagccgacagacgattcgtgcttcgacccatatacagtgtcccattacgccgtgggggacgaatgggagaggatgagtgagagtggttttaagctgctgtgtcagtgtctgggatttggtagcggacactttaggtgtgatagcagcagatggtgtcatgataacggcgtaaattacaagataggcgaaaaatgggataggcaaggagagaacggacaaatgatgagctgtacgtgtctgggaaatggcaagggcgagttcaaatgcgatccacatgaggcgacttgttacgacgacggcaagacatatcacgtgggtgaacaatggcagaaagagtacctaggggccatttgttcttgcacatgttttggaggccaaaggggctggagatgcgataactgtcgccgccccggaggcgaaccttcccccgagggtaccacaggtcagagttataatcagtatagtcagcgctaccatcaaagaaccaataccaacgtcaactgccctatagaatgttttatgcctctcgatgtacaggctgacagggaagactcacgggagtag

SEQ ID NO: 265633 - RNA, 6531 nt, Artificial Sequence
  derived and/or modified sequence
auguuaagggggccgggccccgggcucuuguuacuggccgugcagugucugggcacugcaguccccucuaccggcgcauccaagucaaagcggcaagcccagcagaugguccagccacagucuccaguggccgugucgcaaagcaaaccagggugcuacgacaauggcaagcacuaccagauuaaccagcagugggagcgaacauaucucgggaaugcccuggucuguaccuguuacgguggcagucgcgguuucaacugcgaguccaagccugaagccgaggaaacuugcuuugacaaguauaccggcaauacguaccgaguuggagauaccuacgaacggcccaaggacagcaugaucugggacugcacgugcaucggcgcugggcgcgggcggauuucaugcacaauugcaaauaggugucacgaagguggccagagcuauaagaucggcgacaccuggaggagaccccaugaaacuggcggcuacauguuagaauguguuugucuuggaaauggaaagggggaauggacaugcaagcccauugcggaaaaaugcuuugaucacgccgccgggacaucuuacguggugggcgaaaccugggagaagccuuaucaggguuggaugaugguggacuguaccugccugggagagggaagcggaaggauuacuugcacuagccgcaaccguugcaaugaucaggacacccgcacgucguaucggaucggcgacacuuggucuaagaaggacaauaggggcaaccuguuacagugcaucugcaccggaaauggcagaggagaauggaaaugcgagcgccauaccuccguccagacaacuucaagcggaucugggccauuuacugaugugagagcagcugucuaucaaccccagccacacccacagccaccacccuauggccauuguguuaccgacucggguguggucuacucagucggaaugcagugguugaaaacccaagguaacaaacaaaugcucugcacauguuugggcaauggcgugucuugccaagagaccgcggucacucaaacuuauggaggcaauagcaacggcgagccuugcguacuuccuuuuaccuauaauggcaggaccuuuuacucuugcacuacugaggggcggcaggacgggcaucuuuggugcucaacuaccuccaacuaugaacaagaccagaaauacagcuucugcacggaccauaccguccuuguacagaccagaggcggaaauuccaacggagcacugugccacuuuccauuccuguauaauaaccacaauuacaccgacugcaccagcgaggggagacgugauaauaugaaauggugugggacaacucagaauuaugaugcagaccagaaguucggcuucugcccaauggccgcgcaugaagaaaucuguacaaccaacgaaggcguuauguauaggaucggggaucagugggacaagcagcacgauauggggcacaugaugcgauguacuugcguuggcaauggaaggggugaauggaccuguauugcuuauucccagcugagagaccagugcauuguggaugacaucaccuacaacgugaaugacaccuuccauaaaaggcacgaagaggggcacaugcuaaacugcaccuguuuuggccaggggcguggaagauggaaaugugauccuguugaccagugucaagacagugagacagggacauuuuaucagaucggcgacagcugggagaaguauguccaugguguccgguaccaguguuacugcuacgggcgggguauuggcgaauggcauugucagccacugcagacuuaucccucgagcuccggcccaguugaggucuucauuacugagacuccgagccaacccaacagucacccuauccaguggaaugcgccucaacccucucauaucucaaaguacauucucagauggcgacccaaaaacuccguaggccgcuggaaagaagccaccauuccuggacaccugaacuccuauaccaucaagggccugaaaccuggcgucguguaugagggacaguuaauuaguauccaacaguacgggcaucaggaagugaccagauucgacuucacuacuacauccacguccacgccugugaccagcaacaccgugacuggagagaccacaccuuuuucaccucuugucgcgacuagugaguccguaacugagauuacugccaguagcuuugugguuagcugggucuccgcaagcgauacugucuccggcuuccggguggaguacgaacuaucugaggaaggugacgagccccaauaccuggaucucccuagcacggccacuagcgucaacaucccagaucuccuuccggggcgaaaauauauaguaaaugucuaccagaucagugaggauggcgagcaaucucucauucugucuaccucucaaaccaccgccccagacgcccccccugauacaacuguugaccaggucgaugacacaagcauagucgugcguuggucacgaccgcaggcuccuauaaccggauauaggaucgucuacucgccaucugucgaaggcagcuccacagaacugaaucuccccgagaccgccaauagugugacccuguccgacuugcagcccggcguucaguacaacauuacaaucuacgccguugaagagaaccaggagaguacuccagucgugauucagcaggaaacuacaggcacuccaaggagcgacaccgugccgaguccucgugaccugcaauucguggaggugaccgauguuaaggugaccaucauguggacuccaccugaauccgcugugaccggcuacagggucgaugugauuccugugaaccugccaggggaacauggacagagacuaccgauuucccguaauaccuuugcagaaguuaccggccucaguccaggcgugacauacuacuuuaagguuuuugcuguaucccacggacgggagaguaaaccccucacggcacaacagaccacuaaguuagaugccccaacaaaucuccaguuugucaacgagaccgacagcacaguucuaguccgguggacaccaccucgcgcgcaaauaacaggguaccggcucacugugggccugacaagaagaggacagccccgucaguauaauguagggccuuccgucaguaaguauccccugaggaauuuacagccagcuuccgaguauacagugucucuagucgcaauaaaaggaaaccaagagucccccaaggcuaccgggguguuuacaacacuccaaccuggcucaagcauaccuccguacaacaccgaggugacugaaacaacuaucguaauuacguggaccccugcuccacgcaucggcuucaaauugggcgugcgcccgucgcagggaggcgaggccccccgggaggugaccucugacucugggucuauugugguauccggauuaaccccuggagucgaauacguuuauacaauucaggugcuccgggacggacaagaaagagacgccccaaucguaaauaaagucguuacgccgcuguccccucccacuaauuugcaucuagaagcaaaucccgacaccggagugcugacaguuagcugggagagauccacuaccccugauauuacggguuaccggauuacuacaacgccgaccaauggacagcaaggcaauucacuggaggagguuguccaugccgaucagucgagcugcaccuucgacaaccugucaccagggcucgaguauaacgugagugucuacacuguuaaggacgacaaggaaagugugccaaucucugauacuaucauuccugccgugccccccccaacugaccugagauuuaccaacaucgguccagacaccaugagggugaccugggccccgcccccuagcauugacuuaacaaauuucuuagugagauauuccccugucaaaaacgaggaggauguggcugaacucucaauuagccccagugauaaugcaguggugcucaccaacuugcucccggggacagaguauguggucucugucucaagugucuaugagcagcaugaaaguacuccccugcgcggccggcaaaaaacuggucuggacucccccacgggcauagacuucagcgauauaacggcuaauaguuucaccgugcacuggauugccccccgcgccacgauaaccggguaucggauacggcaccaccccgagcacuuuagcggcagaccucgagaggauagagugccucauucccgcaacuccaucacauugacaaaccugaccccuggaaccgaauaugucguauccaucguggcuuugaacggucgagaggaaucuccucuacugauugggcagcagucgacuguuagugaugugcccagggaccuggagguuguggcugccacuccuacuucacuacugaucuccugggaugcuccagccgugaccgucagguauuacagaauaaccuacggagagacugggggcaauucucccguacaggaguucacugugcccgguagcaaaucuaccgcgaccaucagcggccucaagccuggcgucgacuacacaaucacgguguaugccgucaccggacguggggacucccccgcaucaagcaagccuauuuccaucaacuaucgcaccgaaaucgacaagcccucucagaugcaggucaccgauguccaagauaacaguauuagcgugaaguggcugccauccuccagcccagugacuggauauagagugaccaccacaccgaagaacgggccuggaccuacuaagacgaagacugcugggcccgaccagacagagaugacgaucgaggggcugcagccuaccgucgaguacgugguuucaguguaugcccagaauccuaguggcgagucacaaccacucguccaaaccgcgguuacgaccauaccggcacccacagacuuaaaauucacgcaggugaccccaacaucucuuuccgcccaguggacuccaccuaauguucaacuuaccggguaucgaguaagggugaccccgaaggaaaaaacgggaccaaugaaggagauaaaucuugcccccgacucgucuagcgucgucguguccgggcugaugguagcuacuaaguaugaagucuccguguacgcgcuuaaagauacuuuaacuuccaggccggcccagggaguagugacuacauuagagaaugugucuccaccuaggagagccagggugacagacgccaccgaaacgacaauuacuaucucguggcguacgaaaacagaaacaauuacgggguuucagguggaugccguaccagccaacggccagaccccgauucagagaacuaucaagcccgacgugagaaguuauaccauuacaggccugcagcccggcaccgauuauaagauuuaccuuuacacacucaacgauaacgcucggaguuccccagucgugaucgacgcuucuaccgccauugaugcaccuuccaaucuuagguuccucgcaaccacccccaacucucugcuggugaguuggcagccaccaagagcuagaauaaccggcuacaucauuaaguacgagaaaccagggucccccccccgcgagguggugcccagacccaggcccggcgucacggaggccaccaucacuggccuggaaccaggcacugaauacacaaucuaugucaucgcacugaaaaacaaccagaagagcgagccgcugaucgggaggaagaagacugggcaggaggcucucagccagaccacaauaucaugggccccguuccaagacaccucggaguacauuaucucuugucauccuguugggacggaugaagaaccuuugcaguuucgggugccaggaaccuccacuagcgcuacucugacuggucugacacgaggagcgacauacaaugucauuguggaggccuugaaggaucaacagagacacaaagucagagaggaggugguaacugugggcaauucugugaaugagggucugaaccagcccacggacgacuccuguuuugauccuuacacagugucacauuaugcuguaggugaugagugggaaagaauguccgaaucagguuucaagcugcucugccagugucucggcuuuggcagcggccauuucaggugugauucuaguagguggugucacgacaauggggugaauuauaaaauuggagaaaagugggacaggcagggagagaacggucaaaugaugaguugcaccugccuuggaaacgggaaaggcgaguuuaagugugacccacacgaagcuacauguuacgaugauggaaaaacauaucacgugggggagcaguggcagaaggaauaucucggggcuauuuguaguugcaccugcuuugggggucaacguggauggcggugugacaacugcagacgcccuggcggugagccauccccugaagggaccacgggucaaucauacaaucaguauagccaacgcuaucaccaacgaacuaacacuaacgugaacuguccaauugaguguuucaugccucuugauguacaggcggaccgcgaagacucccgagaguag

SEQ ID NO: 265634 - RNA, 6531 nt, Artificial Sequence
  derived and/or modified sequence
auguuaagaggacccgggccaggccuacuccugcuggcagugcaaugccucggcacugcagucccauccacuggagccuccaagucaaagcgccaggcacaacagaugguacagccccaauccccaguggcaguuucgcaaaguaaaccagguugcuaugacaauggaaagcacuaccagaucaaccagcaaugggagcggaccuaucuuggcaacgcccucgucuguacaugcuauggcggaagcagggguuuuaauugugaguccaagccugaggcugaagagacauguuuugauaaguauacugggaauacguacaggguuggugauaccuacgaaagaccaaaggauagcaugauaugggacuguacaugcauaggagcggggagaggcaggaucucauguaccauugcaaauagaugccacgaaggcgggcagaguuauaaaauaggggacacuuggcgacggccacaugaaacuggaggcuacaugcuggaauguguguguuuaggaaauggcaaaggagaauggacguguaagcccauagcagaaaaguguuuugaucacgccgcagguacaaguuaugugguuggagagacaugggagaagccauaucaaggcuggaugaugguggacuguaccuguuugggugagggaucagguagaaucacuuguacaucacguaacagaugcaaugaucaggacacgagaacaaguuauaggauaggcgacaccuggucaaaaaaagauaacagaggcaauuuacuccaaugcauaugcaccgguaaugggaggggggaauggaaaugugagagacacacuaguguucaaacaacaagcucuggcagcggccccuucacagauguacgggccgcugucuaccagccacagccccacccucagccccccccauaugggcacugugucacugacagcggcgugguguauagcgucggaaugcaaugguugaaaacccaagggaacaaacagauguuauguacuugcuuaggaaauggugugucaugucaggaaacugcugugacacagacauacgguggaaacucuaauggcgaaccgugcguguugcccuuuacuuacaacgguaggaccuucuauucuugcacgacagagggaagacaggacggacauuuguggugcucuacaacaucuaacuacgaacaggaccagaaguauucuuuuuguaccgaucauaccgucuuaguccagacucgaggggggaacaguaauggugcucugugucauuuccccuuccuuuacaauaaucauaacuacaccgacugcacauccgaggggaggcgggauaacaugaaauggugcggaaccacacaaaacuacgaugcagaccaaaaguuuggcuuuuguccaauggcugcacaugaagaaaucuguacaacaaaugaaggagugauguauagaaucggggaucagugggauaagcagcaugacaugggacauaugaugcgaugcacaugcgugggaaauggccggggggaauggaccuguaucgccuauagccagcucagagaccaaugcauugucgacgauauuacuuacaacguaaaugauaccuuucacaagagacaugaggaagggcauaugcugaacuguacauguuuugggcaggguagggggagguggaaaugugauccaguagaccagugccaagacuccgaaaccggcacguucuaucagauuggggacuccugggaaaaguacguacauggcgugcgcuaucaguguuacuguuacggcagagggauaggggaguggcauugccaaccacugcagaccuacccgucaucuucugggccaguggaggucuuuauaacagaaacaccaucccaaccaaauucucacccuauacaguggaaugcgccccagccuucacacaucucaaaauacauccugcgauggagaccaaaaaauagcguaggaagauggaaagaagcgaccauccccggccaccugaauucuuacacuaucaaaggucugaaacccgggguggucuaugaaggacaauuaaucucaauucagcaguauggacaccaggaaguuacaagauuugauuuuacuacgacaagcacuuccacaccagucacaagcaauacagucaccggcgagacgaccccuuucagccccuuagucgccacaagugaauccgucacagagauaaccgcuuccucauuugucguuucgugggucagcgcaucggauacggucucuggcuuuagaguggaauacgagcuguccgaggagggagacgaaccacaauaucuggaucucccuaguacugccaccuccguuaacaucccugaccuguuacccggccguaaguacaucguuaauguguaucagauuuccgaggauggagagcagucuuugauccuuagcaccucacagacuacagcaccagacgcaccacccgauacaacaguugaccagguagacgacacaagcaucguuguccgguggaguagaccucaagccccaaucaccggauauagaauuguguacucaccaagcguggaaggcuccagcaccgaacugaaccucccagagacugcuaauagcgugacccucucagaccugcagccaggcgugcaauacaauauuaccauuuacgccgucgaagagaaucaggagucuacaccaguaguaauccaacaggagacaacaggcacaccacgaucagacaccgugccuuccccuagagacuugcaauuuguugaaguaacagacguuaaagucaccaucauguggacuccucccgaaucagcgguuacuggauauagaguggacgugauaccugugaacuugccuggcgagcauggccagcggcugccgauuagccgcaauacuuucgccgaagugacuggacuuuccccuggcguuacauacuauuucaagguguucgccgugucucaugguagggagucuaagccgcuuaccgcccagcagaccacuaaacuggacgccccuacgaaccuccaguuugugaacgaaacggacaguaccgucuuaguaagauggacaccuccccgcgcccagauuaccggcuaucggcugacugugggccuaaccagaagaggacagccucgccaguauaacguuggacccucuguuagcaaauauccccugcgcaaucugcagccugcuucugaauacacugucucacugguugcuaucaagggaaaccaagaaucccccaaggcuacaggcguuuuuaccacucuccaaccuggaagcagcaucccccccuauaauaccgaagugacagagaccacaauugugauaacauggaccccggccccacgaauuggguucaaacucggcguccgaccaagccaggguggcgaggcuccaagagaggugacaucagacuccgguucaaucguuguuucagggcucaccccugguguggaauaugucuauacgauccaaguauugcgggacggccaagagcgcgacgccccgaucgucaauaaaguugugaccccauuguccccacccacgaaucuccaucuggaagccaaucccgacacagguguucuuacuguaucuugggagcggucuacaaccccugacauuacaggcuacaggauuacuacuaccccgaccaacggucagcaaggcaacucucuugaggaggugguccacgcugaucagaguucaugcacauucgauaacuuauccccaggccuggaauauaacguauccgucuauacugucaaagacgacaaagagucggugccaauaucagacacuaucauucccgcagugcccccuccuacagaccugagauuuacuaauaucggcccagauacaaugagagucacaugggcaccucccccaucuaucgaccugaccaauuuccuaguuagguacuccccagugaagaaugaggaagacguugcugaacuaucaauuucccccucugauaacgcuguuguccugaccaaucugcucccuggaaccgaauauguugugucuguuuccucaguguaugaacaacacgaguccacuccacuacgcggccgucagaagacaggccuagacagucccacuggcauugacuucucugacauuacagcuaauagcuuuaccguccauuggauugccccacgcgcuacaauuacaggauacaggauuagacaccauccugagcauuuuucuggcaggccccgggaagaucgagugccucauagcaggaacagcaucacccuaacaaaucugacgcccggcaccgaguauguugucucaauuguugcccucaaugguagagaagagucgccucucuuaaucggacaacaguccacaguauccgacguuccucgggaccuugaaguuguggccgcaacuccgacaucucugcugauaucaugggacgcuccggccguuaccguucguuauuaucgcauaacuuacggcgagacaggagggaacucaccugugcaagaguuuacugugccuggauccaagucaaccgcuaccaucucugggcucaaaccuggaguugauuauaccaucacaguuuacgcuguuaccggacguggcgacagucccgcuucuaguaagccuauuucuauaaauuacagaaccgagaucgacaaacccucacaaaugcaagugaccgaugugcaagauaacucaaucuccgucaaauggcugcccaguuccagcccugugacaggcuacagagugacuacaacaccaaagaauggacccggcccgaccaagacaaaaacagcgggaccugaccaaaccgaaaugacaaucgaaggucuacagccuaccguugaauauguggugaguguauaugcucagaacccaucaggcgagucccaaccacuggugcagacggccguaacaacaauaccugcaccuacagaucuaaaguucacccaggugacccccacgucccugagcgcccaguggacccccccuaaugugcagcucacuggauauagagugcguguuacccccaaggaaaagacaggaccuaugaaagagauaaaucuggcccccgacuccucaagcguuguaguuuccggacuuauggucgccaccaaauacgaggugucaguuuacgcccuuaaagauacacuuacuagcagaccagcccagggagucguaaccacacuggaaaauguuaguccgccacgacgagcucgagugacagacgcuaccgaaacaacaaucaccaucucauggagaacgaaaaccgaaacuauaacuggcuuucagguggaugcggugccugcuaauggacagacacccauccagcguacaaucaagccugacgugcgaaguuacaccauuacuggccuucaaccugggaccgauuacaaaaucuaucuguacacacuuaacgauaacgcccgcuccagccccguuguuauugaugcaucuaccgcuaucgacgcccccagcaaccuacgcuuucuagcaacaacacccaauagccuguuaguuucuuggcagcccccaagagcccggauuaccgguuacauuauuaaauaugagaagcccgggagcccuccucgcgaaguugugccucggccacgaccaggagugaccgaagcuaccaucacaggccucgagccuggcaccgaguacacaaucuacgucauugcccugaaaaacaaucaaaagagugaaccucucauugggcgcaagaaaacaggccaggaagccuuaucucagacaaccaucuccugggccccauuucaagauacauccgaguacaucauuucuugccaccccgugggaaccgacgaggagccuuugcaauuuagaguaccggggacguccacaagugcgacccugaccggacugaccagaggagccaccuacaaugugauagucgaagcguuaaaagaucagcagcgccacaaaguuagagaagaagucguaacugucggaaauucugugaaugaggguuuaaaccagccgacagacgauucgugcuucgacccauauacagugucccauuacgccgugggggacgaaugggagaggaugagugagagugguuuuaagcugcugugucagugucugggauuugguagcggacacuuuaggugugauagcagcagauggugucaugauaacggcguaaauuacaagauaggcgaaaaaugggauaggcaaggagagaacggacaaaugaugagcuguacgugucugggaaauggcaagggcgaguucaaaugcgauccacaugaggcgacuuguuacgacgacggcaagacauaucacgugggugaacaauggcagaaagaguaccuaggggccauuuguucuugcacauguuuuggaggccaaaggggcuggagaugcgauaacugucgccgccccggaggcgaaccuucccccgaggguaccacaggucagaguuauaaucaguauagucagcgcuaccaucaaagaaccaauaccaacgucaacugcccuauagaauguuuuaugccucucgauguacaggcugacagggaagacucacgggaguag

SEQ ID NO: 265635 - protein, 2296 aa, Artificial Sequence
  derived and/or modified sequence
MLRGPGPGLLLLAVQCLGTAVPSTGASKSKRQAQQMVQPQSPVAVSQSKPGCYDNGKHYQINQQWERTYLGNALVCTCYGGSRGFNCESKPEAEETCFDKYTGNTYRVGDTYERPKDSMIWDCTCIGAGRGRISCTIANRCHEGGQSYKIGDTWRRPHETGGYMLECVCLGNGKGEWTCKPIAEKCFDHAAGTSYVVGETWEKPYQGWMMVDCTCLGEGSGRITCTSRNRCNDQDTRTSYRIGDTWSKKDNRGNLLQCICTGNGRGEWKCERHTSVQTTSSGSGPFTDVRAAVYQPQPHPQPPPYGHCVTDSGVVYSVGMQWLKTQGNKQMLCTCLGNGVSCQETAVTQTYGGNSNGEPCVLPFTYNGRTFYSCTTEGRQDGHLWCSTTSNYEQDQKYSFCTDHTVLVQTRGGNSNGALCHFPFLYNNHNYTDCTSEGRRDNMKWCGTTQNYDADQKFGFCPMAAHEEICTTNEGVMYRIGDQWDKQHDMGHMMRCTCVGNGRGEWTCIAYSQLRDQCIVDDITYNVNDTFHKRHEEGHMLNCTCFGQGRGRWKCDPVDQCQDSETGTFYQIGDSWEKYVHGVRYQCYCYGRGIGEWHCQPLQTYPSSSGPVEVFITETPSQPNSHPIQWNAPQPSHISKYILRWRPKNSVGRWKEATIPGHLNSYTIKGLKPGVVYEGQLISIQQYGHQEVTRFDFTTTSTSTPVTSNTVTGETTPFSPLVATSESVTEITASSFVVSWVSASDTVSGFRVEYELSEEGDEPQYLDLPSTATSVNIPDLLPGRKYIVNVYQISEDGEQSLILSTSQTTAPDAPPDTTVDQVDDTSIVVRWSRPQAPITGYRIVYSPSVEGSSTELNLPETANSVTLSDLQPGVQYNITIYAVEENQESTPVVIQQETTGTPRSDTVPSPRDLQFVEVTDVKVTIMWTPPESAVTGYRVDVIPVNLPGEHGQRLPISRNTFAEVTGLSPGVTYYFKVFAVSHGRESKPLTAQQTTKLDAPTNLQFVNETDSTVLVRWTPPRAQITGYRLTVGLTRRGQPRQYNVGPSVSKYPLRNLQPASEYTVSLVAIKGNQESPKATGVFTTLQPGSSIPPYNTEVTETTIVITWTPAPRIGFKLGVRPSQGGEAPREVTSDSGSIVVSGLTPGVEYVYTIQVLRDGQERDAPIVNKVVTPLSPPTNLHLEANPDTGVLTVSWERSTTPDITGYRITTTPTNGQQGNSLEEVVHADQSSCTFDNLSPGLEYNVSVYTVKDDKESVPISDTIIPAVPPPTDLRFTNIGPDTMRVTWAPPPSIDLTNFLVRYSPVKNEEDVAELSISPSDNAVVLTNLLPGTEYVVSVSSVYEQHESTPLRGRQKTGLDSPTGIDFSDITANSFTVHWIAPRATITGYRIRHHPEHFSGRPREDRVPHSRNSITLTNLTPGTEYVVSIVALNGREESPLLIGQQSTVSDVPRDLEVVAATPTSLLISWDAPAVTVRYYRITYGETGGNSPVQEFTVPGSKSTATISGLKPGVDYTITVYAVTGRGDSPASSKPISINYRTEIDKPSQMQVTDVQDNSISVKWLPSSSPVTGYRVTTTPKNGPGPTKTKTAGPDQTEMTIEGLQPTVEYVVSVYAQNPSGESQPLVQTAVTTIPAPTDLKFTQVTPTSLSAQWTPPNVQLTGYRVRVTPKEKTGPMKEINLAPDSSSVVVSGLMVATKYEVSVYALKDTLTSRPAQGVVTTLENVSPPRRARVTDATETTITISWRTKTETITGFQVDAVPANGQTPIQRTIKPDVRSYTITGLQPGTDYKIYLYTLNDNARSSPVVIDASTAIDAPSNLRFLATTPNSLLVSWQPPRARITGYIIKYEKPGSPPREVVPRPRPGVTEATITGLEPGTEYTIYVIALKNNQKSEPLIGRKKTDELPQLVTLPHPNLHGPEILDVPSTVQKTPFVTHPGYDTGNGIQLPGTSGQQPSVGQQMIFEEHGFRRTTPPTTATPIRHRPRPYPPNVGEEIQIGHIPREDVDYHLYPHGPGLNPNASTGQEALSQTTISWAPFQDTSEYIISCHPVGTDEEPLQFRVPGTSTSATLTGLTRGATYNVIVEALKDQQRHKVREEVVTVGNSVNEGLNQPTDDSCFDPYTVSHYAVGDEWERMSESGFKLLCQCLGFGSGHFRCDSSRWCHDNGVNYKIGEKWDRQGENGQMMSCTCLGNGKGEFKCDPHEATCYDDGKTYHVGEQWQKEYLGAICSCTCFGGQRGWRCDNCRRPGGEPSPEGTTGQSYNQYSQRYHQRTNTNVNCPIECFMPLDVQADREDSRE

SEQ ID NO: 265636 - DNA, 6891 bp, Artificial Sequence
  derived and/or modified sequence
atgctgagaggccccggccccggcctgctgctgctggccgtgcagtgcctgggcaccgccgtgcccagcaccggcgccagcaagagcaagagacaggcccagcagatggtgcagccccagagccccgtggccgtgagccagagcaagcccggctgctacgacaacggcaagcactaccagatcaaccagcagtgggagagaacctacctgggcaacgccctggtgtgcacctgctacggcggcagcagaggcttcaactgcgagagcaagcccgaggccgaggagacctgcttcgacaagtacaccggcaacacctacagagtgggcgacacctacgagagacccaaggacagcatgatctgggactgcacctgcatcggcgccggcagaggcagaatcagctgcaccatcgccaacagatgccacgagggcggccagagctacaagatcggcgacacctggagaagaccccacgagaccggcggctacatgctggagtgcgtgtgcctgggcaacggcaagggcgagtggacctgcaagcccatcgccgagaagtgcttcgaccacgccgccggcaccagctacgtggtgggcgagacctgggagaagccctaccagggctggatgatggtggactgcacctgcctgggcgagggcagcggcagaatcacctgcaccagcagaaacagatgcaacgaccaggacaccagaaccagctacagaatcggcgacacctggagcaagaaggacaacagaggcaacctgctgcagtgcatctgcaccggcaacggcagaggcgagtggaagtgcgagagacacaccagcgtgcagaccaccagcagcggcagcggccccttcaccgacgtgagagccgccgtgtaccagccccagccccacccccagccccccccctacggccactgcgtgaccgacagcggcgtggtgtacagcgtgggcatgcagtggctgaagacccagggcaacaagcagatgctgtgcacctgcctgggcaacggcgtgagctgccaggagaccgccgtgacccagacctacggcggcaacagcaacggcgagccctgcgtgctgcccttcacctacaacggcagaaccttctacagctgcaccaccgagggcagacaggacggccacctgtggtgcagcaccaccagcaactacgagcaggaccagaagtacagcttctgcaccgaccacaccgtgctggtgcagaccagaggcggcaacagcaacggcgccctgtgccacttccccttcctgtacaacaaccacaactacaccgactgcaccagcgagggcagaagagacaacatgaagtggtgcggcaccacccagaactacgacgccgaccagaagttcggcttctgccccatggccgcccacgaggagatctgcaccaccaacgagggcgtgatgtacagaatcggcgaccagtgggacaagcagcacgacatgggccacatgatgagatgcacctgcgtgggcaacggcagaggcgagtggacctgcatcgcctacagccagctgagagaccagtgcatcgtggacgacatcacctacaacgtgaacgacaccttccacaagagacacgaggagggccacatgctgaactgcacctgcttcggccagggcagaggcagatggaagtgcgaccccgtggaccagtgccaggacagcgagaccggcaccttctaccagatcggcgacagctgggagaagtacgtgcacggcgtgagataccagtgctactgctacggcagaggcatcggcgagtggcactgccagcccctgcagacctaccccagcagcagcggccccgtggaggtgttcatcaccgagacccccagccagcccaacagccaccccatccagtggaacgccccccagcccagccacatcagcaagtacatcctgagatggagacccaagaacagcgtgggcagatggaaggaggccaccatccccggccacctgaacagctacaccatcaagggcctgaagcccggcgtggtgtacgagggccagctgatcagcatccagcagtacggccaccaggaggtgaccagattcgacttcaccaccaccagcaccagcacccccgtgaccagcaacaccgtgaccggcgagaccacccccttcagccccctggtggccaccagcgagagcgtgaccgagatcaccgccagcagcttcgtggtgagctgggtgagcgccagcgacaccgtgagcggcttcagagtggagtacgagctgagcgaggagggcgacgagccccagtacctggacctgcccagcaccgccaccagcgtgaacatccccgacctgctgcccggcagaaagtacatcgtgaacgtgtaccagatcagcgaggacggcgagcagagcctgatcctgagcaccagccagaccaccgcccccgacgccccccccgacaccaccgtggaccaggtggacgacaccagcatcgtggtgagatggagcagaccccaggcccccatcaccggctacagaatcgtgtacagccccagcgtggagggcagcagcaccgagctgaacctgcccgagaccgccaacagcgtgaccctgagcgacctgcagcccggcgtgcagtacaacatcaccatctacgccgtggaggagaaccaggagagcacccccgtggtgatccagcaggagaccaccggcacccccagaagcgacaccgtgcccagccccagagacctgcagttcgtggaggtgaccgacgtgaaggtgaccatcatgtggaccccccccgagagcgccgtgaccggctacagagtggacgtgatccccgtgaacctgcccggcgagcacggccagagactgcccatcagcagaaacaccttcgccgaggtgaccggcctgagccccggcgtgacctactacttcaaggtgttcgccgtgagccacggcagagagagcaagcccctgaccgcccagcagaccaccaagctggacgcccccaccaacctgcagttcgtgaacgagaccgacagcaccgtgctggtgagatggaccccccccagagcccagatcaccggctacagactgaccgtgggcctgaccagaagaggccagcccagacagtacaacgtgggccccagcgtgagcaagtaccccctgagaaacctgcagcccgccagcgagtacaccgtgagcctggtggccatcaagggcaaccaggagagccccaaggccaccggcgtgttcaccaccctgcagcccggcagcagcatccccccctacaacaccgaggtgaccgagaccaccatcgtgatcacctggacccccgcccccagaatcggcttcaagctgggcgtgagacccagccagggcggcgaggcccccagagaggtgaccagcgacagcggcagcatcgtggtgagcggcctgacccccggcgtggagtacgtgtacaccatccaggtgctgagagacggccaggagagagacgcccccatcgtgaacaaggtggtgacccccctgagcccccccaccaacctgcacctggaggccaaccccgacaccggcgtgctgaccgtgagctgggagagaagcaccacccccgacatcaccggctacagaatcaccaccacccccaccaacggccagcagggcaacagcctggaggaggtggtgcacgccgaccagagcagctgcaccttcgacaacctgagccccggcctggagtacaacgtgagcgtgtacaccgtgaaggacgacaaggagagcgtgcccatcagcgacaccatcatccccgccgtgcccccccccaccgacctgagattcaccaacatcggccccgacaccatgagagtgacctgggcccccccccccagcatcgacctgaccaacttcctggtgagatacagccccgtgaagaacgaggaggacgtggccgagctgagcatcagccccagcgacaacgccgtggtgctgaccaacctgctgcccggcaccgagtacgtggtgagcgtgagcagcgtgtacgagcagcacgagagcacccccctgagaggcagacagaagaccggcctggacagccccaccggcatcgacttcagcgacatcaccgccaacagcttcaccgtgcactggatcgcccccagagccaccatcaccggctacagaatcagacaccaccccgagcacttcagcggcagacccagagaggacagagtgccccacagcagaaacagcatcaccctgaccaacctgacccccggcaccgagtacgtggtgagcatcgtggccctgaacggcagagaggagagccccctgctgatcggccagcagagcaccgtgagcgacgtgcccagagacctggaggtggtggccgccacccccaccagcctgctgatcagctgggacgcccccgccgtgaccgtgagatactacagaatcacctacggcgagaccggcggcaacagccccgtgcaggagttcaccgtgcccggcagcaagagcaccgccaccatcagcggcctgaagcccggcgtggactacaccatcaccgtgtacgccgtgaccggcagaggcgacagccccgccagcagcaagcccatcagcatcaactacagaaccgagatcgacaagcccagccagatgcaggtgaccgacgtgcaggacaacagcatcagcgtgaagtggctgcccagcagcagccccgtgaccggctacagagtgaccaccacccccaagaacggccccggccccaccaagaccaagaccgccggccccgaccagaccgagatgaccatcgagggcctgcagcccaccgtggagtacgtggtgagcgtgtacgcccagaaccccagcggcgagagccagcccctggtgcagaccgccgtgaccaccatccccgcccccaccgacctgaagttcacccaggtgacccccaccagcctgagcgcccagtggaccccccccaacgtgcagctgaccggctacagagtgagagtgacccccaaggagaagaccggccccatgaaggagatcaacctggcccccgacagcagcagcgtggtggtgagcggcctgatggtggccaccaagtacgaggtgagcgtgtacgccctgaaggacaccctgaccagcagacccgcccagggcgtggtgaccaccctggagaacgtgagcccccccagaagagccagagtgaccgacgccaccgagaccaccatcaccatcagctggagaaccaagaccgagaccatcaccggcttccaggtggacgccgtgcccgccaacggccagacccccatccagagaaccatcaagcccgacgtgagaagctacaccatcaccggcctgcagcccggcaccgactacaagatctacctgtacaccctgaacgacaacgccagaagcagccccgtggtgatcgacgccagcaccgccatcgacgcccccagcaacctgagattcctggccaccacccccaacagcctgctggtgagctggcagccccccagagccagaatcaccggctacatcatcaagtacgagaagcccggcagcccccccagagaggtggtgcccagacccagacccggcgtgaccgaggccaccatcaccggcctggagcccggcaccgagtacaccatctacgtgatcgccctgaagaacaaccagaagagcgagcccctgatcggcagaaagaagaccgacgagctgccccagctggtgaccctgccccaccccaacctgcacggccccgagatcctggacgtgcccagcaccgtgcagaagacccccttcgtgacccaccccggctacgacaccggcaacggcatccagctgcccggcaccagcggccagcagcccagcgtgggccagcagatgatcttcgaggagcacggcttcagaagaaccaccccccccaccaccgccacccccatcagacacagacccagaccctacccccccaacgtgggcgaggagatccagatcggccacatccccagagaggacgtggactaccacctgtacccccacggccccggcctgaaccccaacgccagcaccggccaggaggccctgagccagaccaccatcagctgggcccccttccaggacaccagcgagtacatcatcagctgccaccccgtgggcaccgacgaggagcccctgcagttcagagtgcccggcaccagcaccagcgccaccctgaccggcctgaccagaggcgccacctacaacgtgatcgtggaggccctgaaggaccagcagagacacaaggtgagagaggaggtggtgaccgtgggcaacagcgtgaacgagggcctgaaccagcccaccgacgacagctgcttcgacccctacaccgtgagccactacgccgtgggcgacgagtgggagagaatgagcgagagcggcttcaagctgctgtgccagtgcctgggcttcggcagcggccacttcagatgcgacagcagcagatggtgccacgacaacggcgtgaactacaagatcggcgagaagtgggacagacagggcgagaacggccagatgatgagctgcacctgcctgggcaacggcaagggcgagttcaagtgcgacccccacgaggccacctgctacgacgacggcaagacctaccacgtgggcgagcagtggcagaaggagtacctgggcgccatctgcagctgcacctgcttcggcggccagagaggctggagatgcgacaactgcagaagacccggcggcgagcccagccccgagggcaccaccggccagagctacaaccagtacagccagagataccaccagagaaccaacaccaacgtgaactgccccatcgagtgcttcatgcccctggacgtgcaggccgacagagaggacagcagagagtag

SEQ ID NO: 265637 - DNA, 6891 bp, Artificial Sequence
  derived and/or modified sequence
atgcttcgagggccgggaccaggcctgcttcttctggccgtgcaatgccttggaactgctgttccgagtacaggtgctagcaaaagtaagcgacaggctcagcagatggtccaaccgcaaagcccagtggccgtgagccagtccaagcctggttgttatgataatgggaaacactatcagattaaccagcagtgggagcgcacatacttaggaaacgcactggtctgtacttgttatggcggctcccgaggcttcaactgtgaatcaaaacccgaggccgaggaaacttgttttgacaagtataccggtaacacctatagggtgggagacacatatgagcgccctaaagatagcatgatttgggactgtacctgcataggtgccggacgagggcgcatctcctgcacaatagcaaatcgttgccacgagggcggccaatcctacaagatcggagacacttggcggcgcccacatgaaactggaggctacatgttggagtgcgtgtgcctgggaaacggcaaaggagagtggacatgcaagcccatcgcagaaaaatgctttgatcatgccgcaggcacttcatatgtcgtgggagaaacttgggagaaaccctatcagggttggatgatggtggactgtacgtgcctgggtgaagggagtgggagaatcacatgtacctcccggaatcggtgtaacgaccaggacactcgcacctcttacaggattggagacacctggtctaaaaaagacaaccgagggaatttgctccaatgtatatgcacaggcaacgggaggggtgagtggaaatgcgagagacacacttccgtccagacaaccagctcagggtctgggccttttacggatgtgagagctgccgtctaccaaccccagcctcacccccagccccccccctatgggcactgcgttaccgatagcggtgtagtttattcagtgggcatgcagtggctgaagactcagggaaataaacagatgctctgtacttgtctgggaaacggggtgtcttgtcaggaaactgcagtcacccaaacctacggagggaatagcaacggcgaaccctgtgtgctgccgttcacttacaatggccggactttttactcatgcaccacggagggccggcaggacgggcacctgtggtgctccacaaccagcaattacgagcaagatcagaagtacagcttctgtactgaccacaccgttctggttcagaccagaggcggtaactccaatggcgctttgtgccactttcctttcctctataacaatcataactacaccgattgtacttccgaaggacggcgcgacaatatgaagtggtgcggcaccacccagaattacgatgctgaccagaagtttggcttttgtcccatggcagctcacgaggagatttgtaccacaaatgagggcgtgatgtatcgcatcggggatcaatgggataagcaacatgacatgggtcacatgatgcgatgcacttgcgtcggcaacgggcgcggagaatggacatgtattgcctactcccagttgcgcgatcagtgtattgtggatgacatcacctacaacgttaacgacacctttcacaagaggcacgaagaaggacacatgctgaattgcacctgctttggccagggacgcggcagatggaaatgtgaccccgtggatcaatgtcaagatagcgagaccggaaccttttaccaaatcggcgacagctgggagaaatacgtgcatggggtgaggtaccaatgctattgttacggccgaggaataggggaatggcactgtcagcccttgcagacatacccctcctcttccggccccgtggaggtgtttattaccgagactcccagccaaccaaatagccacccgatccagtggaacgcccctcagccgtcccatattagtaagtatatactgagatggagacctaaaaatagcgttggccggtggaaggaagctactattcctggacatctgaattcatatactatcaaaggcttaaaaccgggagtcgtatatgaaggacagctgatctcgatacaacagtatggacaccaggaggttactcggttcgactttacaactacatctacttccacccccgtgacatcgaatacagtcactggggaaactacccccttctctcctttggtggcgactagcgagtcagttacagagattacagcctctagcttcgttgtcagttgggtctcggcctcagatacagtatctggatttagagtggaatacgaattgtccgaggagggggatgagcctcaatacttagacctcccatcaacagctacatccgtgaatattccggatctgttgcccggacggaagtacattgtcaatgtgtaccagatctccgaagatggtgagcagtcgctcattttgagcacatcccaaaccacagccccagatgctccaccggatacaacagtggaccaggtggacgatacaagcattgtggtgaggtggagtcgcccgcaagcgcctattacaggttatcgtatcgtgtattcacccagtgtggaaggctccagcaccgaattaaacctgccggagacggcgaactccgttactctctcagatctacagcctggtgtgcaatacaacatcacaatctatgcagttgaggaaaaccaggaatctacccccgtggttatccagcaggagactaccggcacccctcgctctgataccgttccgtcacctagagacctgcagttcgtagaggtgactgatgttaaagtgaccatcatgtggacacccccggaatctgcagttactggctaccgagtagatgtgatacctgtgaacctgccaggcgaacacggacagaggctccctattagtcggaacactttcgccgaggtgaccgggctgtcacccggtgtgacatactactttaaggtgtttgcagtgagccacggtagagaatccaagccactgaccgcgcagcagactaccaaactcgacgcaccaacaaatttgcagttcgtgaatgaaactgatagtaccgttctcgtgcggtggactccaccaagagctcagattactggatatcggctgacagtggggctgacgagacggggccagccgcggcaatacaatgtcggtccatctgtgagtaagtaccctctgagaaacctgcagccagcatcagaatatactgtaagtcttgtcgctatcaagggaaaccaagagtcgccgaaagcaaccggcgtttttaccactctgcagcctggctcttcaattccaccttataacactgaggttaccgagactaccatagtcattacatggaccccagcaccacgaattggttttaagctgggagtccgtcccagtcagggtggcgaggccccacgggaggtgaccagcgatagcggtagtatcgtcgtgtcagggctgaccccgggggtagagtatgtgtacaccatacaggtgctgagggatgggcaagagagagatgccccaatcgtgaataaagtagtgaccccgctcagcccacccaccaatctccatttggaggccaatcctgacacaggagtccttacagtgtcatgggagcggtcaactacgcctgacatcacaggatatagaatcacaactacccctactaacggccagcagggcaattctttagaggaagtggtccacgcagatcagtcctcctgtacattcgataacttgtcccctgggctggagtacaacgtttccgtgtatacggtaaaagatgacaaagaaagcgtgcctatttctgacacaatcatccctgccgtgcccccccctacagatttgagattcactaatattggcccagacaccatgagggttacatgggctccgcctccgagcatcgatcttacaaatttcctcgtgaggtatagtccagtaaagaacgaagaggatgtggctgagctctccatctcaccctctgacaacgcagttgtcttgactaaccttctgcccgggacggaatacgtcgtctccgtgtccagcgtgtacgaacagcacgaaagcactcccctccgaggaaggcagaagacggggctggatagccccaccggcatcgatttctccgacataaccgctaactcctttacagtccattggattgcccccagggctacgatcacaggctaccgaatccgccaccatcctgagcacttctccggacgtccgagagaggatcgcgtgccacattctaggaactccatcactcttacaaatttgactccaggcactgagtacgtggtgagcatagtcgcactgaacggccgggaggaatctcccctgcttattgggcagcagagcaccgtgtcagatgtcccacgcgatctggaagttgttgcagctacacccacatctctactaatctcttgggacgctcccgctgtgacagtcaggtattacagaatcacttacggcgaaaccggagggaattcccccgtgcaagaatttactgtgcccgggtctaaaagcactgctaccatttcgggattgaagcccggggtagattacaccatcactgtttatgctgtcaccggtagaggggatagtcctgcctccagcaaacctattagtattaactataggaccgaaatagacaagcctagtcaaatgcaggtgaccgatgtgcaggataattccatctccgtgaaatggcttcccagcagcagtccggtcaccggctatagggtgacgacaacaccaaagaacgggcccggccccacgaaaactaagacagcaggacccgatcagaccgagatgacaatcgaaggcctccagcctacggtcgagtacgtcgtgagcgtttatgcacagaaccccagcggggagtctcagccactggtccagacagccgtaacaactattccggctcccaccgatctgaaatttacccaagtcacacctacatcccttagcgcccagtggactcctccgaatgtgcagttaactggttatagggtgcgggttactcctaaggagaaaacggggcccatgaaggagatcaacttggcccccgacagtagtagcgttgtggtctctggactgatggtcgccaccaagtatgaggtttcagtgtacgccctcaaagatacattaaccagtcggcccgcccagggggtggtgacgactctagaaaatgtgagtcctccaaggcgagctcgggtgacggacgcaaccgaaaccactataacaatttcatggaggacaaagacagagaccattacaggcttccaggtagacgcagttccagccaacggtcaaacccccatccagcgaaccatcaagccggatgtaagatcttacacgatcaccggactccaaccaggaaccgactacaaaatttacctatatactctcaacgataatgccagatcctcacccgtagtgatagatgccagtaccgctatcgatgcacctagtaacctgagattccttgcaaccactccgaattcgctgctggtgtcctggcagccaccgcgcgcaagaattaccggctacattattaagtacgagaaacctggcagcccccctagggaagtcgtcccgcggcccagacctggtgtgactgaggccacaatcacgggactcgaaccaggaacggaatataccatctatgtgattgcattgaagaacaatcagaagagcgagccccttattggacggaaaaaaaccgatgaactgccccagttggtgaccctgccacaccccaacttacacggacctgagatcctcgacgtgcccagcactgtacagaagacacccttcgtaactcaccccggatatgacaccggcaacggaattcaattgcccggaactagtgggcagcagccttccgtcggtcagcagatgatcttcgaagagcacgggttccgtagaaccacccctcccactaccgcaacgccaatcagacatcgcccacgcccgtacccacctaacgttggggaggagatccagatcggacacatcccgagagaagacgtggactaccacctttaccctcacggtcccggactgaatccaaatgcctctacaggccaggaggctctctctcagaccaccatctcatgggccccgtttcaagacacgagtgagtacattattagctgtcaccctgttggaactgacgaagagccactgcagtttcgagtgcccggtacctctacctccgcaactttgacagggctcactaggggtgccacgtacaacgtgatcgttgaggcactgaaggatcagcagagacacaaggtgcgagaggaagtcgtgacagtgggcaatagcgtgaacgaaggtctcaatcagccaacggacgacagctgcttcgacccatatacggtgtcacactatgctgtcggtgacgagtgggagaggatgagtgagtccggatttaagctcctttgccagtgtttaggtttcggatctgggcattttcggtgcgattctagccgctggtgtcatgataacggcgtcaattacaagatcggagaaaagtgggatagacagggggagaacggacagatgatgtcatgcacttgcctgggtaacgggaagggagagttcaaatgtgatccgcacgaggcaacatgctacgacgacggcaagacttatcacgtgggcgaacagtggcagaaggaatatctgggcgcgatctgttcctgtacctgtttcggcggccagcggggctggaggtgtgacaattgccggaggcctggcggggaaccttccccagaaggtactaccggtcaatcatataatcaatattcacaaaggtaccaccagcgtaccaacacaaatgttaactgtcctatcgagtgctttatgccgctcgacgtccaggccgatcgcgaggattctcgggagtag

SEQ ID NO: 265638 - DNA, 7846 bp, Artificial Sequence
  derived and/or modified sequence
gcccgcgccggctgtgctgcacagggggaggagagggaaccccaggcgcgagcgggaagaggggacctgcagccacaacttctctggtcctctgcatcccttctgtccctccacccgtccccttccccaccctctggcccccaccttcttggaggcgacaacccccgggaggcattagaagggatttttcccgcaggttgcgaagggaagcaaacttggtggcaacttgcctcccggtgcgggcgtctctcccccaccgtctcaacatgcttaggggtccggggcccgggctgctgctgctggccgtccagtgcctggggacagcggtgccctccacgggagcctcgaagagcaagaggcaggctcagcaaatggttcagccccagtccccggtggctgtcagtcaaagcaagcccggttgttatgacaatggaaaacactatcagataaatcaacagtgggagcggacctacctaggcaatgcgttggtttgtacttgttatggaggaagccgaggttttaactgcgagagtaaacctgaagctgaagagacttgctttgacaagtacactgggaacacttaccgagtgggtgacacttatgagcgtcctaaagactccatgatctgggactgtacctgcatcggggctgggcgagggagaataagctgtaccatcgcaaaccgctgccatgaagggggtcagtcctacaagattggtgacacctggaggagaccacatgagactggtggttacatgttagagtgtgtgtgtcttggtaatggaaaaggagaatggacctgcaagcccatagctgagaagtgttttgatcatgctgctgggacttcctatgtggtcggagaaacgtgggagaagccctaccaaggctggatgatggtagattgtacttgcctgggagaaggcagcggacgcatcacttgcacttctagaaatagatgcaacgatcaggacacaaggacatcctatagaattggagacacctggagcaagaaggataatcgaggaaacctgctccagtgcatctgcacaggcaacggccgaggagagtggaagtgtgagaggcacacctctgtgcagaccacatcgagcggatctggccccttcaccgatgttcgtgcagctgtttaccaaccgcagcctcacccccagcctcctccctatggccactgtgtcacagacagtggtgtggtctactctgtggggatgcagtggctgaagacacaaggaaataagcaaatgctttgcacgtgcctgggcaacggagtcagctgccaagagacagctgtaacccagacttacggtggcaactcaaatggagagccatgtgtcttaccattcacctacaatggcaggacgttctactcctgcaccacagaagggcgacaggacggacatctttggtgcagcacaacttcgaattatgagcaggaccagaaatactctttctgcacagaccacactgttttggttcagactcgaggaggaaattccaatggtgccttgtgccacttccccttcctatacaacaaccacaattacactgattgcacttctgagggcagaagagacaacatgaagtggtgtgggaccacacagaactatgatgccgaccagaagtttgggttctgccccatggctgcccacgaggaaatctgcacaaccaatgaaggggtcatgtaccgcattggagatcagtgggataagcagcatgacatgggtcacatgatgaggtgcacgtgtgttgggaatggtcgtggggaatggacatgcattgcctactcgcagcttcgagatcagtgcattgttgatgacatcacttacaatgtgaacgacacattccacaagcgtcatgaagaggggcacatgctgaactgtacatgcttcggtcagggtcggggcaggtggaagtgtgatcccgtcgaccaatgccaggattcagagactgggacgttttatcaaattggagattcatgggagaagtatgtgcatggtgtcagataccagtgctactgctatggccgtggcattggggagtggcattgccaacctttacagacctatccaagctcaagtggtcctgtcgaagtatttatcactgagactccgagtcagcccaactcccaccccatccagtggaatgcaccacagccatctcacatttccaagtacattctcaggtggagacctaaaaattctgtaggccgttggaaggaagctaccataccaggccacttaaactcctacaccatcaaaggcctgaagcctggtgtggtatacgagggccagctcatcagcatccagcagtacggccaccaagaagtgactcgctttgacttcaccaccaccagcaccagcacacctgtgaccagcaacaccgtgacaggagagacgactcccttttctcctcttgtggccacttctgaatctgtgaccgaaatcacagccagtagctttgtggtctcctgggtctcagcttccgacaccgtgtcgggattccgggtggaatatgagctgagtgaggagggagatgagccacagtacctggatcttccaagcacagccacttctgtgaacatccctgacctgcttcctggccgaaaatacattgtaaatgtctatcagatatctgaggatggggagcagagtttgatcctgtctacttcacaaacaacagcgcctgatgcccctcctgacacgactgtggaccaagttgatgacacctcaattgttgttcgctggagcagaccccaggctcccatcacagggtacagaatagtctattcgccatcagtagaaggtagcagcacagaactcaaccttcctgaaactgcaaactccgtcaccctcagtgacttgcaacctggtgttcagtataacatcactatctatgctgtggaagaaaatcaagaaagtacacctgttgtcattcaacaagaaaccactggcaccccacgctcagatacagtgccctctcccagggacctgcagtttgtggaagtgacagacgtgaaggtcaccatcatgtggacaccgcctgagagtgcagtgaccggctaccgtgtggatgtgatccccgtcaacctgcctggcgagcacgggcagaggctgcccatcagcaggaacacctttgcagaagtcaccgggctgtcccctggggtcacctattacttcaaagtctttgcagtgagccatgggagggagagcaagcctctgactgctcaacagacaaccaaactggatgctcccactaacctccagtttgtcaatgaaactgattctactgtcctggtgagatggactccacctcgggcccagataacaggataccgactgaccgtgggccttacccgaagaggacagcccaggcagtacaatgtgggtccctctgtctccaagtacccactgaggaatctgcagcctgcatctgagtacaccgtatccctcgtggccataaagggcaaccaagagagccccaaagccactggagtctttaccacactgcagcctgggagctctattccaccttacaacaccgaggtgactgagaccaccattgtgatcacatggacgcctgctccaagaattggttttaagctgggtgtacgaccaagccagggaggagaggcaccacgagaagtgacttcagactcaggaagcatcgttgtgtccggcttgactccaggagtagaatacgtctacaccatccaagtcctgagagatggacaggaaagagatgcgccaattgtaaacaaagtggtgacaccattgtctccaccaacaaacttgcatctggaggcaaaccctgacactggagtgctcacagtctcctgggagaggagcaccaccccagacattactggttatagaattaccacaacccctacaaacggccagcagggaaattctttggaagaagtggtccatgctgatcagagctcctgcacttttgataacctgagtcccggcctggagtacaatgtcagtgtttacactgtcaaggatgacaaggaaagtgtccctatctctgataccatcatcccagctgttcctcctcccactgacctgcgattcaccaacattggtccagacaccatgcgtgtcacctgggctccacccccatccattgatttaaccaacttcctggtgcgttactcacctgtgaaaaatgaggaagatgttgcagagttgtcaatttctccttcagacaatgcagtggtcttaacaaatctcctgcctggtacagaatatgtagtgagtgtctccagtgtctacgaacaacatgagagcacacctcttagaggaagacagaaaacaggtcttgattccccaactggcattgacttttctgatattactgccaactcttttactgtgcactggattgctcctcgagccaccatcactggctacaggatccgccatcatcccgagcacttcagtgggagacctcgagaagatcgggtgccccactctcggaattccatcaccctcaccaacctcactccaggcacagagtatgtggtcagcatcgttgctcttaatggcagagaggaaagtcccttattgattggccaacaatcaacagtttctgatgttccgagggacctggaagttgttgctgcgacccccaccagcctactgatcagctgggatgctcctgctgtcacagtgagatattacaggatcacttacggagagacaggaggaaatagccctgtccaggagttcactgtgcctgggagcaagtctacagctaccatcagcggccttaaacctggagttgattataccatcactgtgtatgctgtcactggccgtggagacagccccgcaagcagcaagccaatttccattaattaccgaacagaaattgacaaaccatcccagatgcaagtgaccgatgttcaggacaacagcattagtgtcaagtggctgccttcaagttcccctgttactggttacagagtaaccaccactcccaaaaatggaccaggaccaacaaaaactaaaactgcaggtccagatcaaacagaaatgactattgaaggcttgcagcccacagtggagtatgtggttagtgtctatgctcagaatccaagcggagagagtcagcctctggttcagactgcagtaaccactattcctgcaccaactgacctgaagttcactcaggtcacacccacaagcctgagcgcccagtggacaccacccaatgttcagctcactggatatcgagtgcgggtgacccccaaggagaagaccggaccaatgaaagaaatcaaccttgctcctgacagctcatccgtggttgtatcaggacttatggtggccaccaaatatgaagtgagtgtctatgctcttaaggacactttgacaagcagaccagctcagggagttgtcaccactctggagaatgtcagcccaccaagaagggctcgtgtgacagatgctactgagaccaccatcaccattagctggagaaccaagactgagacgatcactggcttccaagttgatgccgttccagccaatggccagactccaatccagagaaccatcaagccagatgtcagaagctacaccatcacaggtttacaaccaggcactgactacaagatctacctgtacaccttgaatgacaatgctcggagctcccctgtggtcatcgacgcctccactgccattgatgcaccatccaacctgcgtttcctggccaccacacccaattccttgctggtatcatggcagccgccacgtgccaggattaccggctacatcatcaagtatgagaagcctgggtctcctcccagagaagtggtccctcggccccgccctggtgtcacagaggctactattactggcctggaaccgggaaccgaatatacaatttatgtcattgccctgaagaataatcagaagagcgagcccctgattggaaggaaaaagacagacgagcttccccaactggtaacccttccacaccccaatcttcatggaccagagatcttggatgttccttccacagttcaaaagacccctttcgtcacccaccctgggtatgacactggaaatggtattcagcttcctggcacttctggtcagcaacccagtgttgggcaacaaatgatctttgaggaacatggttttaggcggaccacaccgcccacaacggccacccccataaggcataggccaagaccatacccgccgaatgtaggtgaggaaatccaaattggtcacatccccagggaagatgtagactatcacctgtacccacacggtccgggactcaatccaaatgcctctacaggacaagaagctctctctcagacaaccatctcatgggccccattccaggacacttctgagtacatcatttcatgtcatcctgttggcactgatgaagaacccttacagttcagggttcctggaacttctaccagtgccactctgacaggcctcaccagaggtgccacctacaacgtcatagtggaggcactgaaagaccagcagaggcataaggttcgggaagaggttgttaccgtgggcaactctgtcaacgaaggcttgaaccaacctacggatgactcgtgctttgacccctacacagtttcccattatgccgttggagatgagtgggaacgaatgtctgaatcaggctttaaactgttgtgccagtgcttaggctttggaagtggtcatttcagatgtgattcatctagatggtgccatgacaatggtgtgaactacaagattggagagaagtgggaccgtcagggagaaaatggccagatgatgagctgcacatgtcttgggaacggaaaaggagaattcaagtgtgaccctcatgaggcaacgtgttatgatgatgggaagacataccacgtaggagaacagtggcagaaggaatatctcggtgccatttgctcctgcacatgctttggaggccagcggggctggcgctgtgacaactgccgcagacctgggggtgaacccagtcccgaaggcactactggccagtcctacaaccagtattctcagagataccatcagagaacaaacactaatgttaattgcccaattgagtgcttcatgcctttagatgtacaggctgacagagaagattcccgagagtaaatcatctttccaatccagaggaacaagcatgtctctctgccaagatccatctaaactggagtgatgttagcagacccagcttagagttcttctttctttcttaagccctttgctctggaggaagttctccagcttcagctcaactcacagcttctccaagcatcaccctgggagtttcctgagggttttctcataaatgagggctgcacattgcctgttctgcttcgaagtattcaataccgctcagtattttaaatgaagtgattctaagatttggtttgggatcaataggaaagcatatgcagccaaccaagatgcaaatgttttgaaatgatatgaccaaaattttaagtaggaaagtcacccaaacacttctgctttcacttaagtgtctggcccgcaatactgtaggaacaagcatgatcttgttactgtgatattttaaatatccacagtactcactttttccaaatgatcctagtaattgcctagaaatatctttctcttacctgttatttatcaatttttcccagtatttttatacggaaaaaattgtattgaaaacacttagtatgcagttgataagaggaatttggtataattatggtgggtgattattttttatactgtatgtgccaaagctttactactgtggaaagacaactgttttaataaaagatttacattcc

SEQ ID NO: 265639 - DNA, 6891 bp, Artificial Sequence
  derived and/or modified sequence
atgctgcggggccctggccctggcctgctgctgctggccgtgcagtgcctgggcacagctgtgcccagcactggagccagcaagagcaagaggcaggcccagcagatggtgcagccccagagccctgtggccgtgtcccagagcaagccaggctgctatgacaatggcaagcactaccagatcaaccagcagtgggagaggacctacctgggcaatgccctggtgtgcacctgctatggaggcagccggggcttcaactgtgagagcaagccagaggccgaggagacctgctttgacaagtacacaggcaacacctacagagtgggggacacctatgaaagacccaaggacagcatgatctgggactgcacctgcatcggggccggccggggccgcatcagctgcaccatcgccaaccgctgccacgagggcggccagagctacaagatcggggacacctggaggcggccccatgagaccggcggctacatgctggagtgtgtgtgcctgggcaatggcaagggggagtggacctgcaagcccatcgccgagaagtgctttgaccacgccgccggcaccagctatgtggtgggggagacctgggagaagccctaccagggctggatgatggtggactgcacctgcctgggggagggcagcggccgcatcacctgcaccagcaggaaccgctgcaatgaccaggacaccaggaccagctaccgcatcggggacacctggagcaagaaggacaacagaggcaacctgctgcagtgcatctgcacaggaaatggccgcggggagtggaagtgtgagcggcacacctctgtgcagaccaccagcagcggcagcggccccttcacagatgtgcgggctgctgtgtaccagccccagccccacccccagcccccaccctacggccactgtgtgacagacagcggcgtggtgtacagcgtgggcatgcagtggctgaagacccagggcaacaagcagatgctgtgcacctgcctgggcaatggagtgtcctgccaggagacagctgtgacccagacctatggaggcaacagcaatggagagccctgtgtgctgcccttcacctacaatggaagaaccttctacagctgcaccacagagggccggcaggacggccacctgtggtgcagcaccaccagcaactatgagcaggaccagaagtacagcttctgcacagaccacacagtgctggtgcagacccggggcggcaacagcaatggagccctgtgccacttccccttcctgtacaacaaccacaactacacagactgcaccagcgagggcagaagagacaacatgaagtggtgtggcaccacccagaactatgatgctgaccagaagtttggcttctgccccatggccgcccacgaggagatctgcaccaccaatgaaggagtgatgtaccgcatcggggaccagtgggacaagcagcacgacatgggccacatgatgcgctgcacctgtgtgggcaatggccgcggggagtggacctgcatcgcctacagccagctgcgggaccagtgcatcgtggatgacatcacctacaacgtgaatgacaccttccacaagagacatgaggagggccacatgctgaactgcacctgcttcggccagggccggggccgctggaagtgtgaccctgtggaccagtgccaggacagcgagaccggcaccttctaccagatcggggacagctgggagaagtatgtgcatggagtgcgctaccagtgctactgctacggccggggcatcggggagtggcactgccagcccctgcagacctaccccagcagcagcggccctgtggaggtgttcatcacagagacccccagccagcccaacagccaccccatccagtggaatgccccccagcccagccacatcagcaagtacatcctgcgctggaggcccaagaacagcgtgggccgctggaaggaggccaccatccctggccacctgaacagctacaccatcaagggcctgaagccaggagtggtgtatgagggccagctgatcagcatccagcagtatggccaccaggaggtgaccaggtttgacttcaccaccaccagcaccagcacccctgtgaccagcaacacagtgactggagagaccacccccttcagccccctggtggccaccagcgagagcgtgacagagatcacagccagcagctttgtggtgtcctgggtgtctgccagtgacacagtgtctggcttccgggtggagtatgagctgtctgaggagggagatgagccccagtacctggacctgcccagcacagccacctctgtgaacatcccagacctgctgcccggcaggaagtacatcgtgaatgtgtaccagatcagtgaagatggagagcagagcctcatcctgagcaccagccagaccacagccccagatgcccccccagacaccaccgtggaccaggtggatgacaccagcatcgtggtgcgctggagccggccccaggcccccatcaccggctacagaattgtgtacagccccagcgtggagggcagcagcacagagctgaacctgcctgagacagccaacagcgtgaccctgagtgacctgcagcccggggtgcagtacaacatcaccatctatgctgtggaggagaaccaggagagcacccctgtggtgatccagcaggagaccaccggcacccccaggagtgacacagtgcccagcccccgggacctgcagtttgtggaggtgacagatgtgaaggtgaccatcatgtggaccccacctgagagcgctgtgacaggctacagagtggatgtgattcctgtgaacctgcctggagagcacggccagaggctgcccatcagcaggaacacctttgctgaggtgacaggcctgagccctggggtgacctactacttcaaggtgtttgctgtgagccacggccgggagagcaagcccctgacagcccagcagaccaccaagctggatgcccccaccaacctgcagtttgtgaatgaaacagacagcacagtgctggtgcgctggaccccaccccgggcccagatcaccggctaccgcctgactgtgggcctgacccggcggggccagccccggcagtacaacgtgggccccagcgtgtccaagtaccccctgaggaacctgcagcctgccagcgagtacacagtgtccctggtggccatcaagggcaaccaggagagccccaaggccactggagtcttcaccaccctgcagcccggcagcagcatccccccctacaacacagaggtgacagagaccaccatcgtcatcacctggaccccagcccccagaattggcttcaagctgggcgtgcggcccagccagggcggggaggccccccgggaggtgaccagtgacagcggcagcatcgtggtgtctggcctgaccccaggagtggagtatgtgtacaccatccaggtgctgagagatggccaggagagagatgcccccatcgtgaacaaggtggtgacccccctgagcccccccaccaacctgcacctggaggccaacccagacaccggggtgctgactgtgtcctgggagaggagcaccaccccagacatcaccggctaccgcatcaccaccacccccaccaacggccagcagggcaacagcctggaggaggtggtgcatgctgaccagagcagctgcacctttgacaacctgagccctggcctggagtacaacgtgtctgtgtacacagtgaaggatgacaaggagagcgtgcccatcagtgacaccatcatcccagctgtgcccccacccacagacctgcgcttcaccaacatcggccctgacaccatgagggtgacctgggcccccccacccagcattgacctgaccaacttcctggtgcgctacagccctgtgaagaatgaagaagatgtggccgagctgagcatcagccccagcgacaatgctgtggtgctgaccaacctgctgcccggcacagaatatgtggtgtctgtgtcctctgtgtatgagcagcacgagagcacccccctgcggggccggcagaagacaggcctggacagccccaccggcatcgacttcagtgacatcacagccaacagcttcaccgtgcactggatcgccccccgggccaccatcaccggctaccgcatccgccaccaccctgagcacttcagcggccggcccagagaagatagagtgccccacagcaggaacagcatcaccctgaccaacctgaccccaggcacagaatatgtggtgtccatcgtggccctgaatggccgggaggagagccccctgctgattggccagcagagcacagtgtctgatgtgccccgggacctggaggtggtggccgccacccccaccagcctgctgatctcctgggatgccccagctgtgacagtgcgctactaccgcatcacctacggggagactggaggcaacagccctgtgcaggagttcaccgtgcccggcagcaagagcacagccaccatcagcggcctgaagccaggagtggactacaccatcaccgtgtatgctgtgacaggccgcggggacagccctgccagcagcaagcccatcagcatcaactacagaacagaaattgacaagcccagccagatgcaggtgacagatgtgcaggacaacagcatctctgtgaagtggctgcccagcagcagccctgtgacaggctacagagtgaccaccacccccaagaatggacctggccccaccaagaccaagacagctggccctgaccagacagagatgaccatcgagggcctgcagcccaccgtggagtatgtggtgtctgtgtatgcccagaaccccagcggggagagccagcccctggtgcagacagctgtgaccaccatcccagcccccacagacctgaagttcacccaggtgacccccaccagcctgagcgcccagtggaccccacccaacgtgcagctgaccggctacagagtgcgggtgacccccaaggagaagacaggccccatgaaggagatcaacctggccccagacagcagctctgtggtggtgtctggcctgatggtggccaccaagtatgaggtgtctgtgtatgccctgaaggacaccctgaccagcaggcctgcccagggcgtggtgaccaccctggagaatgtgagccccccccggcgggcccgggtgacagatgccacagagaccaccatcaccatctcctggaggaccaagacagagaccatcaccggcttccaggtggatgctgtgcctgccaacggccagacccccatccagaggaccatcaagccagatgtgcgcagctacaccatcaccggcctgcagcctggaacagactacaagatctacctgtacaccctgaatgacaatgcccggagcagccctgtggtgattgatgccagcacagccattgatgcccccagcaacctgcgcttcctggccaccacccccaacagcctgctggtgtcctggcagcccccccgggcccgcatcaccggctacatcatcaagtatgagaagccaggcagccccccccgggaggtggtgccccggcccaggcctggggtgacagaggccaccatcaccggcctggagcctggaacagagtacaccatctacgtgattgccctgaagaacaaccagaagtctgagcccctcatcggcaggaagaagacagatgagctgccccagctggtgaccctgccccaccccaacctgcacggccctgagatcctggatgtgcccagcacagtgcagaagaccccatttgtgacccaccctggctatgacacaggaaatggcatccagctgcccggcaccagcggccagcagcccagcgtgggccagcagatgatctttgaggagcacggcttccggaggaccaccccacccaccacagccacccccatccgccaccggccccggccctaccccccaaatgtgggggaggagatccagatcggccacatcccccgggaggatgtggactaccacctgtacccccacggccctggcctgaaccccaatgccagcacaggccaggaggccctgagccagaccaccatctcctgggcccccttccaggacaccagcgagtacatcatcagctgccaccctgtgggcacagatgaggagcccctgcagttccgggtgcccggcaccagcaccagcgccaccctgaccggcctgaccaggggggccacctacaacgtgattgtggaggccctgaaggaccagcagaggcacaaggtgcgggaggaggtggtgacagtgggcaacagcgtgaatgaaggcctgaaccagcccacagatgacagctgctttgacccctacacagtgagccactatgctgtgggagatgagtgggagaggatgtctgagagcggcttcaagctgctgtgccagtgcctgggcttcggcagcggccacttccgctgtgacagcagccgctggtgccacgacaacggggtgaactacaagatcggggagaagtgggaccggcagggagaaaatggccagatgatgagctgcacctgcctgggcaatggaaaaggagagttcaagtgtgacccccatgaggccacctgctatgatgatggcaagacctaccacgtgggggagcagtggcagaaggagtacctgggcgccatctgcagctgcacctgcttcggcggccagaggggctggaggtgtgacaactgccggcggcctggaggagagcccagccctgagggcaccaccggccagagctacaaccagtacagccagcgctaccaccagaggaccaacaccaacgtgaactgccccatcgagtgcttcatgcccctggatgtgcaggccgaccgggaggacagccgggagtag

SEQ ID NO: 265640 - DNA, 6891 bp, Artificial Sequence
  derived and/or modified sequence
atgctgcggggccccggccccggcctgctgctgctggccgtgcagtgtctggggactgccgtgccatcaaccggggcgagcaagtctaagcggcaagcgcaacaaatggtccagccccagtctcctgtggccgtttctcagtctaaacctggttgttatgataacggtaagcactaccagattaaccagcagtgggagaggacctatttagggaacgcgctcgtttgcacgtgctacggcggctctcgcgggtttaactgtgaaagcaaaccagaagccgaggagacctgtttcgacaagtacactggaaatacataccgagttggggacacatatgagcgtcccaaagactctatgatctgggattgtacctgtattggcgctggacgggggcggatttcatgcaccatcgccaatcgatgtcatgagggcgggcagagctacaaaattggcgacacatggcgcagacctcatgagacaggtggttatatgctcgagtgcgtatgcctgggcaatggaaagggggagtggacgtgtaagcctatagctgagaagtgttttgaccatgccgctggcaccagctacgtcgtgggagagacatgggaaaagccttaccagggatggatgatggttgattgcacttgtctgggcgagggctcaggccgaatcacgtgcacatctaggaacagatgtaatgaccaggatacccgcacaagctacagaattggcgacacttggagtaaaaaagacaacagaggtaatctcctccaatgtatctgcaccggaaacggtcgtggggaatggaaatgcgaacgccatacgagtgtccagactacttcatcgggctcaggccccttcacagatgtaagagctgccgtctaccaaccacagccacacccacagccccccccttacgggcactgcgttacagacagtggcgtcgtgtattctgtgggaatgcagtggctaaagacccagggaaacaaacaaatgctgtgcacatgcctgggcaatggcgtgagctgtcaggagactgccgtaacccagacgtacggtgggaattctaacggcgaaccttgtgtcctgccattcacctacaacgggcgcaccttttatagttgcaccactgaaggccgccaggatgggcacctatggtgttcaacgaccagtaactatgagcaggaccagaaatactcattttgcaccgatcatacggttctggtgcaaacgcgcggtgggaactcaaacggcgccctatgtcattttccctttctgtacaataaccacaattacacagattgcacaagcgaggggcgccgcgataatatgaaatggtgcgggaccacccagaactatgacgccgaccaaaagtttggattttgcccgatggccgcccatgaggagatttgtacaacaaacgagggtgtgatgtaccgaatcggcgatcagtgggacaaacagcatgatatgggccacatgatgagatgtacatgcgtgggaaatggaagaggcgagtggacttgtatcgcttacagtcagctgagagaccagtgtatcgttgatgacattacttacaatgtcaatgatacattccacaaacggcatgaagagggtcatatgctgaactgtacctgtttcgggcaggggcgaggaaggtggaaatgcgaccccgttgaccaatgtcaagactctgagaccggaactttctatcaaataggtgattcttgggagaaatacgtccatggagtccgatatcagtgctactgctacggccgaggtattggcgaatggcactgtcaaccattacaaacttatccatcgtcaagcgggcccgttgaggtattcatcacggagacacctagtcagcctaattctcatcctattcagtggaacgccccccagccttcacatatttctaaatacatccttaggtggcgcccgaagaattccgtggggcggtggaaagaggctactattccaggtcatctgaactcttacacaattaagggtctgaagccaggcgtggtctatgagggtcagctgatatcaattcagcagtacggccatcaggaggtgacccggttcgactttacaacaaccagcacttctacgccagtcacttccaatacagttacaggagaaactaccccatttagccctcttgtcgctacatccgagtcggtcactgagattaccgcttcctctttcgttgtctcctgggtgtccgcctctgacaccgtgtccgggttccgcgttgaatatgagctaagcgaagagggcgatgagccccagtatctggacctcccctccacagcaacgagcgtgaatattcctgacctcctacctgggagaaagtatatcgtcaatgtctatcagatttcagaggatggcgagcaatccctgatcctgtcaacttctcagacaaccgctccagatgctcccccggacacaaccgtagaccaagtagatgacacttccatagtcgtccgctggtctaggcctcaagccccaataacaggttataggatcgtctacagccccagcgtggagggctcgagtaccgaactgaatcttccagaaaccgcaaacagtgtgactctcagtgatctgcagcccggggttcagtataacatcactatctatgccgtggaggaaaatcaagagtccacgccagtagtcatacaacaggagactactgggacccctcggtccgacaccgttcctagccccagagacttacagttcgtggaagtgactgacgttaaggtgacgataatgtggaccccccccgaaagtgccgtgacagggtacagagtggacgtgattcctgtgaatcttcccggggaacacggccaaaggctccctatcagccggaacacctttgccgaagtgaccggattatctcctggcgtcacttactacttcaaggtcttcgctgttagtcacggccgcgagagcaaaccacttaccgcacagcaaacaacgaaactggatgcacctaccaatctccagtttgtgaatgagaccgactccaccgttctcgtgaggtggacccctccaagggcgcagatcactgggtacaggctcaccgtgggattaacacggagagggcagcctcgccagtataatgttggacccagtgtgagcaagtaccccctacgcaatctgcagccagcaagtgagtacacagtatcactagtggctatcaaaggcaaccaggaatctccaaaagccaccggcgtgtttacaactctccagccaggaagctctatcccgccctataacaccgaggtgaccgagaccacaattgtcattacatggaccccagcccctagaatcggatttaagctgggcgtgcgaccctcccagggcggcgaggcccctagagaagtcaccagtgattcagggagcatagttgtttctggattgactccgggagttgagtacgtttacactatccaggtgttaagggacggtcaggaacgagatgctccaattgtgaacaaagttgtgacaccactcagtccacccactaatctccatttagaggccaatcccgacacaggggtgcttaccgtgtcctgggagagaagcacaacccctgatataaccggataccgtatcacaacaacacctacaaatggtcaacaaggcaactctttggaggaggtggtgcatgcggaccagagctcgtgcactttcgataatctgagcccgggtctcgagtacaatgtttcagtctacacagtcaaggatgataaggagtcagttccaatctcagacaccattattcccgccgtaccacccccgactgacctcaggttcaccaacataggtcccgatacaatgagagtgacatgggctccacctccatctatcgacctgacaaatttcctggttcgctactctcctgtaaagaatgaggaggatgtcgccgagttgtcgatcagtccctctgacaacgctgtggtgctcacgaatctcctccctggtactgagtacgtagtatcagtgagctccgtttatgagcagcacgagtcaactccactcagagggagacagaagacaggcctcgacagcccaaccggcattgacttcagcgacattacagcgaacagctttacggtccactggatcgcacccagagcaacgattaccgggtatcggattcgccaccatcctgagcatttttccgggcggcccagagaggacagagtgcctcacagtaggaattcgatcacactgacaaacctgacgccaggcactgaatacgtcgtgtcaattgtggccctgaacggacgggaagaatccccattgttaatcggccagcaaagtactgtttcggatgtgccaagggatcttgaggtggttgccgccacgccgacatcattgctcatcagttgggatgcacctgccgtgaccgtacggtattaccgaattacctacggcgaaaccgggggaaactcccccgttcaggaattcaccgtgccaggttcaaagtcaacagccaccatcagcggactcaagcccggcgtggactacaccatcacagtgtatgccgtaactgggcgcggggattcccctgcatcttcgaaaccaataagtatcaactatcgcacagaaatcgacaaacccagtcagatgcaggtgaccgacgtacaggacaacagcatttctgtaaagtggctgccatctagctcccccgttaccggttatagagtgacaactacccccaaaaatggtccaggtccgacaaagactaagaccgccggacctgaccagacagagatgactatcgaaggcctacagccgaccgtagagtacgttgtatcagtctacgcccagaatcccagcggagaaagtcagccgctggtgcagactgctgtaacaacaatccctgcaccaacggacctgaagttcactcaagtcaccccaacgtctctctccgcccagtggacaccaccaaacgttcagctgacaggttaccgtgtgcgcgtcacgcccaaagaaaaaaccggccccatgaaagagataaacctggcaccggacagctcctcggtggttgtgtccggattgatggtcgcgacaaaatacgaggtaagcgtttacgccctgaaggacacgcttaccagccggccagcacagggggttgttacaacgctcgaaaacgtttcccctccacgccgggctagggtgaccgacgcaactgagaccacaataacaataagctggagaactaagacagaaaccatcaccggctttcaggtggacgccgtgccagccaacggccaaacacctatccagcggactatcaaaccagatgttcgcagctacacaataacagggctgcagccaggtaccgattacaagatctacctctatacgctgaatgacaatgctaggtcctctcctgtggtcattgatgcgtcaactgcaattgacgccccttctaacctgagattccttgcaacgacccccaatagcctgctggttagctggcaacctccaagagctcggatcacgggatacattatcaaatacgagaagcccggcagccctccgcgggaggtagtgcctcggcctcgaccaggcgtcacagaggctaccatcactggactagagcctggcactgagtacacaatttatgtcatcgctctgaagaacaatcaaaagtctgaacctctgattggccggaagaagactgatgaactcccacagttggtgactctcccccatccgaacttgcatgggcccgagatactcgacgtaccgtccaccgtccaaaagacaccatttgtcacccatccagggtatgacacaggaaacgggatacagctgccggggactagtggccaacagcccagcgtggggcagcaaatgatattcgaagaacatggatttcgcagaacaacaccacctaccacagccactcccatacgtcacaggcccaggccctaccctcctaatgtaggcgaagaaattcaaattggccatataccacgagaagacgtggattaccacctgtacccacacgggcccggcctgaaccccaatgctagcaccgggcaggaagcccttagccagacaaccattagttgggccccattccaagatacaagtgaatatatcatatcatgtcaccccgtagggactgatgaagagcccctgcaattccgggtgcctgggacctccacctccgcaacattgactgggttgacccgaggcgccacttacaacgttatagtcgaggcgttgaaagaccagcagagacacaaagtgagggaggaggtggtgactgttggcaacagcgtgaatgaggggctcaaccagccaacagacgattcctgtttcgacccgtatacagtgtcccactacgcggtgggagacgaatgggagcgaatgagtgaatcggggtttaagttgttatgccagtgccttggcttcggctctggtcactttcggtgcgacagcagccggtggtgccatgacaacggggtgaattataaaatcggggaaaaatgggaccgtcaaggagagaacggacagatgatgtcatgtacctgtctgggcaacggaaagggtgagttcaaatgtgacccgcacgaggccacatgctacgacgacggtaagacatatcatgtgggtgagcagtggcagaaggagtacctgggggcgatttgctcatgcacatgcttcggcggacagcgtgggtggcggtgcgacaattgccgacgccctggcggtgagccctctcccgaggggacaactggtcagagctataaccaatacagccagcggtaccaccagcgtactaataccaatgtgaattgtcctatcgagtgcttcatgccgctggatgtccaggccgatcgggaagactctagagagtag

SEQ ID NO: 265641 - DNA, 6891 bp, Artificial Sequence
  derived and/or modified sequence
atgcttagaggacccggtcccggactattacttttagccgtgcagtgtttgggcacagctgtgccctcaactggagcaagcaagagcaagaggcaggctcagcagatggtgcagccacagagtccagtggcagtgtctcaatcaaagccaggttgctatgacaatgggaagcactaccagatcaatcaacagtgggagcggacctacctgggcaatgccttggtgtgtacttgctacgggggatcgaggggatttaactgcgaatcaaaaccagaagcagaagagacatgtttcgataaatatactgggaatacatatagagtaggtgacacctacgagcggccaaaggactctatgatctgggactgcacgtgcatcggggcaggccgaggacggatatcatgcaccattgccaatcgttgccatgagggcggtcaaagctacaaaatcggggatacatggaggagacctcacgaaactggcggttatatgctcgagtgcgtttgcctgggaaacgggaagggcgaatggacctgtaagcctatcgcagagaaatgctttgaccacgctgcaggtacatcctatgtggtcggtgaaacttgggaaaagccttatcagggctggatgatggttgactgcacatgccttggcgagggcagtggtcgcatcacctgcacatccagaaacagatgtaacgatcaagacactcgcaccagctatagaataggcgacacgtggtccaagaaggacaataggggtaacctcttgcagtgcatttgtactggaaacgggaggggagagtggaaatgtgagcggcatacctccgttcaaacaacctcttctgggagtggacctttcactgatgtacgagccgcagtctatcaaccccagccccatcctcagcccccaccttatggccattgtgtgacggatagcggggtcgtctactcagtcggaatgcagtggctaaagactcaggggaacaaacagatgctttgcacgtgtctcggtaacggagtttcctgtcaggaaacagccgtgacccagacttatggcggaaacagcaatggagagccctgtgttctcccatttacctacaacggccgaacgttctattcgtgtacaaccgagggacgccaggatggacacctgtggtgctccacaacatccaactacgaacaggatcaaaaatactccttttgtacagatcacacagtgttagttcagacgcggggagggaacagcaatggggctttgtgccacttccctttcttgtataacaatcacaattatacagactgtacatccgagggtagacgtgataacatgaagtggtgcgggactacccagaactatgatgcggaccagaagttcgggttctgcccgatggcagcacacgaggagatatgcaccaccaatgagggggtgatgtatcgcataggcgatcaatgggacaagcaacatgatatgggtcatatgatgagatgcacatgcgtgggcaacggaaggggtgagtggacttgcatagcatactcgcagcttcgggatcaatgtattgtggacgacatcacctataacgtcaacgatacattccacaagcgacatgaggaaggacatatgctgaactgcacatgttttgggcaaggtagagggagatggaagtgtgatccagtggatcagtgccaggactccgaaaccgggactttctatcagatcggcgattcgtgggaaaagtatgttcatggcgtcaggtatcagtgctattgctatgggagaggtattggggagtggcattgtcaaccgctccaaacctatccatcaagctcggggcctgtggaggtgttcattactgaaactccaagccagcccaactcccaccccattcaatggaatgcaccgcaaccctcacatatatcgaagtacatcctccgctggcgccctaagaactccgtcgggcgatggaaggaggctaccatacccggacatctaaatagttacactatcaagggattaaagccaggtgttgtgtatgagggacagctgataagcatacagcagtacggccatcaagaggtgacccgttttgattttactaccacctcgacatccacccccgtgactagcaacacagttaccggcgagaccaccccttttagccctctcgtagcaacttcagaatcagtgactgagataactgccagctcttttgtggtctcatgggtgagtgccagtgacactgtgtccgggttccgagtggagtatgagctgagtgaggagggcgatgagcctcagtacctggatctgccttcaaccgcaaccagcgtgaatattcccgacctgctcccagggagaaaatacatcgtgaacgtctatcagatctcagaggatggtgagcaatctctgatcctttccaccagccagacgaccgcccctgacgctcctcccgacaccacagtcgaccaggtcgatgatacgtctatcgtggtccggtggtccaggcctcaggcaccgatcaccggttacagaatcgtgtacagtccaagcgtggagggaagcagcaccgaactgaacctgcctgagactgccaactccgttaccctgagtgatctgcagcccggtgtccagtacaatattactatttatgccgtggaagagaatcaggagtctacccccgtggtgatccagcaggaaaccactgggacgcccagatctgatacggtcccttcaccacgtgatctgcagtttgttgaggtgactgacgtgaaagttactatcatgtggacccctccggaaagtgccgttacgggttaccgtgtggacgtgatcccagttaatcttcctggagagcatgggcaacgcctcccgatttcccgaaatacattcgcggaggtcaccggacttagccctggggtgacttattatttcaaagtctttgccgtgagccacgggagggagtccaaacccctgacagcccagcagactaccaaactggatgcacccaccaacctgcagtttgttaacgagacagactcaaccgtcctcgtcagatggacgccccctcgggctcagattacgggctataggctaactgtgggcctcacccggcgaggccaaccgagacagtataatgtgggaccatccgtgagtaagtaccccctccggaacctacagccagcgagcgagtacacagtgtctctggtcgccattaaaggcaaccaggagtctccaaaggccacaggcgtgtttactacactgcagcctggaagctctatcccaccatacaacacagaggtgaccgagacaacaattgtgattacctggacaccagcaccaagaatagggttcaaacttggtgtaagaccctcccaaggaggggaagcccctagagaggtgactagcgactctgggagcattgtagtctctggtttaactcccggtgtagagtacgtctacacaatccaggtgcttcgggacgggcaggagagggatgctcccattgtcaacaaagtcgtcacacctctttctcccccaacaaaccttcacctcgaggccaatcctgacaccggcgttctgacggttagttgggagcgaagcacaaccccagacattacgggctaccggatcacgacaacccccaccaatggtcagcagggaaactcactcgaggaagtggttcatgccgatcagtcatcttgtacattcgacaatctaagcccaggcctggagtacaacgtatccgtgtatacggtaaaggatgataaagagagcgtgcctatatcggacactattatccctgcagtccccccacccaccgacctcagatttacgaacatcgggcctgatacgatgcgcgtgacgtgggctcctcccccaagcattgatcttacaaactttctcgtgcggtacagccccgttaaaaacgaagaggatgttgccgagttgtctattagccccagcgacaacgccgttgtgctgaccaacctactgccagggacagagtacgtggtctcggtctctagcgtctacgaacagcatgagagcacccctctgagaggaaggcaaaaaacgggattagatagccccaccggtatcgatttctcagacatcacagcaaacagtttcaccgtgcactggattgctcctagagctaccatcaccggctataggattcggcatcacccagagcactttagcggccgacctcgggaggaccgggttccacactctagaaactccattaccctgacaaaccttacgccaggaacagaatatgtggtttcaatcgtcgctcttaatggacgggaggagtctccattactcattggacagcagagtacagtctctgacgtaccgagggatttagaggtggtcgcagcgacccctacttccctgctcataagctgggatgccccagccgtgactgttagatactatcgcattacctatggcgagactggaggtaattcaccagtccaggaattcaccgtgcctgggtccaagagtacagctactatttccggccttaagccgggagtcgattacacaattacggtatatgccgtgacgggtcgaggcgacagccctgcctcctcaaagcccatctctataaactacaggacggagattgacaagccgtcacaaatgcaagtgactgatgttcaagacaatagcataagcgtgaagtggctcccaagctcaagccccgtaaccgggtatagagtgaccacgacccccaaaaatggacccggaccaaccaagactaaaaccgcgggtcccgatcagactgaaatgacaattgagggcctccagcctacggtcgaatacgtagtgagcgtctacgcccagaatccttcaggagagtcacagcctttagttcagactgcagttaccactatacccgcacccaccgatctcaagttcacccaggtgacaccgacttcgttgtccgctcaatggacaccacccaacgtccagctgacggggtatcgtgttcgggttacacccaaagagaagactgggcctatgaaagaaatcaatcttgcaccagattcgtcctcagtcgttgtttccggcctgatggtggcaacgaagtatgaggtgtctgtttatgcgttgaaggacactcttaccagtcgccctgcacagggcgtcgtcacaaccctggagaacgtctcaccaccccgtcgggctcgcgtgaccgacgcaacagagactacaattaccattagttggaggactaagactgagaccatcaccggattccaggtggacgccgtgccagccaacgggcagaccccaatccagcgtacgatcaaacccgacgtgaggtcatacaccatcaccggcctccagccaggaaccgattacaagatatacctgtacacacttaacgacaacgcaagatcctctcctgtggtgatcgacgccagcactgcaattgatgctccatccaacctgcgctttctcgccactactcccaacagcttactagtgtcatggcaaccaccacgtgcccgaattacgggatacattatcaaatacgagaagcccggttctcctcccagggaagtggttcctcggccaagacccggagtgaccgaggccaccataacaggccttgaacccggtactgagtatactatctatgtgattgcgttgaaaaacaatcaaaaatctgagcctctaataggccgtaaaaagacggatgagctgccccaacttgtgactttgccgcatcccaatctgcatggtcctgagatccttgacgtccctagcacggtccagaagactccctttgttacccacccaggctatgacaccggtaatggaatccagctccctggtaccagtggccaacagccttcagttggacagcagatgatttttgaagagcacggatttcggaggacaacccctccgacaactgcaacacccatccgtcatcggcctaggccttatccccctaatgttggcgaagagattcagatcgggcacatcccacgagaggatgttgattatcacctgtacccacatgggccaggtttgaatcctaacgccagcactggacaggaggccctgagccagaccaccatttcctgggccccttttcaggacacatctgagtatatcatctcttgtcatccagtggggaccgacgaagaaccgctgcagttcagagttccaggtaccagcacctctgctactctcacaggcttgacaagaggcgctacatacaacgtaatcgttgaggcgctcaaggatcagcagcgccataaggtgagggaggaggtggttacggtgggaaattccgtgaatgagggattaaaccagcccactgacgactcatgctttgacccctatactgtgagccactatgctgtcggcgacgaatgggagcgaatgagtgaaagcgggtttaaactgctctgccaatgtctcgggttcggttcaggtcatttccgctgcgacagtagcaggtggtgtcacgataatggcgttaattataagatcggggagaagtgggacagacaaggagagaacgggcaaatgatgagctgcacctgcctcggcaacggcaaaggggagttcaagtgtgacccacatgaagccacatgctacgatgatggaaaaacataccacgtgggcgaacagtggcagaaagaatacctgggggctatttgctcttgtacttgcttcggagggcagcggggttggaggtgcgacaactgtaggaggccgggtggtgaacccagccccgagggcaccactggccaaagctacaaccaatattctcagagatatcatcagaggacaaataccaacgtcaattgtcccattgagtgcttcatgccacttgacgtgcaggcagacagagaggacagccgggaataa

SEQ ID NO: 265642 - DNA, 6891 bp, Artificial Sequence
  derived and/or modified sequence
atgttaagagggcctggacctgggctgctcctgttggctgtgcagtgcctggggaccgccgtccctagcacgggcgcctcaaagagcaagaggcaagctcagcagatggtacaaccacagtcccctgtcgcagtatcccagagtaagcccggatgctacgataacgggaaacactaccaaatcaaccagcagtgggagaggacctacctcggaaacgcactggtctgcacatgctacgggggaagtaggggcttcaactgtgagagcaaaccggaagccgaggagacgtgtttcgataaatatacaggcaacacataccgcgtcggagacacctatgaacgcccaaaggactctatgatctgggactgtacttgtatcggagcgggcagagggaggataagctgcactatcgctaaccggtgccatgagggcggtcagtcttacaagattggcgacacgtggcggagacctcacgagactgggggttacatgctcgagtgtgtctgtctgggaaacggcaaaggtgaatggacctgcaaacctatcgccgaaaaatgctttgaccatgccgcaggtacctcatatgtggtcggtgagacgtgggaaaagccttatcaaggatggatgatggtagattgtacctgtcttggcgaaggttctgggaggattacttgcacttcacgcaacagatgcaatgaccaggacacaagaacaagttatcgcatcggagacacgtggagcaaaaaggacaatcgcggaaacttgctgcagtgtatctgcacgggcaatggccgcggtgaatggaaatgcgaacggcataccagcgtacaaaccacctcatcggggagcggccctttcacagacgtacgggccgcagtgtatcagcctcagccccatccccagccacctccgtatggtcactgcgttaccgatagcggggtggtctactccgtagggatgcagtggctgaagacccagggcaacaaacagatgctctgtacttgcctagggaatggcgtttcgtgccaggagacagcagtgacgcagacttacggtgggaacagcaacggagagccgtgtgtccttcccttcacatacaatgggaggaccttctacagttgtaccacggaagggagacaggatggccacctgtggtgtagcactacctccaattatgagcaagatcagaaatatagtttttgcaccgaccacaccgtcttggtccagacacgcggcggtaattcaaatggagccctgtgccatttcccctttctctacaataaccacaattatacagactgtacatctgagggtcggcgagacaacatgaaatggtgcggcacgacgcagaactatgatgctgatcagaagtttggattttgtcccatggcggcacatgaggaaatctgcacaactaacgagggtgtgatgtacagaatcggcgaccagtgggataagcagcacgatatgggccacatgatgcgctgtacttgcgtaggcaatggacggggagaatggacctgcatcgcgtattcacaactccgcgaccaatgtattgtggacgacatcacatacaacgtgaatgatacatttcataagaggcatgaggagggtcacatgctgaactgtacctgttttggacagggccgtgggcgctggaaatgcgatcccgtggaccagtgtcaggactccgagaccgggacattttatcagatcggtgacagctgggaaaagtacgtccacggagtaagatatcaatgctactgttacgggagaggtattggcgagtggcactgtcagcccttgcagacatacccttcatctagcggtcctgtggaagtgttcattacagagacgccctcccaacccaactctcaccctatccaatggaacgcccctcagccttcccatatcagcaagtacattctgcggtggagacctaagaatagtgtagggcggtggaaagaagccaccattcccggacacctgaattcatacacaattaagggtctgaagcccggtgttgtgtacgaaggtcaacttatttctatccaacagtacggtcatcaggaagtcacccggtttgacttcactaccacatcaacctccactccggtgacctctaacactgtgactggagaaaccacacctttttctcccctggttgccacatctgaatcagtcacagagataacagcatcaagctttgtggtgagctgggtgtccgctagtgacactgtttcaggctttcgggtggagtacgaactgtccgaagaaggagacgagccacagtatctggacctgccgtcgacagctacctctgtgaatatccccgaccttctaccaggccgtaaatatattgttaacgtgtaccagatcagtgaggacggtgagcagtcccttatcttatctacatcgcaaaccacagcacccgatgccccccccgatactaccgtagatcaggtggatgacacgagcattgtggtacgttggtctagaccccaggcaccaattaccggataccgcatcgtatactctccaagtgtcgaaggcagcagcaccgagctcaatcttccagaaactgccaacagtgtaaccctgagtgacctgcaaccgggtgttcagtacaatataacgatctacgcagttgaggagaatcaagagagcacaccagtggtgatccagcaggagacaacaggcacccccagatcagacaccgtgccaagcccacgggacctgcagtttgtggaagtgaccgacgtgaaagtgaccatcatgtggactcccccagagtcagcagtaactggctatcgagtcgacgtcatacccgttaatctgcctggcgagcacggccagagactccctatctcacgcaacacctttgctgaggtaacgggactgtcccctggcgtcacatactactttaaggtgttcgccgtgtcccacgggagagagagcaaacccctcacggctcagcaaactactaaactggacgctccaacgaaccttcagttcgtcaacgaaaccgactctactgtcctggttagatggacccccccccgggcccaaataaccgggtatcggctgaccgtcggtctgactcgacgcggacaacccagacagtataacgtcgggccgagtgtgtctaagtatcccttacgcaatctccagcccgcctcagagtatacagtcagtttagtcgcaattaaaggcaaccaggagtcccccaaagcaacgggagtgttcacaacactgcaacccggctcttccatccctccctacaacaccgaggtgacggagaccaccatcgtgataacatggactcctgcacccaggatcggcttcaaactcggggtccgaccctcgcaaggaggagaggcccctagagaagtcactagcgacagtggctctatcgtggtttccggcctgactccgggtgtggagtatgtatacacaatacaggtattacgagacggccaggaaagggacgcacccatcgtcaacaaagtggtaacccccttgtccccacctaccaatctgcacttggaggctaatccggacacaggcgtccttacagtcagctgggagcggtccacaacgcccgacatcacgggatatcggattactaccactcctacgaacggccagcagggaaactcactagaggaggtggttcatgccgaccagagctcatgcacgttcgacaaccttagtcccggacttgaatacaacgtgtccgtatacacagtgaaggatgacaaggaaagcgtgcccattagtgatacaataattcccgctgttccaccaccaacagacctgagattcactaacatcggccctgacaccatgcgggtcacctgggctccccccccctccattgatctgaccaatttcctggtacgatactcccccgtaaaaaatgaggaggacgtggctgaactatcaatttccccctcagataacgcagtagtgctcactaatctgttaccgggcacagagtatgttgtatcagttagcagtgtttacgaacagcatgaatctacgccgctcagggggcgacagaagaccggccttgattcccccactgggattgatttctcagacataacagccaattcatttacagtacactggatcgcgccaagagcaacgatcaccggatatcggattcgtcaccacccagaacactttagcgggcgaccccgggaagatagagttccacacagtaggaacagcattaccctgacaaatcttacccctggaacagagtatgtggtatccatcgttgcactgaacgggcgagaagagtcgcctctgctaatcgggcagcagtctacagtcagcgatgtgcctcgtgacctggaagttgtggccgctactcctacctccctcctgatctcctgggatgccccagctgtgactgtacgttactaccgaatcacctatggtgaaacaggaggtaactctcccgtgcaagaattcaccgtgcccgggtctaaaagcacagcaacgatatcgggtctcaaaccaggcgtggattatacgataactgtgtatgcagtcacaggccgaggtgacagccctgcctcctctaagcccatcagtattaactaccgcaccgaaatcgataagccgagccaaatgcaggtaacagatgtgcaagacaactctatttctgtcaagtggctgccttcttcttcccctgtcacaggatatagagtgacaacaacacctaagaacggccccgggccaactaagacaaagactgctggccccgaccagaccgagatgaccattgagggactgcagccgacggtagaatatgtggtgtcagtttatgcccagaatccttccggagagtcccagccccttgtccaaaccgccgtgaccacaatccctgcccccactgatttgaaatttacacaggtgacgccaacaagtctgtctgcccagtggacgccgccgaatgtacagctcacaggctatagggtacgggtcacacctaaagagaaaaccggccccatgaaagaaattaaccttgctcccgactcttcatcagtcgtggtcagcggacttatggtggctactaaatacgaggtgagcgtctatgcactcaaggatacattgacctctcggcccgctcagggcgtggttacaacgctggaaaacgtgtcccctcctaggagagcacgggtgactgacgcaacagagaccaccatcaccattagctggcgaacaaaaacggaaaccattactggctttcaagtcgatgctgtcccagctaatggacagactccaatccaacggactattaagcccgacgtgcgttcctatacaattactggcctccaaccaggcacagactacaaaatttatctgtatactctcaacgacaacgctaggagctctcctgtggtcattgatgcttctactgctattgacgcgcctagcaatctaagatttctggctacaacccccaacagtctgctcgtctcctggcagcccccacgagcaagaattacagggtacatcatcaaatatgagaagcctggatcacctccccgcgaagttgtcccccggccaaggcccggtgttaccgaagccacaataacaggtttggagcctgggacagaatacactatttacgtcatcgctctgaaaaacaaccaaaaaagtgagcctttgatcggtcgaaaaaagaccgatgagctgccgcagctcgtgactctcccccacccaaaccttcacggtccggagatcctagacgtgccttctacagttcaaaagaccccatttgttacgcaccctggttacgacaccggtaacggtatccagctaccaggtacttctgggcagcaaccttccgttgggcagcagatgatctttgaggaacatggatttcggcgaacaaccccacctacgaccgcaaccccaattcgccataggccacgaccatacccacccaatgtcggagaggaaattcagatcggacacatccctagggaggacgtcgactatcacctctatccccacggccctggtctcaatccaaacgcatcaacagggcaggaagccctctcccaaactacaatctcgtgggctcctttccaagacacaagcgagtacattattagctgccaccccgtgggcactgacgaagaacctttacagtttagggtgccaggcacaagcacatcagccacgctaaccggcctgactcgaggggccacctataatgtcattgtcgaagcattgaaggatcagcaaaggcataaagtgcgcgaggaggtagtgacagtgggcaacagtgtgaatgaaggcctcaaccaacctaccgatgattcttgcttcgatccatataccgtgagccactatgctgtaggcgacgagtgggagaggatgagtgagagcgggttcaaactgctgtgccagtgtctgggattcgggagcggtcactttcgctgcgattcatctaggtggtgtcacgataatggggttaattataagattggcgagaagtgggacagacagggggaaaatggacagatgatgagctgtacctgtctcggcaacggcaagggtgaattcaaatgcgatccgcatgaggcgacatgttacgatgatggtaagacataccatgtgggtgagcagtggcaaaaagaatacctcggagccatttgttcgtgcacctgcttcggcgggcagagaggatggagatgcgacaattgccgcagaccaggtggtgaaccctccccagagggcacaaccggccagagctataatcagtactctcagagataccatcagcggacaaatacaaacgtgaactgccctattgagtgcttcatgccccttgacgtgcaggccgatagggaggatagccgcgaatag

SEQ ID NO: 265643 - DNA, 6891 bp, Artificial Sequence
  derived and/or modified sequence
atgctgcgcgggccaggccctggattactgctgctggccgtgcagtgtctgggaacagctgtcccatccaccggcgcttcgaaatctaagcgacaggcgcagcagatggtgcaacctcaatctcctgtcgccgtgtcacaatcaaagcctggttgctatgataacggaaagcactatcagataaatcaacagtgggaaagaacatatttgggcaatgctttggtgtgcacttgttacggaggatcccgcggatttaactgcgagtccaaaccagaggccgaggagacatgttttgataaatacaccgggaatacttacagggtaggagatacttatgaacgtcccaaagactctatgatctgggactgcacatgcattggcgccggaagaggacgaatttcttgcactattgcgaacagatgccatgagggggggcagagttataagatcggagatacttggcgccggccccacgaaacagggggttacatgctagaatgcgtctgtttgggtaacggaaagggcgaatggacatgcaaacctatagccgaaaaatgttttgatcacgccgccggaaccagctacgtagtgggcgaaacatgggagaagccatatcagggatggatgatggtggattgtacttgtctcggagaaggttctggccggatcacctgcaccagtcgcaacagatgtaatgaccaagatacaagaacatcataccggatcggggatacttggagcaaaaaggacaacagaggtaatctgctacagtgcatctgcacaggaaatggacggggcgagtggaaatgtgagaggcacacttcagtgcagaccacaagctcaggatctgggccctttacagatgtgcgtgcagctgtttaccagcctcagcctcaccctcagccaccaccttacggccactgtgtaaccgattctggtgttgtgtattcggtgggcatgcagtggttgaaaactcagggcaataagcagatgctatgtacatgtctgggaaacggggttagttgtcaggaaacagccgtcacccagacctatggtggaaattcaaacggggagccttgcgtactaccattcacttataacggcagaacattttactcttgcacaacggaaggccgccaagatgggcatctctggtgttccacaaccagtaactatgagcaagaccagaagtatagcttctgtacagaccatacggtgttggttcaaacccgcggcggcaatagcaacggtgccctctgccactttccattcctctacaataatcacaactataccgactgcacatcagaagggcggcgggataatatgaaatggtgcggtactacgcaaaactacgacgcagatcagaagttcgggttctgccctatggcagcgcatgaagagatatgtaccacaaacgagggcgtgatgtatagaataggcgatcaatgggacaaacaacatgacatgggccatatgatgagatgcacctgtgttggcaatggccggggagagtggacctgcatagcatactcccagctcagagaccaatgtattgtagatgatataacatataatgtgaatgatacattccataagaggcatgaggaaggccatatgctcaattgtacctgtttcgggcagggaagggggagatggaaatgcgaccccgttgatcaatgtcaggacagcgaaacgggcaccttttatcagattggggattcatgggagaaatacgtgcatggcgtacgttaccagtgctattgttacgggaggggcataggcgaatggcactgtcaacctctccagacatacccttcatcttccgggccagtggaagtgttcatcacagagacacctagtcagcctaatagtcacccgatacaatggaatgcaccccaaccttcccacatctccaagtacatactccgttggaggcctaagaactcagttggccgctggaaggaagccacaatcccaggacacttgaattcctacactattaaaggcctcaaaccaggcgtggtctacgaagggcagttgatttcaatacaacagtacggccaccaggaagttaccagatttgattttactactacgagcactagcacacccgtgacatctaacacggtcaccggtgaaactacccccttctctcccctggtggctactagcgagtccgtcacggagatcacagcatcatctttcgtcgtttcttgggtcagtgcatcagatacagttagtgggtttcgtgttgaatacgagttatctgaagaaggcgatgaacctcagtacctcgacctcccatccacagccacaagcgtgaacatccccgatctgctacccggccggaagtatatcgtgaacgtttaccagattagcgaggatggtgaacagtcgcttatcttatctacatcgcaaaccacagcacccgatgccccccccgatactaccgtagatcaggtggatgacacgagcattgtggtacgttggtctagaccccaggcaccaattaccggataccgcatcgtatactctccaagtgtcgaaggcagcagcaccgagctcaatcttccagaaactgccaacagtgtaaccctgagtgacctgcaaccgggtgttcagtacaatataacgatctacgcagttgaggagaatcaagagagcacaccagtggtgatccagcaggagacaacaggcaccccccgttctgacacggtcccttctcccagagacctgcagtttgttgaggtcaccgatgttaaggtaaccataatgtggactccacctgaatctgccgtgacgggctatcgtgttgacgtgattccagttaatctaccgggagaacacggacagaggctgcccatatcaaggaacactttcgccgaagtgaccggactaagcccaggcgtgacttattatttcaaagtttttgcagtttcccacggtcgagagtccaaaccattgacagcccagcaaactacgaagctggacgcccccaccaacctccagttcgtgaatgaaactgattctaccgtgctggtaagatggactccaccacgcgctcagatcacaggttacaggctgaccgtgggattgacaaggagaggccaacccagacagtacaatgtaggcccttcagtttcaaaatacccactgaggaacttacagccggcaagtgagtacaccgtaagtctcgtggcaattaaaggcaaccaggaatcccccaaagcaacaggagtgttcacaaccctgcagcccggatcctccattcctccctacaacaccgaagtaacagaaacaacaatcgtaatcacttggacacccgcccctcgaataggcttcaagctgggcgtgcgaccctctcagggcggcgaagccccccgtgaggtgacctcagattctggttctatcgtagtgagcggactgactccgggcgtcgaatatgtctacactatccaggtcctccgagatggccaagagcgagatgctccgatcgtgaataaggtggttactcccctgtctccgccgacaaatcttcaccttgaggccaatcctgacacaggagtgcttaccgtgagctgggaaaggagcaccacccccgatattacaggatacagaataaccacaacacccacaaatgggcagcagggcaactctttagaagaagtagtgcatgccgaccagagctcttgcactttcgataacctctctcctggcctggaatacaatgtgtctgtgtatactgttaaagacgacaaggaatctgttccgattagtgataccattatcccagctgttcccccccccactgacctgcgctttactaacatcgggcccgacactatgcgcgtaacatgggcgccacctccctccatagatttgacaaactttctggttcgctattccccggtgaaaaatgaagaagacgtcgccgagttgtcaatatctccttctgacaatgctgtagtcctcacaaacttactccctggaaccgaatatgtggtcagcgtcagtagcgtgtacgagcagcatgaaagtacccctttacgcggcaggcaaaagaccggcttagactcaccaactggtattgatttcagtgatatcactgcaaactccttcactgtacattggatcgctcccagagcgactatcacaggatataggatccggcatcaccctgagcacttttccggacggccacgggaagacagagtgcctcactcaagaaacagtattacactgacgaacttgacccccggaacagaatatgtcgtatcgatcgtggccctgaatggaagagaggagtcaccattgctcatagggcagcaatctacagtgagtgatgttcccagagatctcgaagttgtggcagctacacctacttctcttttgatctcctgggatgcccccgccgtgacggttcgctactaccggataacttacggagaaacaggaggcaatagccctgtccaggaatttaccgtgccaggtagcaagagtaccgctacgatcagtgggttaaaacccggcgtggattacacaatcacagtttatgcagtcaccggcagaggggactcacctgcttccagcaaaccaatcagcattaattaccggacggagattgacaagccatcacaaatgcaggtgaccgatgttcaagacaattccatcagtgttaagtggttgccttccagctccccagtgacaggctacagagttacaacaactcccaagaacggtccagggcccaccaaaaccaaaactgcaggcccagatcagaccgaaatgaccatcgagggactccaacccacagttgagtacgttgtctccgtttacgctcaaaacccatccggcgaatcacaacccctagtccaaactgctgtgaccaccattcccgcgccgactgaccttaaattcacacaagtcaccccaacgtcgctctctgcacagtggacgcctcctaacgtacagctgactggttacagagtgagggttacaccaaaggaaaagaccggacccatgaaagagatcaatttggctcctgacagttcctctgtggtggtgtcgggtctgatggtggctaccaaatatgaggttagcgtgtacgccctcaaggacacactgacttcccggccagctcagggcgtggttacgactttggaaaatgtatccccacccagacgtgcacgtgtgactgacgcgacagagaccaccatcaccatcagctggcgaactaaaaccgaaacaatcacaggctttcaggtagacgccgtgcccgctaacggacagacacccattcaacgtacaatcaaacccgatgtgagatcatataccatcaccggtctccaaccaggaaccgattacaagatctacctttacacactcaacgataatgcacgtagttccccggtcgttatagatgcaagtaccgcaatcgacgccccatctaatctccggttcctcgccactacccctaactccctgctcgtgtcctggcagccaccacgcgcgagaattaccggatacattatcaagtatgagaaaccgggctcaccaccaagagaagtagtgccccggccacgccctggagttactgaagcaacaatcacaggcttggaacccggcacggaatacactatttacgttatcgcactcaagaataaccagaaatcagaacctcttattggtagaaagaagaccgacgaactgccacagctcgtgactctgccgcatcccaacctccacggtcccgagattctggatgtgccttctaccgtccagaagacaccctttgttacacatcccggctacgacacagggaatggtatccaactgccagggacatctggccagcaaccatcagtgggccagcagatgatattcgaagaacatggattcagacgtacaactccacccactactgccactcccatcagacatcgaccaaggccctatcctcccaatgttggcgaagagattcaaatcggtcatatcccaagagaggatgtcgactatcacctataccctcacggaccaggcctaaatcctaacgctagcaccggacaggaggccctgtcccagacaacaattagctgggcacccttccaagatacttctgaatatatcatctcatgtcatcccgttgggactgatgaggagccgttacaatttcgcgttcccgggacatccaccagcgcaactctgacggggctaacaaggggagcaacctacaatgttattgtcgaggcattaaaggaccagcagagacacaaagtgcgcgaagaggtggtcacagtgggcaactccgtcaatgagggtctcaatcagccgaccgacgactcatgttttgatccttatacagttagtcactacgctgtgggggatgagtgggaaaggatgagtgaaagcggctttaagctactatgtcaatgcctaggatttggatctgggcacttcagatgtgatagttcacgctggtgtcacgataacggggtaaattataagattggggaaaagtgggatagacagggggagaatggacagatgatgtcatgtacgtgtttaggaaacggaaagggcgaattcaaatgtgacccccacgaagcaacctgctacgatgacggaaaaacctaccacgtgggagaacaatggcaaaaagagtatttaggcgcaatctgctcatgtacttgttttggcggccagcggggttggcgttgtgacaactgtcgccgtccagggggcgaaccctcacctgaaggtaccactggccagtcctataaccagtatagccagagataccaccagcgcacaaataccaatgttaactgccctattgaatgttttatgccactagacgtacaggctgatagagaggacagccgagagtag

SEQ ID NO: 265644 - RNA, 6891 nt, Artificial Sequence
  derived and/or modified sequence
auguuaagagggccuggaccugggcugcuccuguuggcugugcagugccuggggaccgccgucccuagcacgggcgccucaaagagcaagaggcaagcucagcagaugguacaaccacaguccccugucgcaguaucccagaguaagcccggaugcuacgauaacgggaaacacuaccaaaucaaccagcagugggagaggaccuaccucggaaacgcacuggucugcacaugcuacgggggaaguaggggcuucaacugugagagcaaaccggaagccgaggagacguguuucgauaaauauacaggcaacacauaccgcgucggagacaccuaugaacgcccaaaggacucuaugaucugggacuguacuuguaucggagcgggcagagggaggauaagcugcacuaucgcuaaccggugccaugagggcggucagucuuacaagauuggcgacacguggcggagaccucacgagacuggggguuacaugcucgagugugucugucugggaaacggcaaaggugaauggaccugcaaaccuaucgccgaaaaaugcuuugaccaugccgcagguaccucauauguggucggugagacgugggaaaagccuuaucaaggauggaugaugguagauuguaccugucuuggcgaagguucugggaggauuacuugcacuucacgcaacagaugcaaugaccaggacacaagaacaaguuaucgcaucggagacacguggagcaaaaaggacaaucgcggaaacuugcugcaguguaucugcacgggcaauggccgcggugaauggaaaugcgaacggcauaccagcguacaaaccaccucaucggggagcggcccuuucacagacguacgggccgcaguguaucagccucagccccauccccagccaccuccguauggucacugcguuaccgauagcgggguggucuacuccguagggaugcaguggcugaagacccagggcaacaaacagaugcucuguacuugccuagggaauggcguuucgugccaggagacagcagugacgcagacuuacggugggaacagcaacggagagccguguguccuucccuucacauacaaugggaggaccuucuacaguuguaccacggaagggagacaggauggccaccugugguguagcacuaccuccaauuaugagcaagaucagaaauauaguuuuugcaccgaccacaccgucuugguccagacacgcggcgguaauucaaauggagcccugugccauuuccccuuucucuacaauaaccacaauuauacagacuguacaucugagggucggcgagacaacaugaaauggugcggcacgacgcagaacuaugaugcugaucagaaguuuggauuuugucccauggcggcacaugaggaaaucugcacaacuaacgagggugugauguacagaaucggcgaccagugggauaagcagcacgauaugggccacaugaugcgcuguacuugcguaggcaauggacggggagaauggaccugcaucgcguauucacaacuccgcgaccaauguauuguggacgacaucacauacaacgugaaugauacauuucauaagaggcaugaggagggucacaugcugaacuguaccuguuuuggacagggccgugggcgcuggaaaugcgaucccguggaccagugucaggacuccgagaccgggacauuuuaucagaucggugacagcugggaaaaguacguccacggaguaagauaucaaugcuacuguuacgggagagguauuggcgaguggcacugucagcccuugcagacauacccuucaucuagcgguccuguggaaguguucauuacagagacgcccucccaacccaacucucacccuauccaauggaacgccccucagccuucccauaucagcaaguacauucugcgguggagaccuaagaauaguguagggcgguggaaagaagccaccauucccggacaccugaauucauacacaauuaagggucugaagcccgguguuguguacgaaggucaacuuauuucuauccaacaguacggucaucaggaagucacccgguuugacuucacuaccacaucaaccuccacuccggugaccucuaacacugugacuggagaaaccacaccuuuuucuccccugguugccacaucugaaucagucacagagauaacagcaucaagcuuuguggugagcuggguguccgcuagugacacuguuucaggcuuucggguggaguacgaacuguccgaagaaggagacgagccacaguaucuggaccugccgucgacagcuaccucugugaauauccccgaccuucuaccaggccguaaauauauuguuaacguguaccagaucagugaggacggugagcagucccuuaucuuaucuacaucgcaaaccacagcacccgaugccccccccgauacuaccguagaucagguggaugacacgagcauugugguacguuggucuagaccccaggcaccaauuaccggauaccgcaucguauacucuccaagugucgaaggcagcagcaccgagcucaaucuuccagaaacugccaacaguguaacccugagugaccugcaaccggguguucaguacaauauaacgaucuacgcaguugaggagaaucaagagagcacaccaguggugauccagcaggagacaacaggcacccccagaucagacaccgugccaagcccacgggaccugcaguuuguggaagugaccgacgugaaagugaccaucauguggacucccccagagucagcaguaacuggcuaucgagucgacgucauacccguuaaucugccuggcgagcacggccagagacucccuaucucacgcaacaccuuugcugagguaacgggacuguccccuggcgucacauacuacuuuaagguguucgccgugucccacgggagagagagcaaaccccucacggcucagcaaacuacuaaacuggacgcuccaacgaaccuucaguucgucaacgaaaccgacucuacuguccugguuagauggacccccccccgggcccaaauaaccggguaucggcugaccgucggucugacucgacgcggacaacccagacaguauaacgucgggccgagugugucuaaguaucccuuacgcaaucuccagcccgccucagaguauacagucaguuuagucgcaauuaaaggcaaccaggagucccccaaagcaacgggaguguucacaacacugcaacccggcucuuccaucccucccuacaacaccgaggugacggagaccaccaucgugauaacauggacuccugcacccaggaucggcuucaaacucgggguccgacccucgcaaggaggagaggccccuagagaagucacuagcgacaguggcucuaucgugguuuccggccugacuccggguguggaguauguauacacaauacagguauuacgagacggccaggaaagggacgcacccaucgucaacaaagugguaacccccuuguccccaccuaccaaucugcacuuggaggcuaauccggacacaggcguccuuacagucagcugggagcgguccacaacgcccgacaucacgggauaucggauuacuaccacuccuacgaacggccagcagggaaacucacuagaggaggugguucaugccgaccagagcucaugcacguucgacaaccuuagucccggacuugaauacaacguguccguauacacagugaaggaugacaaggaaagcgugcccauuagugauacaauaauucccgcuguuccaccaccaacagaccugagauucacuaacaucggcccugacaccaugcgggucaccugggcucccccccccuccauugaucugaccaauuuccugguacgauacucccccguaaaaaaugaggaggacguggcugaacuaucaauuucccccucagauaacgcaguagugcucacuaaucuguuaccgggcacagaguauguuguaucaguuagcaguguuuacgaacagcaugaaucuacgccgcucagggggcgacagaagaccggccuugauucccccacugggauugauuucucagacauaacagccaauucauuuacaguacacuggaucgcgccaagagcaacgaucaccggauaucggauucgucaccacccagaacacuuuagcgggcgaccccgggaagauagaguuccacacaguaggaacagcauuacccugacaaaucuuaccccuggaacagaguaugugguauccaucguugcacugaacgggcgagaagagucgccucugcuaaucgggcagcagucuacagucagcgaugugccucgugaccuggaaguuguggccgcuacuccuaccucccuccugaucuccugggaugccccagcugugacuguacguuacuaccgaaucaccuauggugaaacaggagguaacucucccgugcaagaauucaccgugcccgggucuaaaagcacagcaacgauaucgggucucaaaccaggcguggauuauacgauaacuguguaugcagucacaggccgaggugacagcccugccuccucuaagcccaucaguauuaacuaccgcaccgaaaucgauaagccgagccaaaugcagguaacagaugugcaagacaacucuauuucugucaaguggcugccuucuucuuccccugucacaggauauagagugacaacaacaccuaagaacggccccgggccaacuaagacaaagacugcuggccccgaccagaccgagaugaccauugagggacugcagccgacgguagaauauguggugucaguuuaugcccagaauccuuccggagagucccagccccuuguccaaaccgccgugaccacaaucccugcccccacugauuugaaauuuacacaggugacgccaacaagucugucugcccaguggacgccgccgaauguacagcucacaggcuauaggguacgggucacaccuaaagagaaaaccggccccaugaaagaaauuaaccuugcucccgacucuucaucagucguggucagcggacuuaugguggcuacuaaauacgaggugagcgucuaugcacucaaggauacauugaccucucggcccgcucagggcgugguuacaacgcuggaaaacguguccccuccuaggagagcacgggugacugacgcaacagagaccaccaucaccauuagcuggcgaacaaaaacggaaaccauuacuggcuuucaagucgaugcugucccagcuaauggacagacuccaauccaacggacuauuaagcccgacgugcguuccuauacaauuacuggccuccaaccaggcacagacuacaaaauuuaucuguauacucucaacgacaacgcuaggagcucuccuguggucauugaugcuucuacugcuauugacgcgccuagcaaucuaagauuucuggcuacaacccccaacagucugcucgucuccuggcagcccccacgagcaagaauuacaggguacaucaucaaauaugagaagccuggaucaccuccccgcgaaguugucccccggccaaggcccgguguuaccgaagccacaauaacagguuuggagccugggacagaauacacuauuuacgucaucgcucugaaaaacaaccaaaaaagugagccuuugaucggucgaaaaaagaccgaugagcugccgcagcucgugacucucccccacccaaaccuucacgguccggagauccuagacgugccuucuacaguucaaaagaccccauuuguuacgcacccugguuacgacaccgguaacgguauccagcuaccagguacuucugggcagcaaccuuccguugggcagcagaugaucuuugaggaacauggauuucggcgaacaaccccaccuacgaccgcaaccccaauucgccauaggccacgaccauacccacccaaugucggagaggaaauucagaucggacacaucccuagggaggacgucgacuaucaccucuauccccacggcccuggucucaauccaaacgcaucaacagggcaggaagcccucucccaaacuacaaucucgugggcuccuuuccaagacacaagcgaguacauuauuagcugccaccccgugggcacugacgaagaaccuuuacaguuuagggugccaggcacaagcacaucagccacgcuaaccggccugacucgaggggccaccuauaaugucauugucgaagcauugaaggaucagcaaaggcauaaagugcgcgaggagguagugacagugggcaacagugugaaugaaggccucaaccaaccuaccgaugauucuugcuucgauccauauaccgugagccacuaugcuguaggcgacgagugggagaggaugagugagagcggguucaaacugcugugccagugucugggauucgggagcggucacuuucgcugcgauucaucuagguggugucacgauaaugggguuaauuauaagauuggcgagaagugggacagacagggggaaaauggacagaugaugagcuguaccugucucggcaacggcaagggugaauucaaaugcgauccgcaugaggcgacauguuacgaugaugguaagacauaccaugugggugagcaguggcaaaaagaauaccucggagccauuuguucgugcaccugcuucggcgggcagagaggauggagaugcgacaauugccgcagaccagguggugaacccuccccagagggcacaaccggccagagcuauaaucaguacucucagagauaccaucagcggacaaauacaaacgugaacugcccuauugagugcuucaugccccuugacgugcaggccgauagggaggauagccgcgaauag

SEQ ID NO: 265645 - RNA, 6891 nt, Artificial Sequence
  derived and/or modified sequence
augcugcgcgggccaggcccuggauuacugcugcuggccgugcagugucugggaacagcugucccauccaccggcgcuucgaaaucuaagcgacaggcgcagcagauggugcaaccucaaucuccugucgccgugucacaaucaaagccugguugcuaugauaacggaaagcacuaucagauaaaucaacagugggaaagaacauauuugggcaaugcuuuggugugcacuuguuacggaggaucccgcggauuuaacugcgaguccaaaccagaggccgaggagacauguuuugauaaauacaccgggaauacuuacaggguaggagauacuuaugaacgucccaaagacucuaugaucugggacugcacaugcauuggcgccggaagaggacgaauuucuugcacuauugcgaacagaugccaugagggggggcagaguuauaagaucggagauacuuggcgccggccccacgaaacaggggguuacaugcuagaaugcgucuguuuggguaacggaaagggcgaauggacaugcaaaccuauagccgaaaaauguuuugaucacgccgccggaaccagcuacguagugggcgaaacaugggagaagccauaucagggauggaugaugguggauuguacuugucucggagaagguucuggccggaucaccugcaccagucgcaacagauguaaugaccaagauacaagaacaucauaccggaucggggauacuuggagcaaaaaggacaacagagguaaucugcuacagugcaucugcacaggaaauggacggggcgaguggaaaugugagaggcacacuucagugcagaccacaagcucaggaucugggcccuuuacagaugugcgugcagcuguuuaccagccucagccucacccucagccaccaccuuacggccacuguguaaccgauucugguguuguguauucggugggcaugcagugguugaaaacucagggcaauaagcagaugcuauguacaugucugggaaacgggguuaguugucaggaaacagccgucacccagaccuaugguggaaauucaaacggggagccuugcguacuaccauucacuuauaacggcagaacauuuuacucuugcacaacggaaggccgccaagaugggcaucucugguguuccacaaccaguaacuaugagcaagaccagaaguauagcuucuguacagaccauacgguguugguucaaacccgcggcggcaauagcaacggugcccucugccacuuuccauuccucuacaauaaucacaacuauaccgacugcacaucagaagggcggcgggauaauaugaaauggugcgguacuacgcaaaacuacgacgcagaucagaaguucggguucugcccuauggcagcgcaugaagagauauguaccacaaacgagggcgugauguauagaauaggcgaucaaugggacaaacaacaugacaugggccauaugaugagaugcaccuguguuggcaauggccggggagaguggaccugcauagcauacucccagcucagagaccaauguauuguagaugauauaacauauaaugugaaugauacauuccauaagaggcaugaggaaggccauaugcucaauuguaccuguuucgggcagggaagggggagauggaaaugcgaccccguugaucaaugucaggacagcgaaacgggcaccuuuuaucagauuggggauucaugggagaaauacgugcauggcguacguuaccagugcuauuguuacgggaggggcauaggcgaauggcacugucaaccucuccagacauacccuucaucuuccgggccaguggaaguguucaucacagagacaccuagucagccuaauagucacccgauacaauggaaugcaccccaaccuucccacaucuccaaguacauacuccguuggaggccuaagaacucaguuggccgcuggaaggaagccacaaucccaggacacuugaauuccuacacuauuaaaggccucaaaccaggcguggucuacgaagggcaguugauuucaauacaacaguacggccaccaggaaguuaccagauuugauuuuacuacuacgagcacuagcacacccgugacaucuaacacggucaccggugaaacuacccccuucucuccccugguggcuacuagcgaguccgucacggagaucacagcaucaucuuucgucguuucuugggucagugcaucagauacaguuaguggguuucguguugaauacgaguuaucugaagaaggcgaugaaccucaguaccucgaccucccauccacagccacaagcgugaacauccccgaucugcuacccggccggaaguauaucgugaacguuuaccagauuagcgaggauggugaacagucgcuuaucuuaucuacaucgcaaaccacagcacccgaugccccccccgauacuaccguagaucagguggaugacacgagcauugugguacguuggucuagaccccaggcaccaauuaccggauaccgcaucguauacucuccaagugucgaaggcagcagcaccgagcucaaucuuccagaaacugccaacaguguaacccugagugaccugcaaccggguguucaguacaauauaacgaucuacgcaguugaggagaaucaagagagcacaccaguggugauccagcaggagacaacaggcaccccccguucugacacggucccuucucccagagaccugcaguuuguugaggucaccgauguuaagguaaccauaauguggacuccaccugaaucugccgugacgggcuaucguguugacgugauuccaguuaaucuaccgggagaacacggacagaggcugcccauaucaaggaacacuuucgccgaagugaccggacuaagcccaggcgugacuuauuauuucaaaguuuuugcaguuucccacggucgagaguccaaaccauugacagcccagcaaacuacgaagcuggacgcccccaccaaccuccaguucgugaaugaaacugauucuaccgugcugguaagauggacuccaccacgcgcucagaucacagguuacaggcugaccgugggauugacaaggagaggccaacccagacaguacaauguaggcccuucaguuucaaaauacccacugaggaacuuacagccggcaagugaguacaccguaagucucguggcaauuaaaggcaaccaggaaucccccaaagcaacaggaguguucacaacccugcagcccggauccuccauuccucccuacaacaccgaaguaacagaaacaacaaucguaaucacuuggacacccgccccucgaauaggcuucaagcugggcgugcgacccucucagggcggcgaagccccccgugaggugaccucagauucugguucuaucguagugagcggacugacuccgggcgucgaauaugucuacacuauccagguccuccgagauggccaagagcgagaugcuccgaucgugaauaaggugguuacuccccugucuccgccgacaaaucuucaccuugaggccaauccugacacaggagugcuuaccgugagcugggaaaggagcaccacccccgauauuacaggauacagaauaaccacaacacccacaaaugggcagcagggcaacucuuuagaagaaguagugcaugccgaccagagcucuugcacuuucgauaaccucucuccuggccuggaauacaaugugucuguguauacuguuaaagacgacaaggaaucuguuccgauuagugauaccauuaucccagcuguucccccccccacugaccugcgcuuuacuaacaucgggcccgacacuaugcgcguaacaugggcgccaccucccuccauagauuugacaaacuuucugguucgcuauuccccggugaaaaaugaagaagacgucgccgaguugucaauaucuccuucugacaaugcuguaguccucacaaacuuacucccuggaaccgaauauguggucagcgucaguagcguguacgagcagcaugaaaguaccccuuuacgcggcaggcaaaagaccggcuuagacucaccaacugguauugauuucagugauaucacugcaaacuccuucacuguacauuggaucgcucccagagcgacuaucacaggauauaggauccggcaucacccugagcacuuuuccggacggccacgggaagacagagugccucacucaagaaacaguauuacacugacgaacuugacccccggaacagaauaugucguaucgaucguggcccugaauggaagagaggagucaccauugcucauagggcagcaaucuacagugagugauguucccagagaucucgaaguuguggcagcuacaccuacuucucuuuugaucuccugggaugcccccgccgugacgguucgcuacuaccggauaacuuacggagaaacaggaggcaauagcccuguccaggaauuuaccgugccagguagcaagaguaccgcuacgaucaguggguuaaaacccggcguggauuacacaaucacaguuuaugcagucaccggcagaggggacucaccugcuuccagcaaaccaaucagcauuaauuaccggacggagauugacaagccaucacaaaugcaggugaccgauguucaagacaauuccaucaguguuaagugguugccuuccagcuccccagugacaggcuacagaguuacaacaacucccaagaacgguccagggcccaccaaaaccaaaacugcaggcccagaucagaccgaaaugaccaucgagggacuccaacccacaguugaguacguugucuccguuuacgcucaaaacccauccggcgaaucacaaccccuaguccaaacugcugugaccaccauucccgcgccgacugaccuuaaauucacacaagucaccccaacgucgcucucugcacaguggacgccuccuaacguacagcugacugguuacagagugaggguuacaccaaaggaaaagaccggacccaugaaagagaucaauuuggcuccugacaguuccucugugguggugucgggucugaugguggcuaccaaauaugagguuagcguguacgcccucaaggacacacugacuucccggccagcucagggcgugguuacgacuuuggaaaauguauccccacccagacgugcacgugugacugacgcgacagagaccaccaucaccaucagcuggcgaacuaaaaccgaaacaaucacaggcuuucagguagacgccgugcccgcuaacggacagacacccauucaacguacaaucaaacccgaugugagaucauauaccaucaccggucuccaaccaggaaccgauuacaagaucuaccuuuacacacucaacgauaaugcacguaguuccccggucguuauagaugcaaguaccgcaaucgacgccccaucuaaucuccgguuccucgccacuaccccuaacucccugcucguguccuggcagccaccacgcgcgagaauuaccggauacauuaucaaguaugagaaaccgggcucaccaccaagagaaguagugccccggccacgcccuggaguuacugaagcaacaaucacaggcuuggaacccggcacggaauacacuauuuacguuaucgcacucaagaauaaccagaaaucagaaccucuuauugguagaaagaagaccgacgaacugccacagcucgugacucugccgcaucccaaccuccacggucccgagauucuggaugugccuucuaccguccagaagacacccuuuguuacacaucccggcuacgacacagggaaugguauccaacugccagggacaucuggccagcaaccaucagugggccagcagaugauauucgaagaacauggauucagacguacaacuccacccacuacugccacucccaucagacaucgaccaaggcccuauccucccaauguuggcgaagagauucaaaucggucauaucccaagagaggaugucgacuaucaccuauacccucacggaccaggccuaaauccuaacgcuagcaccggacaggaggcccugucccagacaacaauuagcugggcacccuuccaagauacuucugaauauaucaucucaugucaucccguugggacugaugaggagccguuacaauuucgcguucccgggacauccaccagcgcaacucugacggggcuaacaaggggagcaaccuacaauguuauugucgaggcauuaaaggaccagcagagacacaaagugcgcgaagagguggucacagugggcaacuccgucaaugagggucucaaucagccgaccgacgacucauguuuugauccuuauacaguuagucacuacgcugugggggaugagugggaaaggaugagugaaagcggcuuuaagcuacuaugucaaugccuaggauuuggaucugggcacuucagaugugauaguucacgcuggugucacgauaacgggguaaauuauaagauuggggaaaagugggauagacagggggagaauggacagaugaugucauguacguguuuaggaaacggaaagggcgaauucaaaugugacccccacgaagcaaccugcuacgaugacggaaaaaccuaccacgugggagaacaauggcaaaaagaguauuuaggcgcaaucugcucauguacuuguuuuggcggccagcgggguuggcguugugacaacugucgccguccagggggcgaacccucaccugaagguaccacuggccaguccuauaaccaguauagccagagauaccaccagcgcacaaauaccaauguuaacugcccuauugaauguuuuaugccacuagacguacaggcugauagagaggacagccgagaguag

SEQ ID NO: 265646 - protein, 2330 aa, Artificial Sequence
  derived and/or modified sequence
MLRGPGPGLLLLAVQCLGTAVPSTGASKSKRQAQQMVQPQSPVAVSQSKPGCYDNGKHYQINQQWERTYLGNALVCTCYGGSRGFNCESKPEAEETCFDKYTGNTYRVGDTYERPKDSMIWDCTCIGAGRGRISCTIANRCHEGGQSYKIGDTWRRPHETGGYMLECVCLGNGKGEWTCKPIAEKCFDHAAGTSYVVGETWEKPYQGWMMVDCTCLGEGSGRITCTSRNRCNDQDTRTSYRIGDTWSKKDNRGNLLQCICTGNGRGEWKCERHTSVQTTSSGSGPFTDVRAAVYQPQPHPQPPPYGHCVTDSGVVYSVGMQWLKTQGNKQMLCTCLGNGVSCQETAVTQTYGGNSNGEPCVLPFTYNGRTFYSCTTEGRQDGHLWCSTTSNYEQDQKYSFCTDHTVLVQTRGGNSNGALCHFPFLYNNHNYTDCTSEGRRDNMKWCGTTQNYDADQKFGFCPMAAHEEICTTNEGVMYRIGDQWDKQHDMGHMMRCTCVGNGRGEWTCIAYSQLRDQCIVDDITYNVNDTFHKRHEEGHMLNCTCFGQGRGRWKCDPVDQCQDSETGTFYQIGDSWEKYVHGVRYQCYCYGRGIGEWHCQPLQTYPSSSGPVEVFITETPSQPNSHPIQWNAPQPSHISKYILRWRPKNSVGRWKEATIPGHLNSYTIKGLKPGVVYEGQLISIQQYGHQEVTRFDFTTTSTSTPVTSNTVTGETTPFSPLVATSESVTEITASSFVVSWVSASDTVSGFRVEYELSEEGDEPQYLDLPSTATSVNIPDLLPGRKYIVNVYQISEDGEQSLILSTSQTTAPDAPPDTTVDQVDDTSIVVRWSRPQAPITGYRIVYSPSVEGSSTELNLPETANSVTLSDLQPGVQYNITIYAVEENQESTPVVIQQETTGTPRSDTVPSPRDLQFVEVTDVKVTIMWTPPESAVTGYRVDVIPVNLPGEHGQRLPISRNTFAEVTGLSPGVTYYFKVFAVSHGRESKPLTAQQTTKLDAPTNLQFVNETDSTVLVRWTPPRAQITGYRLTVGLTRRGQPRQYNVGPSVSKYPLRNLQPASEYTVSLVAIKGNQESPKATGVFTTLQPGSSIPPYNTEVTETTIVITWTPAPRIGFKLGVRPSQGGEAPREVTSDSGSIVVSGLTPGVEYVYTIQVLRDGQERDAPIVNKVVTPLSPPTNLHLEANPDTGVLTVSWERSTTPDITGYRITTTPTNGQQGNSLEEVVHADQSSCTFDNLSPGLEYNVSVYTVKDDKESVPISDTIIPAVPPPTDLRFTNIGPDTMRVTWAPPPSIDLTNFLVRYSPVKNEEDVAELSISPSDNAVVLTNLLPGTEYVVSVSSVYEQHESTPLRGRQKTGLDSPTGIDFSDITANSFTVHWIAPRATITGYRIRHHPEHFSGRPREDRVPHSRNSITLTNLTPGTEYVVSIVALNGREESPLLIGQQSTVSDVPRDLEVVAATPTSLLISWDAPAVTVRYYRITYGETGGNSPVQEFTVPGSKSTATISGLKPGVDYTITVYAVTGRGDSPASSKPISINYRTEIDKPSQMQVTDVQDNSISVKWLPSSSPVTGYRVTTTPKNGPGPTKTKTAGPDQTEMTIEGLQPTVEYVVSVYAQNPSGESQPLVQTAVTNIDRPKGLAFTDVDVDSIKIAWESPQGQVSRYRVTYSSPEDGIHELFPAPDGEEDTAELQGLRPGSEYTVSVVALHDDMESQPLIGTQSTAIPAPTDLKFTQVTPTSLSAQWTPPNVQLTGYRVRVTPKEKTGPMKEINLAPDSSSVVVSGLMVATKYEVSVYALKDTLTSRPAQGVVTTLENVSPPRRARVTDATETTITISWRTKTETITGFQVDAVPANGQTPIQRTIKPDVRSYTITGLQPGTDYKIYLYTLNDNARSSPVVIDASTAIDAPSNLRFLATTPNSLLVSWQPPRARITGYIIKYEKPGSPPREVVPRPRPGVTEATITGLEPGTEYTIYVIALKNNQKSEPLIGRKKTVQKTPFVTHPGYDTGNGIQLPGTSGQQPSVGQQMIFEEHGFRRTTPPTTATPIRHRPRPYPPNVGQEALSQTTISWAPFQDTSEYIISCHPVGTDEEPLQFRVPGTSTSATLTGLTRGATYNVIVEALKDQQRHKVREEVVTVGNSVNEGLNQPTDDSCFDPYTVSHYAVGDEWERMSESGFKLLCQCLGFGSGHFRCDSSRWCHDNGVNYKIGEKWDRQGENGQMMSCTCLGNGKGEFKCDPHEATCYDDGKTYHVGEQWQKEYLGAICSCTCFGGQRGWRCDNCRRPGGEPSPEGTTGQSYNQYSQRYHQRTNTNVNCPIECFMPLDVQADREDSRE

SEQ ID NO: 265647 - DNA, 6993 bp, Artificial Sequence
  derived and/or modified sequence
atgctgagaggccccggccccggcctgctgctgctggccgtgcagtgcctgggcaccgccgtgcccagcaccggcgccagcaagagcaagagacaggcccagcagatggtgcagccccagagccccgtggccgtgagccagagcaagcccggctgctacgacaacggcaagcactaccagatcaaccagcagtgggagagaacctacctgggcaacgccctggtgtgcacctgctacggcggcagcagaggcttcaactgcgagagcaagcccgaggccgaggagacctgcttcgacaagtacaccggcaacacctacagagtgggcgacacctacgagagacccaaggacagcatgatctgggactgcacctgcatcggcgccggcagaggcagaatcagctgcaccatcgccaacagatgccacgagggcggccagagctacaagatcggcgacacctggagaagaccccacgagaccggcggctacatgctggagtgcgtgtgcctgggcaacggcaagggcgagtggacctgcaagcccatcgccgagaagtgcttcgaccacgccgccggcaccagctacgtggtgggcgagacctgggagaagccctaccagggctggatgatggtggactgcacctgcctgggcgagggcagcggcagaatcacctgcaccagcagaaacagatgcaacgaccaggacaccagaaccagctacagaatcggcgacacctggagcaagaaggacaacagaggcaacctgctgcagtgcatctgcaccggcaacggcagaggcgagtggaagtgcgagagacacaccagcgtgcagaccaccagcagcggcagcggccccttcaccgacgtgagagccgccgtgtaccagccccagccccacccccagccccccccctacggccactgcgtgaccgacagcggcgtggtgtacagcgtgggcatgcagtggctgaagacccagggcaacaagcagatgctgtgcacctgcctgggcaacggcgtgagctgccaggagaccgccgtgacccagacctacggcggcaacagcaacggcgagccctgcgtgctgcccttcacctacaacggcagaaccttctacagctgcaccaccgagggcagacaggacggccacctgtggtgcagcaccaccagcaactacgagcaggaccagaagtacagcttctgcaccgaccacaccgtgctggtgcagaccagaggcggcaacagcaacggcgccctgtgccacttccccttcctgtacaacaaccacaactacaccgactgcaccagcgagggcagaagagacaacatgaagtggtgcggcaccacccagaactacgacgccgaccagaagttcggcttctgccccatggccgcccacgaggagatctgcaccaccaacgagggcgtgatgtacagaatcggcgaccagtgggacaagcagcacgacatgggccacatgatgagatgcacctgcgtgggcaacggcagaggcgagtggacctgcatcgcctacagccagctgagagaccagtgcatcgtggacgacatcacctacaacgtgaacgacaccttccacaagagacacgaggagggccacatgctgaactgcacctgcttcggccagggcagaggcagatggaagtgcgaccccgtggaccagtgccaggacagcgagaccggcaccttctaccagatcggcgacagctgggagaagtacgtgcacggcgtgagataccagtgctactgctacggcagaggcatcggcgagtggcactgccagcccctgcagacctaccccagcagcagcggccccgtggaggtgttcatcaccgagacccccagccagcccaacagccaccccatccagtggaacgccccccagcccagccacatcagcaagtacatcctgagatggagacccaagaacagcgtgggcagatggaaggaggccaccatccccggccacctgaacagctacaccatcaagggcctgaagcccggcgtggtgtacgagggccagctgatcagcatccagcagtacggccaccaggaggtgaccagattcgacttcaccaccaccagcaccagcacccccgtgaccagcaacaccgtgaccggcgagaccacccccttcagccccctggtggccaccagcgagagcgtgaccgagatcaccgccagcagcttcgtggtgagctgggtgagcgccagcgacaccgtgagcggcttcagagtggagtacgagctgagcgaggagggcgacgagccccagtacctggacctgcccagcaccgccaccagcgtgaacatccccgacctgctgcccggcagaaagtacatcgtgaacgtgtaccagatcagcgaggacggcgagcagagcctgatcctgagcaccagccagaccaccgcccccgacgccccccccgacaccaccgtggaccaggtggacgacaccagcatcgtggtgagatggagcagaccccaggcccccatcaccggctacagaatcgtgtacagccccagcgtggagggcagcagcaccgagctgaacctgcccgagaccgccaacagcgtgaccctgagcgacctgcagcccggcgtgcagtacaacatcaccatctacgccgtggaggagaaccaggagagcacccccgtggtgatccagcaggagaccaccggcacccccagaagcgacaccgtgcccagccccagagacctgcagttcgtggaggtgaccgacgtgaaggtgaccatcatgtggaccccccccgagagcgccgtgaccggctacagagtggacgtgatccccgtgaacctgcccggcgagcacggccagagactgcccatcagcagaaacaccttcgccgaggtgaccggcctgagccccggcgtgacctactacttcaaggtgttcgccgtgagccacggcagagagagcaagcccctgaccgcccagcagaccaccaagctggacgcccccaccaacctgcagttcgtgaacgagaccgacagcaccgtgctggtgagatggaccccccccagagcccagatcaccggctacagactgaccgtgggcctgaccagaagaggccagcccagacagtacaacgtgggccccagcgtgagcaagtaccccctgagaaacctgcagcccgccagcgagtacaccgtgagcctggtggccatcaagggcaaccaggagagccccaaggccaccggcgtgttcaccaccctgcagcccggcagcagcatccccccctacaacaccgaggtgaccgagaccaccatcgtgatcacctggacccccgcccccagaatcggcttcaagctgggcgtgagacccagccagggcggcgaggcccccagagaggtgaccagcgacagcggcagcatcgtggtgagcggcctgacccccggcgtggagtacgtgtacaccatccaggtgctgagagacggccaggagagagacgcccccatcgtgaacaaggtggtgacccccctgagcccccccaccaacctgcacctggaggccaaccccgacaccggcgtgctgaccgtgagctgggagagaagcaccacccccgacatcaccggctacagaatcaccaccacccccaccaacggccagcagggcaacagcctggaggaggtggtgcacgccgaccagagcagctgcaccttcgacaacctgagccccggcctggagtacaacgtgagcgtgtacaccgtgaaggacgacaaggagagcgtgcccatcagcgacaccatcatccccgccgtgcccccccccaccgacctgagattcaccaacatcggccccgacaccatgagagtgacctgggcccccccccccagcatcgacctgaccaacttcctggtgagatacagccccgtgaagaacgaggaggacgtggccgagctgagcatcagccccagcgacaacgccgtggtgctgaccaacctgctgcccggcaccgagtacgtggtgagcgtgagcagcgtgtacgagcagcacgagagcacccccctgagaggcagacagaagaccggcctggacagccccaccggcatcgacttcagcgacatcaccgccaacagcttcaccgtgcactggatcgcccccagagccaccatcaccggctacagaatcagacaccaccccgagcacttcagcggcagacccagagaggacagagtgccccacagcagaaacagcatcaccctgaccaacctgacccccggcaccgagtacgtggtgagcatcgtggccctgaacggcagagaggagagccccctgctgatcggccagcagagcaccgtgagcgacgtgcccagagacctggaggtggtggccgccacccccaccagcctgctgatcagctgggacgcccccgccgtgaccgtgagatactacagaatcacctacggcgagaccggcggcaacagccccgtgcaggagttcaccgtgcccggcagcaagagcaccgccaccatcagcggcctgaagcccggcgtggactacaccatcaccgtgtacgccgtgaccggcagaggcgacagccccgccagcagcaagcccatcagcatcaactacagaaccgagatcgacaagcccagccagatgcaggtgaccgacgtgcaggacaacagcatcagcgtgaagtggctgcccagcagcagccccgtgaccggctacagagtgaccaccacccccaagaacggccccggccccaccaagaccaagaccgccggccccgaccagaccgagatgaccatcgagggcctgcagcccaccgtggagtacgtggtgagcgtgtacgcccagaaccccagcggcgagagccagcccctggtgcagaccgccgtgaccaacatcgacagacccaagggcctggccttcaccgacgtggacgtggacagcatcaagatcgcctgggagagcccccagggccaggtgagcagatacagagtgacctacagcagccccgaggacggcatccacgagctgttccccgcccccgacggcgaggaggacaccgccgagctgcagggcctgagacccggcagcgagtacaccgtgagcgtggtggccctgcacgacgacatggagagccagcccctgatcggcacccagagcaccgccatccccgcccccaccgacctgaagttcacccaggtgacccccaccagcctgagcgcccagtggaccccccccaacgtgcagctgaccggctacagagtgagagtgacccccaaggagaagaccggccccatgaaggagatcaacctggcccccgacagcagcagcgtggtggtgagcggcctgatggtggccaccaagtacgaggtgagcgtgtacgccctgaaggacaccctgaccagcagacccgcccagggcgtggtgaccaccctggagaacgtgagcccccccagaagagccagagtgaccgacgccaccgagaccaccatcaccatcagctggagaaccaagaccgagaccatcaccggcttccaggtggacgccgtgcccgccaacggccagacccccatccagagaaccatcaagcccgacgtgagaagctacaccatcaccggcctgcagcccggcaccgactacaagatctacctgtacaccctgaacgacaacgccagaagcagccccgtggtgatcgacgccagcaccgccatcgacgcccccagcaacctgagattcctggccaccacccccaacagcctgctggtgagctggcagccccccagagccagaatcaccggctacatcatcaagtacgagaagcccggcagcccccccagagaggtggtgcccagacccagacccggcgtgaccgaggccaccatcaccggcctggagcccggcaccgagtacaccatctacgtgatcgccctgaagaacaaccagaagagcgagcccctgatcggcagaaagaagaccgtgcagaagacccccttcgtgacccaccccggctacgacaccggcaacggcatccagctgcccggcaccagcggccagcagcccagcgtgggccagcagatgatcttcgaggagcacggcttcagaagaaccaccccccccaccaccgccacccccatcagacacagacccagaccctacccccccaacgtgggccaggaggccctgagccagaccaccatcagctgggcccccttccaggacaccagcgagtacatcatcagctgccaccccgtgggcaccgacgaggagcccctgcagttcagagtgcccggcaccagcaccagcgccaccctgaccggcctgaccagaggcgccacctacaacgtgatcgtggaggccctgaaggaccagcagagacacaaggtgagagaggaggtggtgaccgtgggcaacagcgtgaacgagggcctgaaccagcccaccgacgacagctgcttcgacccctacaccgtgagccactacgccgtgggcgacgagtgggagagaatgagcgagagcggcttcaagctgctgtgccagtgcctgggcttcggcagcggccacttcagatgcgacagcagcagatggtgccacgacaacggcgtgaactacaagatcggcgagaagtgggacagacagggcgagaacggccagatgatgagctgcacctgcctgggcaacggcaagggcgagttcaagtgcgacccccacgaggccacctgctacgacgacggcaagacctaccacgtgggcgagcagtggcagaaggagtacctgggcgccatctgcagctgcacctgcttcggcggccagagaggctggagatgcgacaactgcagaagacccggcggcgagcccagccccgagggcaccaccggccagagctacaaccagtacagccagagataccaccagagaaccaacaccaacgtgaactgccccatcgagtgcttcatgcccctggacgtgcaggccgacagagaggacagcagagagtag

SEQ ID NO: 265648 - DNA, 6993 bp, Artificial Sequence
  derived and/or modified sequence
atgctgagaggtcccggtcccggtctgctcctgctggcagtccaatgtcttggtacagcagtgccgagcaccggagccagcaaatccaaacgccaggcccagcagatggtgcagcctcagagtcccgtagccgttagtcagagcaagcccggctgctatgacaacgggaagcactatcagatcaatcaacagtgggaaaggacatacctgggaaacgcgctggtttgtacttgttatggcggctctcgggggttcaattgcgaatcaaaacctgaagccgaagaaacctgcttcgataagtataccggaaatacatatcgtgttggagatacatatgaacgccccaaagattccatgatttgggattgcacctgtatcggcgccggacgcgggcgcattagctgtaccatagcaaataggtgccatgaaggcggccaatcttataaaataggcgacacctggcggaggccccatgaaacgggaggatatatgctcgagtgcgtgtgcctggggaacggcaaaggggaatggacatgtaagccaatcgctgaaaagtgttttgatcatgctgctggaacaagttacgtggtgggagaaacatgggaaaagccataccagggttggatgatggtggactgtacttgtctaggcgaggggtccggaaggattacatgtaccagtagaaaccgatgcaatgaccaggacacccgcacctcataccgaattggtgacacgtggagcaaaaaagataatcgtggtaacctgctacaatgtatatgcaccgggaacggcagaggagagtggaaatgtgagagacacactagtgtacagaccacttcctctggtagcggacctttcactgatgtaagggcggctgtataccagccccagccgcacccccagccccctccatacgggcactgtgttactgactctggtgtggtgtactccgtaggcatgcagtggcttaaaacccagggtaataaacagatgctgtgtacatgcctgggcaatggcgtttcttgccaggagactgctgtcactcagacctacggtggcaactcaaacggagagccttgcgttctcccttttacgtacaacggaagaacattctactcatgcactactgaagggcggcaggatggccacttatggtgtagcactacatccaattatgagcaagaccaaaagtactctttctgcactgaccacacagtcttggtgcagacgagggggggaaattctaatggggcactctgccattttccctttctctacaacaaccataattacaccgactgcacatctgagggccgcagggataacatgaaatggtgtggtacgacccagaattacgatgctgaccagaaatttggcttttgccccatggcggcacacgaggagatctgtaccaccaacgagggcgtcatgtacagaattggggatcagtgggacaagcaacacgacatgggacacatgatgcggtgcacttgcgtgggcaatggtcgcggcgagtggacttgcatcgcatatagtcagctgagagaccaatgcatcgtggacgacatcacatataacgtgaatgatacatttcataaacgacacgaggaaggacacatgctgaattgtacatgcttcggccagggccgcggccggtggaaatgtgaccccgttgatcagtgtcaagactctgagacggggaccttctaccaaatcggcgatagctgggaaaagtatgtccacggcgtaagataccagtgctattgctacgggcggggtatcggtgaatggcactgtcagcccctgcagacttacccgtcgtccagtggtcctgtggaagtgttcattacggaaacgccctctcagccgaacagtcatcccattcagtggaacgcgccccaaccttcacatatctctaaatatatcctgcggtggaggcccaaaaactccgtgggtcgctggaaggaggcgacaattccgggtcacttaaattcttataccattaaaggcctcaagcccggcgttgtgtacgagggccagcttatctctattcagcagtacggccaccaggaagtaaccagatttgatttcaccacaacctccaccagcactcccgtgacgtccaatactgtgaccggtgagactaccccattctctcctcttgtggcaacttccgagtccgttacagaaatcacagcatcctcgtttgtggttagctgggtctccgccagcgatactgtctcaggattccgcgtggaatacgaattgagtgaggaaggtgacgaaccgcagtatttagacctcccctctactgctaccagcgtgaatattccggaccttttgcccggacggaaatacattgttaacgtttaccagatcagtgaggatggggagcagagcctcatcctgagcacaagccaaacaacagcacccgatgcccctcccgacaccaccgtggaccaggtagacgacacatctatcgtggtgaggtggagtcggcctcaggctcctatcaccggataccgaatagtctatagtcctagcgttgaaggctcttccaccgagctgaatctccccgagactgccaattccgttacactgtcagacctgcagcccggcgtacagtataatataactatttatgctgtcgaggagaaccaggaaagcactcctgttgtgattcagcaggagaccactgggacacctcggtcagacaccgtcccttcgcctcgagacctgcagtttgttgaagtcaccgacgttaaagtaaccatcatgtggactccaccagagtcagccgttactggataccgggttgacgtcattccggttaatctgccgggcgagcatggtcagagactgcctatatccagaaatacatttgctgaggtgacaggcctctcccccggcgttacctattacttcaaggttttcgccgtgtcacatggaagagaaagcaaacctctcaccgcacagcagacgacgaaattggacgctcccaccaacctgcagttcgtcaatgaaacagattcaacggtactggttaggtggacgcctccacgggcacagattacaggctaccgtctcacggtcggattaaccagaagaggccagcctagacaatataacgtagggccaagcgtttccaagtatccactgagaaatttgcagcccgcatcagagtacaccgtctctcttgtggccatcaaaggcaaccaggaatctccaaaggcgactggtgtgttcacaactctccaacctggctccagcattccgccatataatactgaagtgaccgagacaacaattgtgatcacctggacacccgcacccaggatcgggttcaaactgggcgtccgccccagtcagggcggagaggctccccgagaggtgactagtgatagtgggagtatcgtggtttctggcctgacacccggcgtggagtacgtgtacacaatccaggtactgagggacggccaggagcgagacgctcccatcgtaaataaggtggtgaccccattgtccccaccaaccaatctgcatctcgaggccaatccagacacaggggttctcacagtgtcctgggagcggtccacaacgccagacatcaccggttaccggattaccactacccccactaacggtcaacagggtaatagtctagaggaggtggtgcacgccgatcagagtagctgtacctttgacaatctgagtccagggttagagtataatgtgtccgtgtatacggtgaaggatgacaaggagagcgtcccaatctccgacaccattataccggcagtgccacccccaactgacttacgattcactaatatcgggccggatacgatgagagtgacctgggctccccctccgagtattgacctcactaactttttggtaagatattctccagtcaaaaatgaggaggatgttgcagagttgtctatttcacctagcgataatgctgtcgtgctgacaaacttactgcccgggacagagtacgtggtgagcgtgtccagcgtatatgaacagcatgaatcaactccactgcggggcagacagaagacagggctggattcccctactggcatagatttttccgatatcactgccaatagcttcaccgttcactggattgccccacgcgcgactattacaggctatcgtataaggcaccatcctgaacacttcagcggaagaccaagagaggatcgggtaccccattcaaggaacagcatcacgcttactaacctcacaccaggaaccgagtacgtcgtcagtatcgtagctttaaatgggcgggaggagtcccccttgctgatcggccagcagtccacagtgtccgatgtaccacgtgatctcgaagtggtggctgcaacacctacgagcttgctgatctcatgggacgctcctgcagtcactgtacgatactaccgaatcacatacggagagacaggtggaaactcacccgttcaggagtttacagtccccggtagtaagtcaaccgctacaatttccggcctgaagccaggggtagactatactattaccgtctatgcagtaaccggcaggggggattccccagctagctcaaagccaatatctatcaactaccgtaccgagatcgacaaacccagccagatgcaggttactgatgtgcaggacaatagcatttctgtgaagtggttgcccagctcttcaccagttacaggttaccgcgtcacaaccaccccgaaaaatggtcccggtcccactaagaccaagactgcaggaccagaccagaccgaaatgactatcgagggtctgcagcccaccgtggaatacgttgttagcgtgtacgcccagaacccctcaggcgaaagtcaacccctggttcagacagctgttacaaatatcgatagacccaaaggtcttgcctttaccgacgtggatgtggactctataaagatcgcctgggagagcccacagggccaggtgagccgctaccgggtcacgtattcatcacctgaggatggcatccacgaactcttccccgccccagatggagaagaggacacggcagaattgcagggcttgagaccgggctccgaatacacggtatccgtcgttgccctgcacgacgacatggaatcacagcccctgatagggactcagagcacagcaatacctgcgcctactgatctgaaattcacccaggtgacccccacttccctgtccgctcagtggacccccccgaatgttcagctcactgggtacagagtgcgggtcactccaaaagagaagacaggccccatgaaggagatcaaccttgcgcctgactcctcatcagtcgtagtctctgggctaatggtggccacgaaatatgaggtcagtgtgtacgcactgaaggacaccctcacatctaggcctgctcagggagtcgtaacaactctggagaacgtttcacctccccggagggcacgggtcaccgacgccaccgagaccaccatcaccattagctggagaactaagacggaaactattacgggtttccaggtggatgcagtgcctgctaatgggcagacgccgatccagaggacaattaaaccagatgtacgatcctacactatcactgggctgcagcctggcaccgattacaagatatacctctacacccttaatgacaacgcccggagttctccagtggtaatcgatgcctctaccgctatagatgctccttctaacctgagattcctcgctactacccccaacagtctcctcgtttcctggcaacccccccgagcccgcattacgggctacattattaaatacgagaaacctggctcaccccccagagaagtggtccctcgtcccaggcctggggtgacggaggctactatcactggactggagcccgggactgagtataccatatatgtgattgcactgaaaaacaaccagaaatccgagccacttatcgggaggaagaagacagtccagaaaacccccttcgtaacccatcccgggtatgacaccgggaacggaatccaactgcccggcacatcagggcagcagccaagtgtcgggcaacagatgatcttcgaggagcatggattccgccggactaccccaccaaccacggccacccccattaggcacagaccccgcccttacccccctaacgtcggtcaggaagctctgtcgcagactactattagctgggccccctttcaggatacatctgaatatattatctcttgccatccggtggggaccgatgaggagccactgcagtttagggtacccgggaccagcacgagcgcaaccttgaccggccttactagaggggctacttacaacgtcattgtggaggcccttaaagaccaacagcgccataaagtccgagaggaagtcgttacagtcggcaactctgtgaatgaaggcctgaaccagcctacagacgacagttgcttcgacccttacaccgtttcacattacgccgtgggcgatgaatgggaaaggatgtcagaatcaggattcaaactgctgtgccagtgtctgggctttgggagcggacacttccgctgcgactcgtcccggtggtgccacgacaacggtgtcaactacaagatcggtgagaagtgggatcgacaaggagagaacggtcaaatgatgagctgcacctgtcttggaaatgggaaaggagaattcaaatgtgacccccatgaagcgacttgttatgatgatggtaagacctaccacgtgggagaacagtggcagaaggaatacctaggagcaatatgcagctgtacctgctttggtggccagagaggctggcggtgcgataactgcagacgcccagggggtgagccttctccagaagggaccacgggacagtcatataaccaatacagccaaagatatcatcagcgcacaaataccaatgtgaattgcccaattgaatgctttatgcccctggatgtacaggccgatagggaggattctagagagtag

SEQ ID NO: 265649 - DNA, 7952 bp, Artificial Sequence
  derived and/or modified sequence
gcccgcgccggctgtgctgcacagggggaggagagggaaccccaggcgcgagcgggaagaggggacctgcagccacaacttctctggtcctctgcatcccttctgtccctccacccgtccccttccccaccctctggcccccaccttcttggaggcgacaacccccgggaggcattagaagggatttttcccgcaggttgcgaagggaagcaaacttggtggcaacttgcctcccggtgcgggcgtctctcccccaccgtctcaacatgcttaggggtccggggcccgggctgctgctgctggccgtccagtgcctggggacagcggtgccctccacgggagcctcgaagagcaagaggcaggctcagcaaatggttcagccccagtccccggtggctgtcagtcaaagcaagcccggttgttatgacaatggaaaacactatcagataaatcaacagtgggagcggacctacctaggcaatgcgttggtttgtacttgttatggaggaagccgaggttttaactgcgagagtaaacctgaagctgaagagacttgctttgacaagtacactgggaacacttaccgagtgggtgacacttatgagcgtcctaaagactccatgatctgggactgtacctgcatcggggctgggcgagggagaataagctgtaccatcgcaaaccgctgccatgaagggggtcagtcctacaagattggtgacacctggaggagaccacatgagactggtggttacatgttagagtgtgtgtgtcttggtaatggaaaaggagaatggacctgcaagcccatagctgagaagtgttttgatcatgctgctgggacttcctatgtggtcggagaaacgtgggagaagccctaccaaggctggatgatggtagattgtacttgcctgggagaaggcagcggacgcatcacttgcacttctagaaatagatgcaacgatcaggacacaaggacatcctatagaattggagacacctggagcaagaaggataatcgaggaaacctgctccagtgcatctgcacaggcaacggccgaggagagtggaagtgtgagaggcacacctctgtgcagaccacatcgagcggatctggccccttcaccgatgttcgtgcagctgtttaccaaccgcagcctcacccccagcctcctccctatggccactgtgtcacagacagtggtgtggtctactctgtggggatgcagtggctgaagacacaaggaaataagcaaatgctttgcacgtgcctgggcaacggagtcagctgccaagagacagctgtaacccagacttacggtggcaactcaaatggagagccatgtgtcttaccattcacctacaatggcaggacgttctactcctgcaccacagaagggcgacaggacggacatctttggtgcagcacaacttcgaattatgagcaggaccagaaatactctttctgcacagaccacactgttttggttcagactcgaggaggaaattccaatggtgccttgtgccacttccccttcctatacaacaaccacaattacactgattgcacttctgagggcagaagagacaacatgaagtggtgtgggaccacacagaactatgatgccgaccagaagtttgggttctgccccatggctgcccacgaggaaatctgcacaaccaatgaaggggtcatgtaccgcattggagatcagtgggataagcagcatgacatgggtcacatgatgaggtgcacgtgtgttgggaatggtcgtggggaatggacatgcattgcctactcgcagcttcgagatcagtgcattgttgatgacatcacttacaatgtgaacgacacattccacaagcgtcatgaagaggggcacatgctgaactgtacatgcttcggtcagggtcggggcaggtggaagtgtgatcccgtcgaccaatgccaggattcagagactgggacgttttatcaaattggagattcatgggagaagtatgtgcatggtgtcagataccagtgctactgctatggccgtggcattggggagtggcattgccaacctttacagacctatccaagctcaagtggtcctgtcgaagtatttatcactgagactccgagtcagcccaactcccaccccatccagtggaatgcaccacagccatctcacatttccaagtacattctcaggtggagacctaaaaattctgtaggccgttggaaggaagctaccataccaggccacttaaactcctacaccatcaaaggcctgaagcctggtgtggtatacgagggccagctcatcagcatccagcagtacggccaccaagaagtgactcgctttgacttcaccaccaccagcaccagcacacctgtgaccagcaacaccgtgacaggagagacgactcccttttctcctcttgtggccacttctgaatctgtgaccgaaatcacagccagtagctttgtggtctcctgggtctcagcttccgacaccgtgtcgggattccgggtggaatatgagctgagtgaggagggagatgagccacagtacctggatcttccaagcacagccacttctgtgaacatccctgacctgcttcctggccgaaaatacattgtaaatgtctatcagatatctgaggatggggagcagagtttgatcctgtctacttcacaaacaacagcgcctgatgcccctcctgacacgactgtggaccaagttgatgacacctcaattgttgttcgctggagcagaccccaggctcccatcacagggtacagaatagtctattcgccatcagtagaaggtagcagcacagaactcaaccttcctgaaactgcaaactccgtcaccctcagtgacttgcaacctggtgttcagtataacatcactatctatgctgtggaagaaaatcaagaaagtacacctgttgtcattcaacaagaaaccactggcaccccacgctcagatacagtgccctctcccagggacctgcagtttgtggaagtgacagacgtgaaggtcaccatcatgtggacaccgcctgagagtgcagtgaccggctaccgtgtggatgtgatccccgtcaacctgcctggcgagcacgggcagaggctgcccatcagcaggaacacctttgcagaagtcaccgggctgtcccctggggtcacctattacttcaaagtctttgcagtgagccatgggagggagagcaagcctctgactgctcaacagacaaccaaactggatgctcccactaacctccagtttgtcaatgaaactgattctactgtcctggtgagatggactccacctcgggcccagataacaggataccgactgaccgtgggccttacccgaagaggacagcccaggcagtacaatgtgggtccctctgtctccaagtacccactgaggaatctgcagcctgcatctgagtacaccgtatccctcgtggccataaagggcaaccaagagagccccaaagccactggagtctttaccacactgcagcctgggagctctattccaccttacaacaccgaggtgactgagaccaccattgtgatcacatggacgcctgctccaagaattggttttaagctgggtgtacgaccaagccagggaggagaggcaccacgagaagtgacttcagactcaggaagcatcgttgtgtccggcttgactccaggagtagaatacgtctacaccatccaagtcctgagagatggacaggaaagagatgcgccaattgtaaacaaagtggtgacaccattgtctccaccaacaaacttgcatctggaggcaaaccctgacactggagtgctcacagtctcctgggagaggagcaccaccccagacattactggttatagaattaccacaacccctacaaacggccagcagggaaattctttggaagaagtggtccatgctgatcagagctcctgcacttttgataacctgagtcccggcctggagtacaatgtcagtgtttacactgtcaaggatgacaaggaaagtgtccctatctctgataccatcatcccagctgttcctcctcccactgacctgcgattcaccaacattggtccagacaccatgcgtgtcacctgggctccacccccatccattgatttaaccaacttcctggtgcgttactcacctgtgaaaaatgaggaagatgttgcagagttgtcaatttctccttcagacaatgcagtggtcttaacaaatctcctgcctggtacagaatatgtagtgagtgtctccagtgtctacgaacaacatgagagcacacctcttagaggaagacagaaaacaggtcttgattccccaactggcattgacttttctgatattactgccaactcttttactgtgcactggattgctcctcgagccaccatcactggctacaggatccgccatcatcccgagcacttcagtgggagacctcgagaagatcgggtgccccactctcggaattccatcaccctcaccaacctcactccaggcacagagtatgtggtcagcatcgttgctcttaatggcagagaggaaagtcccttattgattggccaacaatcaacagtttctgatgttccgagggacctggaagttgttgctgcgacccccaccagcctactgatcagctgggatgctcctgctgtcacagtgagatattacaggatcacttacggagagacaggaggaaatagccctgtccaggagttcactgtgcctgggagcaagtctacagctaccatcagcggccttaaacctggagttgattataccatcactgtgtatgctgtcactggccgtggagacagccccgcaagcagcaagccaatttccattaattaccgaacagaaattgacaaaccatcccagatgcaagtgaccgatgttcaggacaacagcattagtgtcaagtggctgccttcaagttcccctgttactggttacagagtaaccaccactcccaaaaatggaccaggaccaacaaaaactaaaactgcaggtccagatcaaacagaaatgactattgaaggcttgcagcccacagtggagtatgtggttagtgtctatgctcagaatccaagcggagagagtcagcctctggttcagactgcagtaaccaacattgatcgccctaaaggactggcattcactgatgtggatgtcgattccatcaaaattgcttgggaaagcccacaggggcaagtttccaggtacagggtgacctactcgagccctgaggatggaatccatgagctattccctgcacctgatggtgaagaagacactgcagagctgcaaggcctcagaccgggttctgagtacacagtcagtgtggttgccttgcacgatgatatggagagccagcccctgattggaacccagtccacagctattcctgcaccaactgacctgaagttcactcaggtcacacccacaagcctgagcgcccagtggacaccacccaatgttcagctcactggatatcgagtgcgggtgacccccaaggagaagaccggaccaatgaaagaaatcaaccttgctcctgacagctcatccgtggttgtatcaggacttatggtggccaccaaatatgaagtgagtgtctatgctcttaaggacactttgacaagcagaccagctcagggagttgtcaccactctggagaatgtcagcccaccaagaagggctcgtgtgacagatgctactgagaccaccatcaccattagctggagaaccaagactgagacgatcactggcttccaagttgatgccgttccagccaatggccagactccaatccagagaaccatcaagccagatgtcagaagctacaccatcacaggtttacaaccaggcactgactacaagatctacctgtacaccttgaatgacaatgctcggagctcccctgtggtcatcgacgcctccactgccattgatgcaccatccaacctgcgtttcctggccaccacacccaattccttgctggtatcatggcagccgccacgtgccaggattaccggctacatcatcaagtatgagaagcctgggtctcctcccagagaagtggtccctcggccccgccctggtgtcacagaggctactattactggcctggaaccgggaaccgaatatacaatttatgtcattgccctgaagaataatcagaagagcgagcccctgattggaaggaaaaagacagttcaaaagacccctttcgtcacccaccctgggtatgacactggaaatggtattcagcttcctggcacttctggtcagcaacccagtgttgggcaacaaatgatctttgaggaacatggttttaggcggaccacaccgcccacaacggccacccccataaggcataggccaagaccatacccgccgaatgtaggacaagaagctctctctcagacaaccatctcatgggccccattccaggacacttctgagtacatcatttcatgtcatcctgttggcactgatgaagaacccttacagttcagggttcctggaacttctaccagtgccactctgacaggcctcaccagaggtgccacctacaacgtcatagtggaggcactgaaagaccagcagaggcataaggttcgggaagaggttgttaccgtgggcaactctgtcaacgaaggcttgaaccaacctacggatgactcgtgctttgacccctacacagtttcccattatgccgttggagatgagtgggaacgaatgtctgaatcaggctttaaactgttgtgccagtgcttaggctttggaagtggtcatttcagatgtgattcatctagatggtgccatgacaatggtgtgaactacaagattggagagaagtgggaccgtcagggagaaaatggccagatgatgagctgcacatgtcttgggaacggaaaaggagaattcaagtgtgaccctcatgaggcaacgtgttatgatgatgggaagacataccacgtaggagaacagtggcagaaggaatatctcggtgccatttgctcctgcacatgctttggaggccagcggggctggcgctgtgacaactgccgcagacctgggggtgaacccagtcccgaaggcactactggccagtcctacaaccagtattctcagagataccatcagagaacaaacactaatgttaattgcccaattgagtgcttcatgcctttagatgtacaggctgacagagaagattcccgagagtaaatcatctttccaatccagaggaacaagcatgtctctctgccaagatccatctaaactggagtgatgttagcagacccagcttagagttcttctttctttcttaagccctttgctctggaggaagttctccagcttcagctcaactcacagcttctccaagcatcaccctgggagtttcctgagggttttctcataaatgagggctgcacattgcctgttctgcttcgaagtattcaataccgctcagtattttaaatgaagtgattctaagatttggtttgggatcaataggaaagcatatgcagccaaccaagatgcaaatgttttgaaatgatatgaccaaaattttaagtaggaaagtcacccaaacacttctgctttcacttaagtgtctggcccgcaatactgtaggaacaagcatgatcttgttactgtgatattttaaatatccacagtactcactttttccaaatgatcctagtaattgcctagaaatatctttctcttacctgttatttatcaatttttcccagtatttttatacggaaaaaattgtattgaaaacacttagtatgcagttgataagaggaatttggtataattatggtgggtgattattttttatactgtatgtgccaaagctttactactgtggaaagacaactgttttaataaaagatttacattccacaa

SEQ ID NO: 265650 - DNA, 6993 bp, Artificial Sequence
  derived and/or modified sequence
atgctgcggggccctggccctggcctgctgctgctggccgtgcagtgcctgggcacagctgtgcccagcactggagccagcaagagcaagaggcaggcccagcagatggtgcagccccagagccctgtggccgtgtcccagagcaagccaggctgctatgacaatggcaagcactaccagatcaaccagcagtgggagaggacctacctgggcaatgccctggtgtgcacctgctatggaggcagccggggcttcaactgtgagagcaagccagaggccgaggagacctgctttgacaagtacacaggcaacacctacagagtgggggacacctatgaaagacccaaggacagcatgatctgggactgcacctgcatcggggccggccggggccgcatcagctgcaccatcgccaaccgctgccacgagggcggccagagctacaagatcggggacacctggaggcggccccatgagaccggcggctacatgctggagtgtgtgtgcctgggcaatggcaagggggagtggacctgcaagcccatcgccgagaagtgctttgaccacgccgccggcaccagctatgtggtgggggagacctgggagaagccctaccagggctggatgatggtggactgcacctgcctgggggagggcagcggccgcatcacctgcaccagcaggaaccgctgcaatgaccaggacaccaggaccagctaccgcatcggggacacctggagcaagaaggacaacagaggcaacctgctgcagtgcatctgcacaggaaatggccgcggggagtggaagtgtgagcggcacacctctgtgcagaccaccagcagcggcagcggccccttcacagatgtgcgggctgctgtgtaccagccccagccccacccccagcccccaccctacggccactgtgtgacagacagcggcgtggtgtacagcgtgggcatgcagtggctgaagacccagggcaacaagcagatgctgtgcacctgcctgggcaatggagtgtcctgccaggagacagctgtgacccagacctatggaggcaacagcaatggagagccctgtgtgctgcccttcacctacaatggaagaaccttctacagctgcaccacagagggccggcaggacggccacctgtggtgcagcaccaccagcaactatgagcaggaccagaagtacagcttctgcacagaccacacagtgctggtgcagacccggggcggcaacagcaatggagccctgtgccacttccccttcctgtacaacaaccacaactacacagactgcaccagcgagggcagaagagacaacatgaagtggtgtggcaccacccagaactatgatgctgaccagaagtttggcttctgccccatggccgcccacgaggagatctgcaccaccaatgaaggagtgatgtaccgcatcggggaccagtgggacaagcagcacgacatgggccacatgatgcgctgcacctgtgtgggcaatggccgcggggagtggacctgcatcgcctacagccagctgcgggaccagtgcatcgtggatgacatcacctacaacgtgaatgacaccttccacaagagacatgaggagggccacatgctgaactgcacctgcttcggccagggccggggccgctggaagtgtgaccctgtggaccagtgccaggacagcgagaccggcaccttctaccagatcggggacagctgggagaagtatgtgcatggagtgcgctaccagtgctactgctacggccggggcatcggggagtggcactgccagcccctgcagacctaccccagcagcagcggccctgtggaggtgttcatcacagagacccccagccagcccaacagccaccccatccagtggaatgccccccagcccagccacatcagcaagtacatcctgcgctggaggcccaagaacagcgtgggccgctggaaggaggccaccatccctggccacctgaacagctacaccatcaagggcctgaagccaggagtggtgtatgagggccagctgatcagcatccagcagtatggccaccaggaggtgaccaggtttgacttcaccaccaccagcaccagcacccctgtgaccagcaacacagtgactggagagaccacccccttcagccccctggtggccaccagcgagagcgtgacagagatcacagccagcagctttgtggtgtcctgggtgtctgccagtgacacagtgtctggcttccgggtggagtatgagctgtctgaggagggagatgagccccagtacctggacctgcccagcacagccacctctgtgaacatcccagacctgctgcccggcaggaagtacatcgtgaatgtgtaccagatcagtgaagatggagagcagagcctcatcctgagcaccagccagaccacagccccagatgcccccccagacaccaccgtggaccaggtggatgacaccagcatcgtggtgcgctggagccggccccaggcccccatcaccggctacagaattgtgtacagccccagcgtggagggcagcagcacagagctgaacctgcctgagacagccaacagcgtgaccctgagtgacctgcagcccggggtgcagtacaacatcaccatctatgctgtggaggagaaccaggagagcacccctgtggtgatccagcaggagaccaccggcacccccaggagtgacacagtgcccagcccccgggacctgcagtttgtggaggtgacagatgtgaaggtgaccatcatgtggaccccacctgagagcgctgtgacaggctacagagtggatgtgattcctgtgaacctgcctggagagcacggccagaggctgcccatcagcaggaacacctttgctgaggtgacaggcctgagccctggggtgacctactacttcaaggtgtttgctgtgagccacggccgggagagcaagcccctgacagcccagcagaccaccaagctggatgcccccaccaacctgcagtttgtgaatgaaacagacagcacagtgctggtgcgctggaccccaccccgggcccagatcaccggctaccgcctgactgtgggcctgacccggcggggccagccccggcagtacaacgtgggccccagcgtgtccaagtaccccctgaggaacctgcagcctgccagcgagtacacagtgtccctggtggccatcaagggcaaccaggagagccccaaggccactggagtcttcaccaccctgcagcccggcagcagcatccccccctacaacacagaggtgacagagaccaccatcgtcatcacctggaccccagcccccagaattggcttcaagctgggcgtgcggcccagccagggcggggaggccccccgggaggtgaccagtgacagcggcagcatcgtggtgtctggcctgaccccaggagtggagtatgtgtacaccatccaggtgctgagagatggccaggagagagatgcccccatcgtgaacaaggtggtgacccccctgagcccccccaccaacctgcacctggaggccaacccagacaccggggtgctgactgtgtcctgggagaggagcaccaccccagacatcaccggctaccgcatcaccaccacccccaccaacggccagcagggcaacagcctggaggaggtggtgcatgctgaccagagcagctgcacctttgacaacctgagccctggcctggagtacaacgtgtctgtgtacacagtgaaggatgacaaggagagcgtgcccatcagtgacaccatcatcccagctgtgcccccacccacagacctgcgcttcaccaacatcggccctgacaccatgagggtgacctgggcccccccacccagcattgacctgaccaacttcctggtgcgctacagccctgtgaagaatgaagaagatgtggccgagctgagcatcagccccagcgacaatgctgtggtgctgaccaacctgctgcccggcacagaatatgtggtgtctgtgtcctctgtgtatgagcagcacgagagcacccccctgcggggccggcagaagacaggcctggacagccccaccggcatcgacttcagtgacatcacagccaacagcttcaccgtgcactggatcgccccccgggccaccatcaccggctaccgcatccgccaccaccctgagcacttcagcggccggcccagagaagatagagtgccccacagcaggaacagcatcaccctgaccaacctgaccccaggcacagaatatgtggtgtccatcgtggccctgaatggccgggaggagagccccctgctgattggccagcagagcacagtgtctgatgtgccccgggacctggaggtggtggccgccacccccaccagcctgctgatctcctgggatgccccagctgtgacagtgcgctactaccgcatcacctacggggagactggaggcaacagccctgtgcaggagttcaccgtgcccggcagcaagagcacagccaccatcagcggcctgaagccaggagtggactacaccatcaccgtgtatgctgtgacaggccgcggggacagccctgccagcagcaagcccatcagcatcaactacagaacagaaattgacaagcccagccagatgcaggtgacagatgtgcaggacaacagcatctctgtgaagtggctgcccagcagcagccctgtgacaggctacagagtgaccaccacccccaagaatggacctggccccaccaagaccaagacagctggccctgaccagacagagatgaccatcgagggcctgcagcccaccgtggagtatgtggtgtctgtgtatgcccagaaccccagcggggagagccagcccctggtgcagacagctgtgaccaacatcgaccggcccaagggcctggccttcacagatgtggatgtggacagcatcaagatcgcctgggagagcccccagggccaggtgagccgctacagagtgacctacagcagcccagaagatggcatccacgagctgtttcctgccccagatggagaggaggacacagctgagctgcagggcctgcggcccggcagcgagtacacagtgtctgtggtggccctgcatgatgacatggagagccagcccctgattggcacccagagcacagccatcccagcccccacagacctgaagttcacccaggtgacccccaccagcctgagcgcccagtggaccccacccaacgtgcagctgaccggctacagagtgcgggtgacccccaaggagaagacaggccccatgaaggagatcaacctggccccagacagcagctctgtggtggtgtctggcctgatggtggccaccaagtatgaggtgtctgtgtatgccctgaaggacaccctgaccagcaggcctgcccagggcgtggtgaccaccctggagaatgtgagccccccccggcgggcccgggtgacagatgccacagagaccaccatcaccatctcctggaggaccaagacagagaccatcaccggcttccaggtggatgctgtgcctgccaacggccagacccccatccagaggaccatcaagccagatgtgcgcagctacaccatcaccggcctgcagcctggaacagactacaagatctacctgtacaccctgaatgacaatgcccggagcagccctgtggtgattgatgccagcacagccattgatgcccccagcaacctgcgcttcctggccaccacccccaacagcctgctggtgtcctggcagcccccccgggcccgcatcaccggctacatcatcaagtatgagaagccaggcagccccccccgggaggtggtgccccggcccaggcctggggtgacagaggccaccatcaccggcctggagcctggaacagagtacaccatctacgtgattgccctgaagaacaaccagaagtctgagcccctcatcggcaggaagaagacagtgcagaagaccccatttgtgacccaccctggctatgacacaggaaatggcatccagctgcccggcaccagcggccagcagcccagcgtgggccagcagatgatctttgaggagcacggcttccggaggaccaccccacccaccacagccacccccatccgccaccggccccggccctacccacccaacgtgggccaggaggccctgagccagaccaccatctcctgggcccccttccaggacaccagcgagtacatcatcagctgccaccctgtgggcacagatgaggagcccctgcagttccgggtgcccggcaccagcaccagcgccaccctgaccggcctgaccaggggggccacctacaacgtgattgtggaggccctgaaggaccagcagaggcacaaggtgcgggaggaggtggtgacagtgggcaacagcgtgaatgaaggcctgaaccagcccacagatgacagctgctttgacccctacacagtgagccactatgctgtgggagatgagtgggagaggatgtctgagagcggcttcaagctgctgtgccagtgcctgggcttcggcagcggccacttccgctgtgacagcagccgctggtgccacgacaacggggtgaactacaagatcggggagaagtgggaccggcagggagaaaatggccagatgatgagctgcacctgcctgggcaatggaaaaggagagttcaagtgtgacccccatgaggccacctgctatgatgatggcaagacctaccacgtgggggagcagtggcagaaggagtacctgggcgccatctgcagctgcacctgcttcggcggccagaggggctggaggtgtgacaactgccggcggcctggaggagagcccagccctgagggcaccaccggccagagctacaaccagtacagccagcgctaccaccagaggaccaacaccaacgtgaactgccccatcgagtgcttcatgcccctggatgtgcaggccgaccgggaggacagccgggagtag

SEQ ID NO: 265651 - DNA, 6993 bp, Artificial Sequence
  derived and/or modified sequence
atgctgcggggccccggccccggcctgctgctgctggccgtgcagtgtttagggacagctgttcctagtaccggagcctccaagtctaagcgccaagcccagcagatggtgcagccacagtcccctgtcgctgtttcacaaagtaagccaggttgttatgacaatggcaaacattaccagataaaccaacaatgggagagaacttacttagggaacgccctcgtgtgcacgtgttacggcggcagccgcgggttcaattgtgaaagcaaaccggaagccgaggagacatgttttgataagtacacaggcaacacatatagggtgggcgatacctacgaaaggccgaaagacagcatgatttgggattgcacatgtatcggagcaggacgcggccggatctcttgcaccatcgctaatcgctgccatgagggagggcagagttacaagatcggagatacgtggcggcggccgcatgaaaccggtggttatatgctagaatgcgtgtgcttaggaaatggcaagggggagtggacatgcaagccaatagcggaaaagtgcttcgatcacgccgccggcacttcttacgtggtgggggaaacatgggagaaaccctaccagggctggatgatggtggactgcacctgcctgggggaaggttccggccgtatcacttgtacatccaggaaccgctgtaacgaccaggataccaggacctcataccggataggtgatacgtggtccaagaaggataatagggggaatttgctacaatgtatctgcacagggaatggccgcggcgagtggaaatgcgaaaggcacacctcagttcagacaacaagcagcgggtctggaccattcactgacgtgcgggctgctgtttaccagccacagccacaccctcagcccccaccatacgggcactgtgtcactgatagtggagtggtctactctgtgggaatgcaatggttgaagactcaggggaacaagcaaatgctgtgcacatgtcttggcaatggggtgtcctgtcaagaaaccgccgtgacacaaacttatggcggcaattccaacggggagccatgtgtcttgcccttcacttataatggaaggaccttctatagttgtactacagagggcaggcaggatgggcatctttggtgctctaccaccagcaactacgagcaagatcagaagtacagtttttgcactgatcatactgttctcgtccagactcggggggggaacagtaatggcgcgttgtgccatttcccctttttatataataatcacaattatacagactgcacttctgaaggaaggcgggacaacatgaagtggtgcggcactacacagaattacgatgccgatcagaaattcggtttctgtcccatggcagcacatgaggagatttgtactactaacgagggcgttatgtacagaataggtgaccagtgggataaacaacacgacatgggacacatgatgaggtgtacctgtgtgggaaatggtaggggagagtggacatgtatcgcatactcccagcttcgagaccagtgcattgtggacgatataacctacaacgtaaatgataccttccacaaaagacacgaggaagggcatatgctgaactgcacctgtttcgggcaggggcgggggcgatggaagtgcgacccggtggaccagtgtcaggatagcgaaacaggaacattttaccagattggagactcttgggagaagtatgttcacggtgtgaggtatcagtgttattgctatgggagaggcatcggtgagtggcactgccagccactgcagacatatcctagcagctctggccccgttgaggtcttcatcaccgagacgccatcccagcctaattcacaccccattcaatggaacgccccacaaccttcgcacatcagtaaatacatcctcagatggcgcccaaagaattctgttgggcgatggaaggaggcaaccattccaggacaccttaactcctataccatcaaaggactcaagcccggtgtagtttacgagggccaactcatctcaattcagcagtatgggcaccaggaggtgactagattcgatttcaccacaacaagtacaagtactcctgttacttctaatacagtgaccggagaaaccaccccgtttagccctttagtcgcgactagcgaatccgtgactgagattactgcctcctccttcgtcgtgtcttgggtctccgcgtcggatactgtctccggctttcgcgtggagtacgaactcagtgaggaaggtgacgaaccacagtacctggatctaccctctactgcaacatctgttaacatacccgatctgctgccaggacgcaagtatatcgtgaacgtctatcagatttccgaggacggagaacagagcttgatactgagtaccagtcagacgacggctccagacgcgccacctgatacgaccgtggatcaagtggatgatacatctatcgtggtccggtggagtagaccacaggctccaattaccggataccgtatcgtgtatagccccagtgttgagggttcctccactgagctgaacctgcctgagacagcaaatagcgtgaccctgtccgatttacaacccggtgttcaatataatataacaatttacgccgttgaggagaatcaggaaagtaccccggtggttatccagcaggagacaactggaactccccgatctgataccgtcccgtctccacgcgacttacagtttgttgaagtgacggacgtgaaggtcactatcatgtggactcctcctgagagcgccgtaacagggtatcgcgtggatgtaatcccagttaacctacccggtgaacatggtcagaggctccccatatcgcggaacactttcgccgaggttaccggcctgtcccctggggttacctattactttaaagtttttgcagtctcgcacggccgtgaatctaaaccactgaccgcccagcagaccacaaagcttgacgccccaactaacttgcagttcgtgaatgagaccgacagcaccgtcctggtgcgttggactccaccacgcgcccagatcacggggtataggctaacagtgggactcacgcgtcggggccaaccccgacagtacaatgtcggaccttctgtgagcaagtaccctctgcgcaatctccagccggccagcgaatacacagtttccctagtagcgatcaagggtaatcaggaatccccaaaagctacaggcgtgtttactacccttcagcctgggtcctctattccaccatacaacacagaggtcacagagaccaccattgtgatcacgtggacgcctgccccccggattggttttaaactcggtgtcaggcctagccaaggcggggaagcccctcgggaagtcacatctgactctggcagcattgttgtcagcggattgacaccaggggtagaatacgtttacaccatccaggtgctccgggatggacaggagagggacgcaccaatcgtgaacaaagtcgtcactccactttctccccctactaacctccacctggaggcgaaccccgacaccggcgttttgactgtttcctgggagcgctccacaacccccgacatcaccggctaccgcattacgaccacacctacaaatgggcagcagggcaactcattagaggaggtagtccacgccgaccagagctcttgtacatttgacaacctgtcccccgggcttgagtacaacgtgtctgtgtacaccgtcaaggacgataaagaatctgtgcctattagtgacaccatcattccggccgttccacctcccacggacctccgtttcactaatatcggccctgacacaatgcgggtgacatgggcgcctcctccctctattgacctgactaactttctcgtcaggtacagcccagtcaagaacgaagaagatgtggccgagctgtctatatccccttcggataatgccgtcgtgcttaccaacctgctcccaggaacggaatatgttgtgagtgtatcaagtgtgtacgagcagcacgagagtactcctctgagagggcgccagaaaaccggccttgattcacctacgggcatcgattttagcgatattaccgccaatagctttacagtgcattggatagcaccacgggctactattacggggtatcgcatcaggcatcatcccgagcatttttccgggcgtccacgcgaagaccgcgtacctcattctaggaacagcatcacattaacaaacctgactcccggcacggagtacgtggtttctatcgttgctctgaatggtagagaggagagtccactgctgattggccagcagtccacagtgtcagatgttccccgggacctggaggtagtcgctgctacacccaccagtctgctaattagttgggacgcacccgctgtgacagtgaggtattatcgtatcacatacggtgaaacgggcggcaacagccccgtacaagagttcaccgttccggggagtaagagcacagcaactatcagcggcctgaagcctggggtggattacactatcactgtatacgctgtgacaggacgtggtgacagcccagccagtagtaagcctatctctatcaactatcgaaccgaaatcgacaaaccctcccaaatgcaggtgaccgatgtgcaggacaactccatatcagtgaaatggctaccaagtagctctccagtcaccggatatcgtgttacaacgacacctaaaaatggacccggacccactaaaactaagacagcaggccctgaccagacagagatgacaatcgaggggctccagccgactgtcgagtacgtcgtgtcagtctatgctcagaatccttcaggagagtcgcagccccttgttcagaccgccgttacaaatatcgatcggcctaaaggcttggcgtttacagacgttgatgttgattcaatcaagattgcctgggaatcccctcagggccaggtcagtcggtatagagttacatactcatctcccgaagatggaatccatgaactgttccctgcaccagatggagaggaggataccgccgaactgcagggcttacggccgggcagtgagtatacggtcagtgtcgtggccttacatgatgacatggagagtcaacctctcatcggcactcaatcaactgcaattccagcacccacagacctcaagtttacacaggtcacacccacgtccctgagtgcacagtggacccctccaaacgtccagctgaccggatatagagtaagagtgacgcccaaagagaagactgggccaatgaaagagattaacctagccccagacagcagcagtgtggtcgtgagcggcctgatggtcgcgaccaagtatgaggtatccgtgtacgccctgaaagacaccctgacaagtagacccgcccagggagtggtcacaactttagagaatgtcagcccccctcggcgggcaagagtgacagacgccactgagaccaccatcaccatcagctggagaaccaagacggaaacaatcaccggatttcaggtggatgcagtcccggctaatgggcagacgccgatccagagaacgattaaacccgatgtgagatcatatactatcaccgggcttcaaccagggaccgactacaagatctacctgtatacattaaacgacaatgcgcgctccagcccagtggtgatcgacgcttccacagctatagatgctcccagcaacctgaggtttttagccacaacacctaactccctcctcgtgtcctggcagccccctagagcccgaatcacgggttacataattaagtacgaaaagcccggctcacctccccgggaagtggtgcctcgcccaagacctggggtaactgaggccaccataaccggtcttgagcccggcaccgagtacacaatatatgtgatcgctctgaagaacaaccaaaagagcgagcccctgatcggccgcaagaagacagtgcagaagactccattcgtaactcacccgggctatgataccgggaacggcattcagctcccaggtacaagcggccagcagcctagcgtaggccagcagatgatctttgaggaacacggctttcgccggacaactcctccaactaccgctaccccaatccggcaccgtcccaggccatatccacctaatgtgggacaggaggcactatctcaaaccacgatctcctgggctcccttccaggataccagtgaatacattatatcttgtcatcctgttgggacagatgaagagcccctccagttcagggtacccgggacatctacatctgctacgctgaccggcctcaccaggggggcaacctacaacgtgattgttgaggccctcaaggatcagcagcgtcacaaagtgagggaagaggtggtcacagtgggaaattccgtgaatgaaggactcaaccagcccaccgatgattcctgcttcgatccctatactgtctcgcactacgccgtgggagacgagtgggagcgaatgtccgaatcggggttcaaattgctgtgtcaatgcttgggcttcggcagcggtcattttagatgcgactcatcacggtggtgccacgataacggggttaactacaaaattggcgaaaaatgggatcggcaaggagagaatgggcagatgatgtcatgtacgtgcctcggaaacggcaagggggaatttaaatgcgatccacatgaggctacgtgttacgatgatggtaagacttaccacgtgggagagcagtggcagaaggagtacttgggggcaatctgttcatgtacctgtttcggcggccaacgcgggtggcggtgcgataactgtaggcgacccggcggcgaaccctcacctgaggggaccactggccagagctacaaccagtactcccaacgataccaccagagaaccaacaccaatgtgaactgccccatcgagtgttttatgcctctagatgttcaggctgatcgtgaggatagccgggagtag

SEQ ID NO: 265652 - DNA, 6993 bp, Artificial Sequence
  derived and/or modified sequence
atgttaaggggacctggccctggtctgctcctactcgccgtccaatgccttggtacagccgtgccctcaactggggcttccaaatcaaagaggcaagcacaacagatggtacaaccgcagagtcctgtcgcagtgagtcaaagtaagcccggatgttatgacaatgggaaacattaccaaatcaaccaacagtgggaacggacctatctgggcaatgccttggtctgtacctgctatgggggtagcagggggttcaattgcgagtctaaacccgaagccgaggagacatgctttgacaagtacactggtaatacgtatcgcgtgggtgatacctacgaacgccctaaagacagtatgatttgggattgtacctgcatcggcgctggtcggggacggattagttgcacaatcgccaatcgttgtcacgagggcggacagagctacaagataggtgacacctggcgcagaccacacgagactggcggatacatgcttgagtgtgtgtgccttggcaacggcaaaggtgaatggacatgtaagcctatcgccgaaaagtgctttgaccacgctgctggcacaagctatgttgtgggcgaaacatgggaaaaaccctaccaaggttggatgatggtggattgtacttgcctgggcgagggatccggacgcatcacttgcactagccggaacagatgtaatgatcaggacactcggacttcgtatcgaataggggacacgtggagtaaaaaggacaatcggggaaaccttctgcaatgcatatgtacaggcaacggtcggggagaatggaagtgcgagaggcatacatccgtgcagactacaagctccggcagcggacctttcacagacgttcgcgcagctgtgtaccaacctcagccacacccccagccacctccatacggccattgcgtaacagactctggggtggtttactccgtcggaatgcagtggctcaagacacaggggaacaaacagatgctttgcacttgcctgggcaatggtgtgagttgccaggaaaccgctgtgactcaaacttacgggggtaatagcaacggtgaaccctgtgtacttcccttcacttataatggtaggacattctattcttgcaccaccgaaggacgacaagatggacacttgtggtgtagcacaaccagcaattatgaacaggaccagaagtacagtttttgcacggaccacacagtgctcgtacagacaagagggggaaactccaatggagcactgtgccacttcccttttctgtacaacaaccacaactataccgattgcaccagcgagggaaggagggacaatatgaagtggtgtgggactacacagaactatgatgctgaccaaaagtttggattctgccctatggccgcacacgaagagatctgcactaccaacgaaggcgtgatgtatcggattggtgaccagtgggacaagcaacatgatatgggccacatgatgcggtgcacgtgtgtaggtaacggcagaggcgagtggacttgcattgcctattctcagctccgggatcaatgcatcgtggatgatattacctacaacgtcaacgataccttccacaaaagacacgaggaaggccatatgcttaattgtacctgctttggccagggcaggggcaggtggaaatgcgacccggttgaccaatgccaggacagtgaaaccggaaccttttatcagattggcgatagttgggaaaagtacgtgcatggtgtaagatatcagtgttattgttatggtagaggcatcggagagtggcactgtcagcctctgcagacctacccaagctcttctggtcctgttgaggtcttcatcacagagactccctctcagcccaatagccatccaattcagtggaatgccccacagcctagccacatatctaaatacatcttgcgctggagacctaagaatagcgtgggacggtggaaggaggcaaccatccccggacatctgaacagctacaccatcaagggattgaaacctggagtggtgtatgaagggcagttaatcagtatccagcaatacggccatcaggaggtgactagatttgacttcaccaccacgtcaacctcgactcccgtaaccagtaatacagtaaccggagagaccacccctttttctcctctggtcgcaacttctgaaagtgtgacagagatcacagcgtcatcctttgtggtgagctgggttagcgctagcgatactgtttcagggttccgcgtggagtacgagctgtctgaagagggggatgagcctcagtacctcgacctgccaagtactgcaaccagtgttaacattccagacctgttgcccggacgaaagtacatagtgaacgtgtatcaaatcagtgaggatggagagcagagtctgatcttatcaacctcccaaacaaccgccccagatgcccctcccgacacgacagttgatcaggtcgacgatacatccattgtggtgagatggagtcggcctcaggccccaattacgggttacagaattgtatactccccgagtgttgaagggtcctctactgagttgaacctgccagaaacagccaattccgttaccctaagcgatttgcagcccggtgtccagtacaacatcacgatctacgcggtggaagaaaatcaagagagtaccccagttgtgatccagcaggagacgaccggcacccctcgcagcgacacggtgcctagtccaagagacctgcagtttgtcgaggtaactgacgtgaaggtaaccattatgtggacaccgcctgagtcagccgtgacgggataccgggtggatgtgattcccgtcaaccttcctggcgagcatggccagcggctgcctatatcccgtaacacatttgcagaagtgacaggactcagtccaggcgtcacatactactttaaagtctttgctgtatcacacggacgcgaatcgaaacccttgacggcacagcaaacaaccaagctcgatgccccaaccaatttgcagtttgtgaacgagacagacagcacagttttggttagatggacacccccaagggcacagatcacaggatatcgactcactgttgggctgacacgcagggggcagcctcgacaatacaatgtgggcccttccgtgagtaaatacccactgcgtaaccttcaacccgcatccgagtacacagtttccctggttgcaatcaagggtaatcaggagtctccaaaggccacaggcgtattcacgaccctccaacccggttccagtatacctccatataacaccgaagtgaccgagaccacgatcgtgattacatggactcccgcacccagaatcggttttaagctcggggtgcgccctagccaaggcggtgaagcacccagggaagtgacaagcgattctggcagcatagttgtgtccggtctaacaccgggagtggagtacgtatacacaatccaggtgctgagagacggccaagagcgagacgcacccattgtaaataaggtggtgacccccctctcgcctcctactaatttacacctcgaggccaacccagacactggcgtactcaccgtatcatgggagaggtcaacgactcccgatatcaccggctatcggattaccacgactccaacaaacggtcagcaggggaattctttggaggaagtcgtacacgctgaccagagttcatgcacgttcgataacctgagcccaggactggagtacaacgtgtcagtgtacaccgtcaaggacgataaggagtcagtccctatttctgatacaattatcccggcagtccctccaccaacagatctacgtttcacaaacatcggacccgatactatgcgcgttacttgggccccacccccatccatagacctgacaaattttttagtcagatacagccccgtcaagaatgaagaagacgtggcagagctgtcaatttctccatcggataatgccgtcgtgttgacgaatctcttacctgggacagagtacgtagtttcggtgagcagtgtgtatgagcagcacgagagtactccactgagaggaagacagaaaacagggttggattcaccgactggcatcgacttttctgatatcaccgctaattcattcaccgttcattggatagcgccacgcgctacgattaccggttatcgcatcagacatcaccctgagcattttagtggcagaccaagggaggacagggtgccacactcaaggaactctatcacactgaccaacctgactcccggaactgaatatgtcgtctccatagtggctctcaacggaagggaagaatcccctctgctgataggacagcagtctacggtttctgacgttcctagagaccttgaggtcgtagctgccacacctacgtctctgttaatcagctgggatgctccagcagtgaccgtgaggtattaccgcataacatacggcgaaacgggtgggaacagtccggtgcaagagttcactgtgcccggatccaagtccacagccactattagtggcctcaagcccggagtggattatacgatcacggtgtacgccgtcacaggcagaggggatagtccagcaagctcaaaacctatcagcataaactacagaacagagatcgacaagccctcccagatgcaggtaaccgatgtgcaggataacagcatatctgtcaaatggctgccttcttcatctcccgtcacaggataccgcgtgactaccacacccaagaatgggcctggtccaacaaaaacaaagactgctgggccagaccagaccgaaatgacgattgaggggctccagcccacagtggaatacgtagtatccgtctacgctcaaaatccgtctggggagagccagccattggtgcagacagccgttacaaatatcgatagacctaagggcttagcatttactgacgttgacgtggactctatcaagattgcttgggaaagtccacaaggacaggtgtcacgttaccgggtcacatatagttcacctgaggatggaattcatgagctctttccagcaccagacggcgaggaggacactgctgaattgcagggcctgcggcctggttcggagtacacggtctccgtggttgcattacacgatgacatggaatcccagcctctcatcgggacccagagcactgccattccagcacccacagatctcaagtttacacaggtgacccccacttccctatccgcgcagtggactccccctaacgtgcagttaactgggtaccgggtgagggtaacgccgaaagagaagactggacctatgaaggagatcaatctcgcccctgatagcagtagcgtggtcgtcagcgggctgatggtcgctactaagtatgaggtgtccgtctacgccctgaaggacacgctgacttcaaggccggctcaaggcgtcgtcactaccctcgaaaatgtgtccccgcctaggcgtgcacgcgtgactgacgcaaccgaaaccaccatcaccattagctggcggaccaagaccgagacgataaccggctttcaggtggacgctgttcccgcaaacggccagacacccattcagcgcactatcaaaccggacgtgcgcagctataccatcaccgggctgcagcctggtactgattataagatctacctctatactctgaatgataacgcacgaagtagtcccgttgtgattgacgcttctacagctattgacgctccttccaaccttcggttcctggccaccacccccaattcacttcttgtgagctggcagccaccaagagcccgaatcaccggttatatcatcaagtacgagaaacccggtagcccaccacgcgaggttgtaccaagaccacgacccggagtaaccgaagctacgattacaggcctcgaacctggcacagagtatacaatctacgtcattgccttgaagaataatcagaagtctgaaccgctgattggcagaaagaagactgtccaaaagaccccatttgtcacacatcccggttacgataccggcaacgggattcagcttcctggcacaagtggacagcagccgtctgtggggcagcaaatgatttttgaggagcacggattcaggcggacaaccccccctacaacggcaactcccattcgtcaccgtccgagaccgtacccccctaacgtgggacaggaggctttatctcagactaccatctcttgggcacccttccaggacaccagcgaatacattatcagttgtcatcctgtggggaccgacgaagagccccttcagttccgggtgccgggtaccagcacctctgccacactcactggcctgacccgtggagccacctacaacgtgatcgtcgaagcgctgaaggaccagcagcgccataaagttcgggaagaagtagtgaccgtaggcaactccgtcaacgaggggctgaatcagcccacagatgatagttgttttgatccctacaccgtatcccactacgctgttggggacgaatgggaacgcatgtcggaaagcggctttaagttactttgtcagtgtctgggattcggctcgggacactttcgatgtgattcctcacgctggtgccatgataacggtgtgaactacaagataggagagaagtgggaccgccagggagagaatggccagatgatgtcatgcacttgcctgggcaatggaaagggcgaatttaaatgcgatcctcatgaggccacatgttatgatgacgggaagacttaccatgttggagaacagtggcagaaggagtaccttggcgctatctgctcctgcacctgtttcgggggacagcgcggttggagatgtgataactgcagacgaccagggggagaacctagccccgagggaaccacaggacagtcttacaatcaatacagccagcgctaccaccagcgcaccaataccaatgtcaattgtccgatagagtgctttatgcctctggatgttcaagcggaccgggaggattcacgtgagtaa

SEQ ID NO: 265653 - DNA, 6993 bp, Artificial Sequence
  derived and/or modified sequence
atgctccggggtccaggacctggtttgctgttattggccgtccagtgtttgggcaccgctgttccgtcaactggcgcttccaagtcaaaacggcaggctcagcagatggtacaaccccaatcccctgtcgctgtctcacagtccaagcctggttgctatgacaatgggaagcactatcagattaatcagcagtgggagcgtacttacctcggcaacgcgctggtttgtacctgttatggtggatctcggggcttcaactgtgaaagcaagccagaggcggaggagacatgttttgataagtatacgggaaacacctaccgtgtgggagatacatacgaacgtccaaaggattccatgatctgggactgtacttgtatcggggccgggagggggcggatctcatgcactatcgccaatcgttgtcatgaaggcggtcaatcctataaaattggcgacacatggcgcagaccccacgagacagggggatatatgctggagtgcgtctgcctcggcaacggcaagggcgaatggacctgtaaaccaattgcagagaaatgcttcgaccacgcagccggtacctcctatgtggtcggcgaaacctgggagaaaccatatcaaggctggatgatggtggattgtacatgcttaggtgagggaagtggccggataacatgtacctctcgtaaccggtgcaacgatcaggacacccggacaagttacagaataggcgacacgtggtcaaaaaaggacaataggggtaatcttttgcagtgtatttgtacaggcaatgggaggggtgaatggaagtgtgagagacacacaagcgtccaaaccacgtcatcagggtctggaccattcactgacgtgcgcgctgccgtttaccagccacaacctcatcctcagcctcctccatatgggcactgcgtcaccgactctggtgtcgtctactcggtcggtatgcaatggcttaagacacaggggaataagcagatgttatgtacttgcctgggtaacggcgtgagctgtcaggaaactgctgtgacgcagacatatgggggcaacagtaacggtgagccctgcgtactcccattcacctacaacggccgtacattctactcatgtacaacagagggcaggcaagatggacatctatggtgcagcactactagtaactatgaacaggatcaaaagtactctttctgtaccgaccacacggtgctcgtccagactcgaggcgggaacagtaatggtgccctgtgccacttccctttcctgtataacaaccataattacaccgattgtacctccgaaggccggagggacaatatgaagtggtgtggaactacacagaactacgacgccgaccagaagttcggcttctgcccaatggccgcccacgaagagatatgtaccactaatgaaggcgtgatgtaccgaattggagatcagtgggataagcaacacgatatggggcacatgatgagatgcacttgcgtgggcaatgggcgtggcgagtggacgtgtatcgcgtacagtcagctccgggatcagtgtattgtggatgatattacatacaacgtgaatgacaccttccataagcgccacgaagagggacatatgctgaactgcacatgcttcggccagggacgaggtcggtggaagtgcgatccagtcgatcaatgccaggactcagaaaccggtaccttttatcagataggcgactcttgggaaaagtatgtgcacggcgtgcggtaccagtgctattgctacggtcgtggcattggggaatggcattgccaacccttgcagacttatccttcatcctcgggtcccgtagaagtgtttattactgaaacccctagccaacccaactctcaccctattcagtggaacgccccccagcccagccatatttcaaaatacatcctgcggtggcgcccgaaaaatagtgtcggccgctggaaggaagctaccatccctggccatctgaattcttatacgatcaaaggacttaagccaggggtcgtttacgagggacagttgatatcaattcaacaatatggtcatcaagaagtcactcgttttgacttcaccaccacttccacaagtaccccggtcacatcgaataccgtgacaggggagaccaccccattttcacctctcgtggcgacatcagaatcagtcactgagatcacagctagttctttcgttgtcagttgggtgtccgccagcgataccgtcagtggctttcgagtggaatatgaattgagtgaggaaggcgatgagccacaatatctggatctccccagcacagccacctctgtaaacatccccgatctcctgccaggtaggaaatacatcgtgaatgtttatcagataagcgaggatggggaacagagcttaatcctgtctacctcacagaccaccgcccctgatgcccctccggacaccactgtcgaccaggtcgatgacacctccattgtcgttcgttggagccggccacaggcccctataacaggctatcggattgtctattccccatcagtagaggggagttccacagagttaaacctccccgaaacagcgaactctgtgaccttgtctgacctgcagcccggggtacaatataatataaccatctacgctgtcgaagaaaatcaggagtccacccctgtcgtgatacagcaggagacgaccgggacgccaaggtcagatactgtgccgagtccacgggacctgcagtttgtcgaagtgaccgatgtgaaggtcaccataatgtggactcccccggagagtgccgtgacaggttacagagtggatgttatcccggtgaacttacctggtgagcatggacagcgtctgccaattagtcgtaataccttcgctgaggtgacaggactgtcgcccggggtcacctactatttcaaggtctttgctgttagccacgggcgagaaagcaagcctcttactgcccagcagactaccaagctcgacgcgcctactaatctccagttcgtgaatgagaccgacagcacagttctggtgcggtggacccctcctcgagcccagataaccggctaccggctcacagtggggctgactcgcaggggccaacccagacagtacaacgtaggtccaagcgtgtctaaataccccctcagaaacctgcagcctgcatcggagtatacagtgtcccttgtggccattaaaggtaaccaagaatcacccaaagccaccggagtattcaccacactacagcctggctcatctattcctccttataatactgaggttaccgagaccacgatagtgatcacatggacccctgccccacggatcggcttcaagctcggcgttcggccctcccagggaggcgaggctccccgcgaagtgactagtgatagcggctctatcgttgtgtctgggctcactccaggtgtcgagtacgtgtacaccattcaggtcctccgggatggccaggagcgagatgctcccatcgttaataaggttgttacaccccttagccctcctaccaatcttcacttagaggcaaacccagatacaggagtgctcaccgtttcctgggagagaagtaccactccggacatcactgggtatcggatcactaccactccaacgaacggccagcagggcaactccctggaagaggtggtgcatgcggaccagtcctcctgcacctttgataacctttctcctgggttggagtacaacgtttcagtctataccgtgaaagatgacaaggagtcggttcccatctccgacacgataattccagcggttcctccacccactgatctcagattcacgaacattggaccagataccatgcgcgttacttgggccccaccacctagtattgacctcacgaatttcctggtgaggtactccccggttaaaaatgaggaagacgtagccgaactctccatctcaccctccgacaacgccgtagttttgacgaatctgctgccaggcacagaatatgtggtgtccgtgagcagtgtgtatgaacagcatgaatctactcccctgaggggccggcagaaaactggtctggattctcctacaggtatcgacttcagtgacatcaccgccaactcatttaccgtgcactggatcgcaccccgagcaaccattaccggttatcgcattaggcatcacccagaacatttttcaggtaggcctagagaggatagagtcccacacagcagaaactccatcactctcaccaatctgacaccggggactgagtatgtcgtgagcatagttgcattaaatggcagagaggagagcccactgcttattggccaacaatctaccgtcagtgatgtgccaagagacctagaagtggtcgctgccactccaaccagcctgttgatcagttgggatgcccccgccgtcaccgtgaggtattacagaataacatacggggagaccggaggaaattctccagtccaagaattcacagttcctggctctaaaagtacggcgaccattagcggactcaagcctggcgtcgactataccattaccgtgtacgccgttaccggccggggcgattctcctgcttcgagtaaacctatttctataaactatcggacggagatagataagccctcacagatgcaagttaccgacgtccaagacaatagcattagtgtgaagtggctgccatcatcgtctccggtaacaggatatcgtgtgaccacaacccccaagaacggccctggccccacaaagaccaagactgccgggcctgaccagaccgaaatgacgattgagggcttgcaacccacagtcgaatatgttgtgtccgtctacgcacagaacccaagcggagaaagtcagccgctggtgcagaccgctgtgacaaatatcgacagaccaaaaggccttgccttcaccgatgtggacgtcgatagcataaaaatcgcttgggaaagtcctcagggccaagtctctcgatatagagtgacatacagttcccctgaggatggcattcatgaattgttccctgcgcccgatggcgaggaggacactgctgagctgcagggactgcggcctgggagcgagtacactgttagtgtcgtcgcactgcatgatgatatggagtcgcagccactgatcggaacacagtcgactgccatccccgcgccaactgatctcaaattcactcaagtcacaccaacatccctgagcgcccagtggaccccccccaacgtgcagcttaccggctatcgggtcagagtgacaccaaaggaaaagacaggcccaatgaaggaaattaatcttgctcctgacagctcaagtgtcgttgttagcggattgatggtcgccactaaatatgaagtgtctgtctacgcactcaaagacaccttaacttccagacccgctcagggagtcgtgaccaccctcgaaaacgtttctcctcctagacgtgcacgcgtgaccgacgccacagaaactacaataaccatatcctggcgcacgaaaactgaaacaattaccgggtttcaggttgacgccgtcccagctaacggccaaaccccaattcagcggacgatcaagccagacgtacgatcttacacaatcacaggactccagccaggaactgattataagatctacctttacacccttaacgacaacgccagatcctcaccggtcgtgatcgatgctagcaccgcaattgacgcaccctctaatctccgctttctagccaccactcctaactccttactggtttcttggcaaccacctcgggccaggattactggttacatcatcaaatacgaaaaaccaggctcacccccccgagaagtcgtgccacgccctaggcccggggtgaccgaggcaacgattacaggcttggaacctgggaccgagtatacaatctacgtgattgctctcaaaaataaccaaaaatccgagccattaatagggagaaagaaaactgtgcagaagacacccttcgtgacgcaccccggctacgatactgggaacggaattcaactcccaggaacttctggccaacagccctcagtgggccagcagatgattttcgaggagcatggttttcggcgcacaacacctcctacgacggcaacacctatccgccaccgcccaaggccctatccacccaatgtcggtcaggaggcactgtcgcaaaccacaattagctgggccccgttccaggatacctccgagtatatcatctcatgccatcccgtgggtacagacgaggaacctctccagttccgagtgcctggaaccagcacgtctgccacccttaccgggttaactaggggcgcaacgtacaacgttatcgtagaggctctgaaggaccagcaacgacataaagttcgcgaggaagtggtgaccgtaggtaattcggtgaacgagggactcaatcagcccaccgacgattcctgtttcgatccctataccgtcagtcattatgctgttggggacgagtgggaaagaatgtctgagtccggctttaagctgctctgtcaatgcctcggatttggatctggacacttccgatgtgactccagcaggtggtgccacgacaacggagtgaactataaaattggtgaaaagtgggaccgccaaggtgaaaacggccagatgatgagctgcacctgcctcgggaatggaaaaggggaattcaaatgcgacccacacgaggccacatgttacgacgacgggaaaacctatcacgtcggcgagcagtggcagaaggaatatctcggcgccatctgctcgtgcacctgctttggtgggcagagggggtggcggtgcgacaactgccgaagaccagggggagagccatccccggaaggtacaaccggtcaatcctataaccagtacagccagagataccatcagagaaccaacacaaatgtaaactgccctattgagtgcttcatgcccttagacgtgcaagcagacagagaagattcacgagagtag

SEQ ID NO: 265654 - DNA, 6993 bp, Artificial Sequence
  derived and/or modified sequence
atgctgcgcgggcctggacccggcctgcttttattggccgtgcaatgcctcggtacagccgtgccttctaccggagcttctaagtcaaaaagacaagcccagcagatggtgcaaccacagtcccctgtagcagtgagccagagcaagccaggttgttacgataatggcaaacactaccaaatcaatcagcaatgggaaaggacttatttgggcaacgctctggtatgcacctgttacggtggctctaggggctttaattgtgagtcaaagccagaagccgaagaaacctgtttcgataagtacacagggaatacttatagagtgggagatacttatgagagacctaaagactctatgatctgggattgtacctgcattggagctggaaggggccggatatcctgtacaatcgctaatcggtgtcacgaggggggccagtcttataaaattggtgacacctggagacgacctcacgaaacgggggggtatatgttggaatgcgtttgcctcggaaatggtaagggcgagtggacctgcaaacccatcgcggaaaaatgcttcgaccatgccgcaggaacttcatatgttgtaggagagacatgggagaagccttaccagggatggatgatggtggactgtacttgccttggcgagggcagtggaaggatcacctgtactagcaggaatcggtgcaacgaccaagacacacgcactagttacagaattggcgacacatggagcaaaaaggacaatagaggcaacctcctgcaatgcatttgcacagggaacggtagaggagaatggaaatgtgagagacatacgtcagtgcagacaacatctagtgggtctggaccatttacagatgtgcgggccgccgtctaccagccacagccccacccgcagcctccaccatatggccattgcgtgacagacagtggagtggtctactctgtcggaatgcagtggttgaagactcaagggaataaacagatgttgtgtacatgtctgggaaacggggtctcatgccaagaaactgcagtgacacagacctatggagggaactcgaatggagagccttgtgtgctccctttcacctacaatggccgaactttctatagttgtacaactgagggacgccaggatggacatttatggtgctccacaacttccaactacgaacaagaccagaaatatagcttttgtactgatcacacagtactggttcagactagggggggcaattctaatggagcgttgtgtcattttccattcctttataacaatcacaattacacggactgcacttccgagggcaggcgagataacatgaaatggtgcggaacgacccaaaattatgacgcagatcaaaaatttggcttttgtcctatggcagcacacgaggagatctgcacaaccaacgaaggcgttatgtatcgaattggcgatcagtgggataaacagcacgatatgggacatatgatgcgctgtacctgcgtaggaaatggaagaggagagtggacctgcattgcctattcacaactgagagaccagtgcattgtagatgatataacttacaacgtcaatgatacttttcataaaagacatgaagaaggacatatgctcaactgcacatgttttggtcaggggagaggtcgctggaagtgtgaccctgttgatcagtgccaagattctgaaactgggacgttctaccagatcggcgatagttgggagaagtacgttcacggcgttaggtaccagtgttattgctacggacggggcatcggcgagtggcattgtcagccactccaaacctacccttcctcaagcgggcccgtcgaggtgttcatcacggagactccatcacagcctaactcccatccaatccaatggaatgccccacagccatctcatatatccaagtacatcctcagatggagacctaagaacagcgtggggaggtggaaagaggccacaatccctggacacctgaacagctatactattaagggattaaagccgggtgtcgtatatgaaggtcaattaatttctattcaacagtatgggcatcaggaagtgacacgattcgacttcactacaacctcgacaagtaccccagtaacaagcaacaccgtgaccggtgaaactacacccttctcccctttagtggctacttccgagagtgttactgagataaccgcctcttcattcgtagtgtcttgggtttctgcaagcgatactgtaagtggattcagagtggagtacgagctgagcgaagagggagatgaaccccaatacttggacctgcctagtacagcaacctctgtgaatattcccgaccttctccccggcaggaagtacatagttaacgtttaccaaattagcgaagatggagagcaatccctgatcctgagcacctcccagacgaccgcaccagacgcaccgccagatactaccgtagatcaagtagacgatacatccatcgtggtgaggtggtccagaccccaggcaccaatcacaggttatagaatcgtgtactctccatccgtggaaggcagctctaccgagcttaatttacctgagaccgcaaactctgttactctgtccgacctgcaaccgggtgtgcaatataatattactatttacgcagttgaggagaaccaggaatccacccccgtagttatccaacaggagacgacaggcacacccaggagtgacacagtgcccagcccacgtgatttgcagtttgttgaagtgacagatgttaaagttaccattatgtggactcctccagagagcgccgtaacagggtaccgagttgacgtaatacccgtgaacttgccaggtgagcatggccagcggttgcctatttcaaggaacacattcgcagaagtcactggcttgagccccggcgtcacttattatttcaaagtattcgccgtgagtcatgggcgggaatctaaacctctgaccgcccaacagaccaccaaattagatgcaccaaccaacctgcaatttgttaacgagaccgacagtactgtattagttcgctggactcctcctcgcgctcaaatcaccggatatcgtcttaccgtggggctgacaagacgagggcagccaagacaatataacgtcggacctagcgtcagtaagtatccgctgaggaaccttcaacccgcctctgaatacaccgtgtcattggtggctattaaaggaaaccaggaatctccaaaagcaacaggcgtgtttactactctgcaaccggggtcaagcataccgccctacaacaccgaagtgaccgaaaccacaatcgtgatcacatggacacccgctcctcgaatcggatttaagcttggcgtgaggccctctcagggcggtgaggctccgagggaagtaactagcgacagcggcagcatcgtggtgtccggactgacccccggagtagagtatgtatatacaatccaagtgctaagagacggccaggaacgagacgctccaatagtgaacaaagttgtcacccctctctcacctccgaccaatcttcatctggaagccaacccagacacaggcgtgcttaccgtgtcttgggaaaggtccacaacccctgacattacaggctatagaataactacgaccccaaccaacggccaacaggggaactctctcgaagaagtagtgcatgcagatcagtcttcttgcacttttgataatctctctcccggcctggagtacaatgtaagtgtctacacagtgaaagacgataaagaaagcgtacctatcagcgatactattatacctgcagtccctccaccaactgacctccgatttaccaatataggcccggataccatgcgcgtcacttgggctccacctccgagtatagatttgactaacttcctggtgcggtacagcccagttaaaaacgaagaggacgtggccgagttatccatttctcctagtgataatgctgtggtacttacaaacctcttgcctggaacggagtatgtggtaagcgtttcctccgtgtacgagcagcacgagagcacacccctgagaggccggcagaagacaggtcttgactcccccactggaatcgattttagcgacataactgccaactcctttactgttcattggatcgcaccccgagcaactatcaccggctatcgaattaggcatcaccccgaacatttcagcggccgtccaagagaagaccgagtgcctcattcacgtaacagcatcacattgacaaacctaacccccggcaccgagtacgtagtgtctatcgttgctctaaacggccgcgaggagagtccactgttgatcggacagcagtctacggtttctgatgtgcctcgtgaccttgaagtggtagcggctactccgacctcgcttctgatttcctgggacgctcctgccgttacggtccgctattacaggataacttacggcgagacgggtggaaactcccctgtacaagaatttacagttccaggcagtaaaagcaccgctaccattagtggcctgaaaccaggagtggattatactataaccgtttacgctgtcacaggtcgcggcgattcacccgcctcgagcaagcccatctccattaactaccgcacagagatagacaagccgtcccaaatgcaagttactgatgttcaggataatagtatttccgtgaagtggcttccctcgtcttcccccgtcacaggctatagagttactaccacaccaaaaaatggcccgggaccgactaagacaaaaaccgccggccctgaccaaaccgaaatgacaattgaaggccttcagcctacagtggagtatgtggtgtccgtttatgcgcagaaccctagtggagaatctcaacctctcgtccagacagctgttacgaatattgataggcccaagggcctggcttttacggatgtcgacgtcgacagcattaaaattgcctgggagtcacctcagggacaagttagcagatatagggtcacatactcatcccccgaagatggaatccatgaattgtttccagctcccgacggtgaagaagatactgccgagttacagggcctccgtccaggaagcgaatataccgtgagtgtcgtcgcactgcatgatgatatggagtcgcagccactgatcggaacacagtcgactgccatccccgcgccaactgatctcaaattcactcaagtcacaccaacatccctgagcgcccagtggaccccccccaacgtgcagcttaccggctatcgggtcagagtgacaccaaaggaaaagacaggcccaatgaaggaaattaatcttgctcctgacagctcaagtgtcgttgttagcggattgatggtcgccactaaatatgaagtgtctgtctacgcactcaaagacaccttaacttccagacccgctcagggagtcgtgaccaccctcgaaaacgtttctcctcctagacgtgcacgcgtgaccgacgccacagaaactacaataaccatatcctggcgcacgaaaactgaaacaattaccgggtttcaggttgacgccgtcccagctaacggccaaaccccaattcagcggacgatcaagccagacgtacgatcttacacaatcacaggactccagccaggaactgattataagatctacctttacacccttaacgacaacgccagatcctcaccggtcgtgatcgatgctagcacagcaattgacgccccatctaacttgagatttctcgcaacgactcctaactccctgctggtgtcctggcagcctccaagagccagaataacagggtacatcatcaagtacgaaaaacctggtagtcccccccgcgaagttgtaccccgccctaggcctggcgtcaccgaagccaccattactggattggaacctggaactgagtacaccatctatgtaatagccctcaagaataaccagaaatctgagccactaattgggaggaaaaagactgtccagaagaccccttttgtaacccaccctggatatgatacaggcaatggaattcagcttcccggaacgtcagggcagcagccctcagttggccagcaaatgatattcgaagaacatggattcagacgtaccacccctcccaccactgccacacctattcgccacagacctcggccatatcccccaaatgtgggccaagaagccctgtcgcaaactactatttcatgggcaccctttcaagacacctcggaatatattatttcctgtcacccagttggtaccgatgaagagcctctgcagtttcgcgtgccaggaacctcgacatcagcaacgctaactggtttgaccagaggagcaacatacaatgtgatagtggaggcacttaaagaccagcaacgtcacaaggtcagagaagaagtcgtaaccgtaggcaatagcgttaacgagggtctgaaccagccaactgacgatagttgctttgatccatatacagttagccattacgcagtgggagatgagtgggaacgtatgagcgaaagtggctttaaattgctttgtcagtgcctcggttttggaagcgggcattttcggtgtgattcatctcgttggtgccacgacaacggggttaactataagatcggcgagaagtgggatcggcagggagagaacggacaaatgatgagttgcacatgcctaggcaacggcaaaggtgagttcaagtgcgatcctcacgaggctacgtgctatgatgacggaaaaacatatcacgtaggagagcaatggcaaaaggaatatctgggggctatatgtagttgcacgtgtttcggcgggcagcgggggtggcggtgcgataactgcaggaggccaggaggggaaccctcaccagaggggacaaccggacagagttataaccaatacagtcagcggtatcaccaaagaaccaatacgaatgtaaattgtcccatagaatgtttcatgccattggatgttcaagcagaccgagaagacagccgggagtag

SEQ ID NO: 265655 - RNA, 6993 nt, Artificial Sequence
  derived and/or modified sequence
augcuccgggguccaggaccugguuugcuguuauuggccguccaguguuugggcaccgcuguuccgucaacuggcgcuuccaagucaaaacggcaggcucagcagaugguacaaccccaauccccugucgcugucucacaguccaagccugguugcuaugacaaugggaagcacuaucagauuaaucagcagugggagcguacuuaccucggcaacgcgcugguuuguaccuguuaugguggaucucggggcuucaacugugaaagcaagccagaggcggaggagacauguuuugauaaguauacgggaaacaccuaccgugugggagauacauacgaacguccaaaggauuccaugaucugggacuguacuuguaucggggccgggagggggcggaucucaugcacuaucgccaaucguugucaugaaggcggucaauccuauaaaauuggcgacacauggcgcagaccccacgagacagggggauauaugcuggagugcgucugccucggcaacggcaagggcgaauggaccuguaaaccaauugcagagaaaugcuucgaccacgcagccgguaccuccuauguggucggcgaaaccugggagaaaccauaucaaggcuggaugaugguggauuguacaugcuuaggugagggaaguggccggauaacauguaccucucguaaccggugcaacgaucaggacacccggacaaguuacagaauaggcgacacguggucaaaaaaggacaauagggguaaucuuuugcaguguauuuguacaggcaaugggaggggugaauggaagugugagagacacacaagcguccaaaccacgucaucagggucuggaccauucacugacgugcgcgcugccguuuaccagccacaaccucauccucagccuccuccauaugggcacugcgucaccgacucuggugucgucuacucggucgguaugcaauggcuuaagacacaggggaauaagcagauguuauguacuugccuggguaacggcgugagcugucaggaaacugcugugacgcagacauaugggggcaacaguaacggugagcccugcguacucccauucaccuacaacggccguacauucuacucauguacaacagagggcaggcaagauggacaucuauggugcagcacuacuaguaacuaugaacaggaucaaaaguacucuuucuguaccgaccacacggugcucguccagacucgaggcgggaacaguaauggugcccugugccacuucccuuuccuguauaacaaccauaauuacaccgauuguaccuccgaaggccggagggacaauaugaagugguguggaacuacacagaacuacgacgccgaccagaaguucggcuucugcccaauggccgcccacgaagagauauguaccacuaaugaaggcgugauguaccgaauuggagaucagugggauaagcaacacgauauggggcacaugaugagaugcacuugcgugggcaaugggcguggcgaguggacguguaucgcguacagucagcuccgggaucaguguauuguggaugauauuacauacaacgugaaugacaccuuccauaagcgccacgaagagggacauaugcugaacugcacaugcuucggccagggacgaggucgguggaagugcgauccagucgaucaaugccaggacucagaaaccgguaccuuuuaucagauaggcgacucuugggaaaaguaugugcacggcgugcgguaccagugcuauugcuacggucguggcauuggggaauggcauugccaacccuugcagacuuauccuucauccucgggucccguagaaguguuuauuacugaaaccccuagccaacccaacucucacccuauucaguggaacgccccccagcccagccauauuucaaaauacauccugcgguggcgcccgaaaaauagugucggccgcuggaaggaagcuaccaucccuggccaucugaauucuuauacgaucaaaggacuuaagccaggggucguuuacgagggacaguugauaucaauucaacaauauggucaucaagaagucacucguuuugacuucaccaccacuuccacaaguaccccggucacaucgaauaccgugacaggggagaccaccccauuuucaccucucguggcgacaucagaaucagucacugagaucacagcuaguucuuucguugucaguuggguguccgccagcgauaccgucaguggcuuucgaguggaauaugaauugagugaggaaggcgaugagccacaauaucuggaucuccccagcacagccaccucuguaaacauccccgaucuccugccagguaggaaauacaucgugaauguuuaucagauaagcgaggauggggaacagagcuuaauccugucuaccucacagaccaccgccccugaugccccuccggacaccacugucgaccaggucgaugacaccuccauugucguucguuggagccggccacaggccccuauaacaggcuaucggauugucuauuccccaucaguagaggggaguuccacagaguuaaaccuccccgaaacagcgaacucugugaccuugucugaccugcagcccgggguacaauauaauauaaccaucuacgcugucgaagaaaaucaggaguccaccccugucgugauacagcaggagacgaccgggacgccaaggucagauacugugccgaguccacgggaccugcaguuugucgaagugaccgaugugaaggucaccauaauguggacucccccggagagugccgugacagguuacagaguggauguuaucccggugaacuuaccuggugagcauggacagcgucugccaauuagucguaauaccuucgcugaggugacaggacugucgcccggggucaccuacuauuucaaggucuuugcuguuagccacgggcgagaaagcaagccucuuacugcccagcagacuaccaagcucgacgcgccuacuaaucuccaguucgugaaugagaccgacagcacaguucuggugcgguggaccccuccucgagcccagauaaccggcuaccggcucacaguggggcugacucgcaggggccaacccagacaguacaacguagguccaagcgugucuaaauacccccucagaaaccugcagccugcaucggaguauacagugucccuuguggccauuaaagguaaccaagaaucacccaaagccaccggaguauucaccacacuacagccuggcucaucuauuccuccuuauaauacugagguuaccgagaccacgauagugaucacauggaccccugccccacggaucggcuucaagcucggcguucggcccucccagggaggcgaggcuccccgcgaagugacuagugauagcggcucuaucguugugucugggcucacuccaggugucgaguacguguacaccauucagguccuccgggauggccaggagcgagaugcucccaucguuaauaagguuguuacaccccuuagcccuccuaccaaucuucacuuagaggcaaacccagauacaggagugcucaccguuuccugggagagaaguaccacuccggacaucacuggguaucggaucacuaccacuccaacgaacggccagcagggcaacucccuggaagagguggugcaugcggaccaguccuccugcaccuuugauaaccuuucuccuggguuggaguacaacguuucagucuauaccgugaaagaugacaaggagucgguucccaucuccgacacgauaauuccagcgguuccuccacccacugaucucagauucacgaacauuggaccagauaccaugcgcguuacuugggccccaccaccuaguauugaccucacgaauuuccuggugagguacuccccgguuaaaaaugaggaagacguagccgaacucuccaucucacccuccgacaacgccguaguuuugacgaaucugcugccaggcacagaauaugugguguccgugagcaguguguaugaacagcaugaaucuacuccccugaggggccggcagaaaacuggucuggauucuccuacagguaucgacuucagugacaucaccgccaacucauuuaccgugcacuggaucgcaccccgagcaaccauuaccgguuaucgcauuaggcaucacccagaacauuuuucagguaggccuagagaggauagagucccacacagcagaaacuccaucacucucaccaaucugacaccggggacugaguaugucgugagcauaguugcauuaaauggcagagaggagagcccacugcuuauuggccaacaaucuaccgucagugaugugccaagagaccuagaaguggucgcugccacuccaaccagccuguugaucaguugggaugcccccgccgucaccgugagguauuacagaauaacauacggggagaccggaggaaauucuccaguccaagaauucacaguuccuggcucuaaaaguacggcgaccauuagcggacucaagccuggcgucgacuauaccauuaccguguacgccguuaccggccggggcgauucuccugcuucgaguaaaccuauuucuauaaacuaucggacggagauagauaagcccucacagaugcaaguuaccgacguccaagacaauagcauuagugugaaguggcugccaucaucgucuccgguaacaggauaucgugugaccacaacccccaagaacggcccuggccccacaaagaccaagacugccgggccugaccagaccgaaaugacgauugagggcuugcaacccacagucgaauauguuguguccgucuacgcacagaacccaagcggagaaagucagccgcuggugcagaccgcugugacaaauaucgacagaccaaaaggccuugccuucaccgauguggacgucgauagcauaaaaaucgcuugggaaaguccucagggccaagucucucgauauagagugacauacaguuccccugaggauggcauucaugaauuguucccugcgcccgauggcgaggaggacacugcugagcugcagggacugcggccugggagcgaguacacuguuagugucgucgcacugcaugaugauauggagucgcagccacugaucggaacacagucgacugccauccccgcgccaacugaucucaaauucacucaagucacaccaacaucccugagcgcccaguggaccccccccaacgugcagcuuaccggcuaucgggucagagugacaccaaaggaaaagacaggcccaaugaaggaaauuaaucuugcuccugacagcucaagugucguuguuagcggauugauggucgccacuaaauaugaagugucugucuacgcacucaaagacaccuuaacuuccagacccgcucagggagucgugaccacccucgaaaacguuucuccuccuagacgugcacgcgugaccgacgccacagaaacuacaauaaccauauccuggcgcacgaaaacugaaacaauuaccggguuucagguugacgccgucccagcuaacggccaaaccccaauucagcggacgaucaagccagacguacgaucuuacacaaucacaggacuccagccaggaacugauuauaagaucuaccuuuacacccuuaacgacaacgccagauccucaccggucgugaucgaugcuagcaccgcaauugacgcacccucuaaucuccgcuuucuagccaccacuccuaacuccuuacugguuucuuggcaaccaccucgggccaggauuacugguuacaucaucaaauacgaaaaaccaggcucacccccccgagaagucgugccacgcccuaggcccggggugaccgaggcaacgauuacaggcuuggaaccugggaccgaguauacaaucuacgugauugcucucaaaaauaaccaaaaauccgagccauuaauagggagaaagaaaacugugcagaagacacccuucgugacgcaccccggcuacgauacugggaacggaauucaacucccaggaacuucuggccaacagcccucagugggccagcagaugauuuucgaggagcaugguuuucggcgcacaacaccuccuacgacggcaacaccuauccgccaccgcccaaggcccuauccacccaaugucggucaggaggcacugucgcaaaccacaauuagcugggccccguuccaggauaccuccgaguauaucaucucaugccaucccguggguacagacgaggaaccucuccaguuccgagugccuggaaccagcacgucugccacccuuaccggguuaacuaggggcgcaacguacaacguuaucguagaggcucugaaggaccagcaacgacauaaaguucgcgaggaaguggugaccguagguaauucggugaacgagggacucaaucagcccaccgacgauuccuguuucgaucccuauaccgucagucauuaugcuguuggggacgagugggaaagaaugucugaguccggcuuuaagcugcucugucaaugccucggauuuggaucuggacacuuccgaugugacuccagcagguggugccacgacaacggagugaacuauaaaauuggugaaaagugggaccgccaaggugaaaacggccagaugaugagcugcaccugccucgggaauggaaaaggggaauucaaaugcgacccacacgaggccacauguuacgacgacgggaaaaccuaucacgucggcgagcaguggcagaaggaauaucucggcgccaucugcucgugcaccugcuuuggugggcagaggggguggcggugcgacaacugccgaagaccagggggagagccauccccggaagguacaaccggucaauccuauaaccaguacagccagagauaccaucagagaaccaacacaaauguaaacugcccuauugagugcuucaugcccuuagacgugcaagcagacagagaagauucacgagaguag

SEQ ID NO: 265656 - RNA, 6993 nt, Artificial Sequence
  derived and/or modified sequence
augcugcgcgggccuggacccggccugcuuuuauuggccgugcaaugccucgguacagccgugccuucuaccggagcuucuaagucaaaaagacaagcccagcagauggugcaaccacaguccccuguagcagugagccagagcaagccagguuguuacgauaauggcaaacacuaccaaaucaaucagcaaugggaaaggacuuauuugggcaacgcucugguaugcaccuguuacgguggcucuaggggcuuuaauugugagucaaagccagaagccgaagaaaccuguuucgauaaguacacagggaauacuuauagagugggagauacuuaugagagaccuaaagacucuaugaucugggauuguaccugcauuggagcuggaaggggccggauauccuguacaaucgcuaaucggugucacgaggggggccagucuuauaaaauuggugacaccuggagacgaccucacgaaacggggggguauauguuggaaugcguuugccucggaaaugguaagggcgaguggaccugcaaacccaucgcggaaaaaugcuucgaccaugccgcaggaacuucauauguuguaggagagacaugggagaagccuuaccagggauggaugaugguggacuguacuugccuuggcgagggcaguggaaggaucaccuguacuagcaggaaucggugcaacgaccaagacacacgcacuaguuacagaauuggcgacacauggagcaaaaaggacaauagaggcaaccuccugcaaugcauuugcacagggaacgguagaggagaauggaaaugugagagacauacgucagugcagacaacaucuagugggucuggaccauuuacagaugugcgggccgccgucuaccagccacagccccacccgcagccuccaccauauggccauugcgugacagacaguggaguggucuacucugucggaaugcagugguugaagacucaagggaauaaacagauguuguguacaugucugggaaacggggucucaugccaagaaacugcagugacacagaccuauggagggaacucgaauggagagccuugugugcucccuuucaccuacaauggccgaacuuucuauaguuguacaacugagggacgccaggauggacauuuauggugcuccacaacuuccaacuacgaacaagaccagaaauauagcuuuuguacugaucacacaguacugguucagacuagggggggcaauucuaauggagcguugugucauuuuccauuccuuuauaacaaucacaauuacacggacugcacuuccgagggcaggcgagauaacaugaaauggugcggaacgacccaaaauuaugacgcagaucaaaaauuuggcuuuuguccuauggcagcacacgaggagaucugcacaaccaacgaaggcguuauguaucgaauuggcgaucagugggauaaacagcacgauaugggacauaugaugcgcuguaccugcguaggaaauggaagaggagaguggaccugcauugccuauucacaacugagagaccagugcauuguagaugauauaacuuacaacgucaaugauacuuuucauaaaagacaugaagaaggacauaugcucaacugcacauguuuuggucaggggagaggucgcuggaagugugacccuguugaucagugccaagauucugaaacugggacguucuaccagaucggcgauaguugggagaaguacguucacggcguuagguaccaguguuauugcuacggacggggcaucggcgaguggcauugucagccacuccaaaccuacccuuccucaagcgggcccgucgagguguucaucacggagacuccaucacagccuaacucccauccaauccaauggaaugccccacagccaucucauauauccaaguacauccucagauggagaccuaagaacagcguggggagguggaaagaggccacaaucccuggacaccugaacagcuauacuauuaagggauuaaagccgggugucguauaugaaggucaauuaauuucuauucaacaguaugggcaucaggaagugacacgauucgacuucacuacaaccucgacaaguaccccaguaacaagcaacaccgugaccggugaaacuacacccuucuccccuuuaguggcuacuuccgagaguguuacugagauaaccgccucuucauucguagugucuuggguuucugcaagcgauacuguaaguggauucagaguggaguacgagcugagcgaagagggagaugaaccccaauacuuggaccugccuaguacagcaaccucugugaauauucccgaccuucuccccggcaggaaguacauaguuaacguuuaccaaauuagcgaagauggagagcaaucccugauccugagcaccucccagacgaccgcaccagacgcaccgccagauacuaccguagaucaaguagacgauacauccaucguggugaggugguccagaccccaggcaccaaucacagguuauagaaucguguacucuccauccguggaaggcagcucuaccgagcuuaauuuaccugagaccgcaaacucuguuacucuguccgaccugcaaccgggugugcaauauaauauuacuauuuacgcaguugaggagaaccaggaauccacccccguaguuauccaacaggagacgacaggcacacccaggagugacacagugcccagcccacgugauuugcaguuuguugaagugacagauguuaaaguuaccauuauguggacuccuccagagagcgccguaacaggguaccgaguugacguaauacccgugaacuugccaggugagcauggccagcgguugccuauuucaaggaacacauucgcagaagucacuggcuugagccccggcgucacuuauuauuucaaaguauucgccgugagucaugggcgggaaucuaaaccucugaccgcccaacagaccaccaaauuagaugcaccaaccaaccugcaauuuguuaacgagaccgacaguacuguauuaguucgcuggacuccuccucgcgcucaaaucaccggauaucgucuuaccguggggcugacaagacgagggcagccaagacaauauaacgucggaccuagcgucaguaaguauccgcugaggaaccuucaacccgccucugaauacaccgugucauugguggcuauuaaaggaaaccaggaaucuccaaaagcaacaggcguguuuacuacucugcaaccggggucaagcauaccgcccuacaacaccgaagugaccgaaaccacaaucgugaucacauggacacccgcuccucgaaucggauuuaagcuuggcgugaggcccucucagggcggugaggcuccgagggaaguaacuagcgacagcggcagcaucgugguguccggacugacccccggaguagaguauguauauacaauccaagugcuaagagacggccaggaacgagacgcuccaauagugaacaaaguugucaccccucucucaccuccgaccaaucuucaucuggaagccaacccagacacaggcgugcuuaccgugucuugggaaagguccacaaccccugacauuacaggcuauagaauaacuacgaccccaaccaacggccaacaggggaacucucucgaagaaguagugcaugcagaucagucuucuugcacuuuugauaaucucucucccggccuggaguacaauguaagugucuacacagugaaagacgauaaagaaagcguaccuaucagcgauacuauuauaccugcagucccuccaccaacugaccuccgauuuaccaauauaggcccggauaccaugcgcgucacuugggcuccaccuccgaguauagauuugacuaacuuccuggugcgguacagcccaguuaaaaacgaagaggacguggccgaguuauccauuucuccuagugauaaugcugugguacuuacaaaccucuugccuggaacggaguaugugguaagcguuuccuccguguacgagcagcacgagagcacaccccugagaggccggcagaagacaggucuugacucccccacuggaaucgauuuuagcgacauaacugccaacuccuuuacuguucauuggaucgcaccccgagcaacuaucaccggcuaucgaauuaggcaucaccccgaacauuucagcggccguccaagagaagaccgagugccucauucacguaacagcaucacauugacaaaccuaacccccggcaccgaguacguagugucuaucguugcucuaaacggccgcgaggagaguccacuguugaucggacagcagucuacgguuucugaugugccucgugaccuugaagugguagcggcuacuccgaccucgcuucugauuuccugggacgcuccugccguuacgguccgcuauuacaggauaacuuacggcgagacggguggaaacuccccuguacaagaauuuacaguuccaggcaguaaaagcaccgcuaccauuaguggccugaaaccaggaguggauuauacuauaaccguuuacgcugucacaggucgcggcgauucacccgccucgagcaagcccaucuccauuaacuaccgcacagagauagacaagccgucccaaaugcaaguuacugauguucaggauaauaguauuuccgugaaguggcuucccucgucuucccccgucacaggcuauagaguuacuaccacaccaaaaaauggcccgggaccgacuaagacaaaaaccgccggcccugaccaaaccgaaaugacaauugaaggccuucagccuacaguggaguaugugguguccguuuaugcgcagaacccuaguggagaaucucaaccucucguccagacagcuguuacgaauauugauaggcccaagggccuggcuuuuacggaugucgacgucgacagcauuaaaauugccugggagucaccucagggacaaguuagcagauauagggucacauacucaucccccgaagauggaauccaugaauuguuuccagcucccgacggugaagaagauacugccgaguuacagggccuccguccaggaagcgaauauaccgugagugucgucgcacugcaugaugauauggagucgcagccacugaucggaacacagucgacugccauccccgcgccaacugaucucaaauucacucaagucacaccaacaucccugagcgcccaguggaccccccccaacgugcagcuuaccggcuaucgggucagagugacaccaaaggaaaagacaggcccaaugaaggaaauuaaucuugcuccugacagcucaagugucguuguuagcggauugauggucgccacuaaauaugaagugucugucuacgcacucaaagacaccuuaacuuccagacccgcucagggagucgugaccacccucgaaaacguuucuccuccuagacgugcacgcgugaccgacgccacagaaacuacaauaaccauauccuggcgcacgaaaacugaaacaauuaccggguuucagguugacgccgucccagcuaacggccaaaccccaauucagcggacgaucaagccagacguacgaucuuacacaaucacaggacuccagccaggaacugauuauaagaucuaccuuuacacccuuaacgacaacgccagauccucaccggucgugaucgaugcuagcacagcaauugacgccccaucuaacuugagauuucucgcaacgacuccuaacucccugcugguguccuggcagccuccaagagccagaauaacaggguacaucaucaaguacgaaaaaccugguagucccccccgcgaaguuguaccccgcccuaggccuggcgucaccgaagccaccauuacuggauuggaaccuggaacugaguacaccaucuauguaauagcccucaagaauaaccagaaaucugagccacuaauugggaggaaaaagacuguccagaagaccccuuuuguaacccacccuggauaugauacaggcaauggaauucagcuucccggaacgucagggcagcagcccucaguuggccagcaaaugauauucgaagaacauggauucagacguaccaccccucccaccacugccacaccuauucgccacagaccucggccauaucccccaaaugugggccaagaagcccugucgcaaacuacuauuucaugggcacccuuucaagacaccucggaauauauuauuuccugucacccaguugguaccgaugaagagccucugcaguuucgcgugccaggaaccucgacaucagcaacgcuaacugguuugaccagaggagcaacauacaaugugauaguggaggcacuuaaagaccagcaacgucacaaggucagagaagaagucguaaccguaggcaauagcguuaacgagggucugaaccagccaacugacgauaguugcuuugauccauauacaguuagccauuacgcagugggagaugagugggaacguaugagcgaaaguggcuuuaaauugcuuugucagugccucgguuuuggaagcgggcauuuucggugugauucaucucguuggugccacgacaacgggguuaacuauaagaucggcgagaagugggaucggcagggagagaacggacaaaugaugaguugcacaugccuaggcaacggcaaaggugaguucaagugcgauccucacgaggcuacgugcuaugaugacggaaaaacauaucacguaggagagcaauggcaaaaggaauaucugggggcuauauguaguugcacguguuucggcgggcagcggggguggcggugcgauaacugcaggaggccaggaggggaacccucaccagaggggacaaccggacagaguuauaaccaauacagucagcgguaucaccaaagaaccaauacgaauguaaauugucccauagaauguuucaugccauuggauguucaagcagaccgagaagacagccgggaguag

SEQ ID NO: 265657 - protein, 567 aa, Artificial Sequence
  derived and/or modified sequence
MARLTKRRQADTKAIQHLWAAIEIIRNQKQIANIDRITKYMSRVHGMHPKETTRQLSLAVKDGLIVETLTVGCKGSKAGIEQEGYWLPGDEIDWETENHDWYCFECHLPGEVLICDLCFRVYHSKCLSDEFRLRDSSSPWQCPVCRSIKKKNTNKQEMGTYLRFIVSRMKERAIDLNKKGKDNKHPMYRRLVHSAVDVPTIQEKVNEGKYRSYEEFKADAQLLLHNTVIFYGDSEQADIARMLYKDTCHELDELQLCKNCFYLSNARPDNWFCYPCIPNHELVWAKMKGFGFWPAKVMQKEDNQVDVRFFGHHHQRAWIPSENIQDITVNIHRLHVKRSMGWKKACDELELHQRFLREGRFWKSKNEDRGEEEAESSISSTSNEQLKVTQEPRAKKGRRNQSVEPKKEEPEPETEAVSSSQEIPTMPQPIEKVSVSTQTKKLSASSPRMLHRSTQTTNDGVCQSMCHDKYTKIFNDFKDRMKSDHKRETERVVREALEKLRSEMEEEKRQAVNKAVANMQGEMDRKCKQVKEKCKEEFVEEIKKLATQHKQLISQTKKKQWVNTSLF

SEQ ID NO: 265658 - DNA, 1704 bp, Artificial Sequence
  derived and/or modified sequence
atggccagactgaccaagagaagacaggccgacaccaaggccatccagcacctgtgggccgccatcgagatcatcagaaaccagaagcagatcgccaacatcgacagaatcaccaagtacatgagcagagtgcacggcatgcaccccaaggagaccaccagacagctgagcctggccgtgaaggacggcctgatcgtggagaccctgaccgtgggctgcaagggcagcaaggccggcatcgagcaggagggctactggctgcccggcgacgagatcgactgggagaccgagaaccacgactggtactgcttcgagtgccacctgcccggcgaggtgctgatctgcgacctgtgcttcagagtgtaccacagcaagtgcctgagcgacgagttcagactgagagacagcagcagcccctggcagtgccccgtgtgcagaagcatcaagaagaagaacaccaacaagcaggagatgggcacctacctgagattcatcgtgagcagaatgaaggagagagccatcgacctgaacaagaagggcaaggacaacaagcaccccatgtacagaagactggtgcacagcgccgtggacgtgcccaccatccaggagaaggtgaacgagggcaagtacagaagctacgaggagttcaaggccgacgcccagctgctgctgcacaacaccgtgatcttctacggcgacagcgagcaggccgacatcgccagaatgctgtacaaggacacctgccacgagctggacgagctgcagctgtgcaagaactgcttctacctgagcaacgccagacccgacaactggttctgctacccctgcatccccaaccacgagctggtgtgggccaagatgaagggcttcggcttctggcccgccaaggtgatgcagaaggaggacaaccaggtggacgtgagattcttcggccaccaccaccagagagcctggatccccagcgagaacatccaggacatcaccgtgaacatccacagactgcacgtgaagagaagcatgggctggaagaaggcctgcgacgagctggagctgcaccagagattcctgagagagggcagattctggaagagcaagaacgaggacagaggcgaggaggaggccgagagcagcatcagcagcaccagcaacgagcagctgaaggtgacccaggagcccagagccaagaagggcagaagaaaccagagcgtggagcccaagaaggaggagcccgagcccgagaccgaggccgtgagcagcagccaggagatccccaccatgccccagcccatcgagaaggtgagcgtgagcacccagaccaagaagctgagcgccagcagccccagaatgctgcacagaagcacccagaccaccaacgacggcgtgtgccagagcatgtgccacgacaagtacaccaagatcttcaacgacttcaaggacagaatgaagagcgaccacaagagagagaccgagagagtggtgagagaggccctggagaagctgagaagcgagatggaggaggagaagagacaggccgtgaacaaggccgtggccaacatgcagggcgagatggacagaaagtgcaagcaggtgaaggagaagtgcaaggaggagttcgtggaggagatcaagaagctggccacccagcacaagcagctgatcagccagaccaagaagaagcagtgggtgaacaccagcctgttctag

SEQ ID NO: 265659 - DNA, 1704 bp, Artificial Sequence
  derived and/or modified sequence
atggcccggttaactaagcggcggcaggccgatacgaaagcaattcagcacctttgggcagcaattgaaattattcgcaatcagaagcaaatcgcaaatatagatcggattaccaagtatatgtccagggtgcacggcatgcatccaaaagagacaacgaggcagctctccctcgctgtgaaggacggcctgatcgtcgaaactttaaccgtgggctgtaaggggagcaaggcaggaatcgagcaggagggatattggctgccgggagacgaaatcgactgggaaactgagaaccatgattggtattgttttgagtgccacctgccaggggaagtgttaatctgcgatttatgcttccgtgtttatcacagcaagtgcctaagcgacgagtttaggcttcgagacagttcaagtccctggcagtgtccagtctgtagaagcatcaagaagaaaaatacaaataagcaggagatgggcacctatctgcggttcatcgtttctaggatgaaagagcgtgctatcgacctgaacaagaaaggaaaagataacaaacaccctatgtacaggcgattggtccattctgcggtggacgtgccaaccatccaggaaaaagtgaatgagggcaagtaccgatcctatgaggaatttaaggccgatgctcaacttctattacataatacggttattttctatggtgatagtgagcaggcagatatcgcgaggatgctttacaaggacacatgccacgagcttgatgaacttcagctctgcaagaactgcttctacctatccaatgcacgtcccgacaattggttttgctatccttgtatccctaatcatgagctggtctgggcaaagatgaaaggatttggcttctggcccgccaaggtgatgcaaaaggaggacaaccaggtggatgtgagattcttcgggcaccatcaccagagggcatggattccaagtgagaacattcaagacattacagtcaatattcatcgcttgcacgtcaagcgatccatgggttggaagaaagcctgtgatgagctagaactgcaccagagattcctgagagaggggaggttctggaagagtaaaaatgaagatcgaggggaagaagaagccgaatcaagtattagctctactagcaacgagcagttaaaggtgactcaggagccccgcgctaaaaagggaagacggaaccagagcgttgaacctaaaaaagaggagccagagccagagactgaagcagtgtccagtagccaggagatccctaccatgccccagcctattgaaaaggtttcagtgtccacccaaaccaaaaagctaagtgccagttcaccccggatgctccataggtccacgcaaactactaatgacggagtttgccagagcatgtgccacgataaatataccaaaatttttaacgactttaaggaccggatgaaaagtgatcacaaaagggagacagaaagagtcgttcgcgaagctctcgaaaagttgagaagtgaaatggaagaggagaaaaggcaggccgtcaacaaggctgtggctaatatgcagggcgaaatggataggaaatgtaagcaagtgaaggagaaatgtaaagaagaattcgttgaggagatcaaaaagttagccactcagcataaacagctgatctcacagaccaagaagaagcaatgggtgaacacgtcacttttttag

SEQ ID NO: 265660 - DNA, 1704 bp, Artificial Sequence
  derived and/or modified sequence
atggcccggctgaccaagaggcggcaggccgacaccaaggccatccagcacctgtgggccgccatcgagatcatccggaaccagaagcagatcgccaacatcgaccgcatcaccaagtacatgagccgggtgcacggcatgcaccccaaggagaccacccggcagctgagcctggccgtgaaggatggcctgattgtggagaccctgactgtgggctgcaagggcagcaaggccggcatcgagcaggagggctactggctgcctggagatgaaattgactgggagacagaaaatcatgactggtactgctttgagtgccacctgcctggagaggtgctgatctgtgacctgtgcttccgggtgtaccacagcaagtgcctgagtgatgagttccggctgcgggacagcagcagcccctggcagtgccctgtgtgccgcagcatcaagaagaagaacaccaacaagcaggagatgggcacctacctgcgcttcatcgtgtccaggatgaaggagcgggccatcgacctgaacaagaagggcaaggacaacaagcaccccatgtacagaaggctggtgcacagcgctgtggatgtgcccaccatccaggagaaggtgaatgaaggcaagtaccgctcctatgaggagttcaaggcagatgcccagctgctgctgcacaacacagtcatcttctatggagacagcgagcaggccgacatcgccaggatgctgtacaaggacacctgccacgagctggatgagctgcagctgtgcaagaactgcttctacctgagcaatgcccggccagacaactggttctgctacccctgcatccccaaccacgagctggtgtgggccaagatgaagggcttcggcttctggccagccaaggtgatgcagaaggaggacaaccaggtggatgtgcgcttcttcggccaccaccaccagagggcctggatccccagcgagaacatccaggacatcaccgtgaacatccaccggctgcacgtgaagaggtccatgggctggaagaaggcctgtgatgagctggagctgcaccagcgcttcctgcgggagggccgcttctggaagagcaagaatgaagatagaggagaggaggaggccgagagcagcatcagcagcaccagcaatgagcagctgaaggtgacccaggagccccgggccaagaagggcagaagaaaccagagcgtggagcccaagaaggaggagcctgagcctgagacagaggccgtgagcagcagccaggagatccccaccatgccccagcccatcgagaaggtgtctgtgtccacccagaccaagaagctgagcgccagcagccccaggatgctgcacaggagcacccagaccaccaatgatggagtgtgccagagcatgtgccacgacaagtacaccaagatcttcaatgacttcaaggacaggatgaagagtgaccacaagcgggagacagagcgggtggtgcgggaggccctggagaagctgcggtctgagatggaggaggagaagaggcaggccgtgaacaaggctgtggccaacatgcagggcgagatggacaggaagtgcaagcaggtgaaggagaagtgcaaggaggagtttgtggaggagatcaagaagctggccacccagcacaagcagctgatcagccagaccaagaagaagcagtgggtgaacaccagcctcttctag

SEQ ID NO: 265661 - DNA, 1704 bp, Artificial Sequence
  derived and/or modified sequence
atggcccggctgaccaagcggcggcaggccgacaccaaggccatccagcatctctgggccgctatcgagatcatcagaaaccagaagcagattgcaaatattgatagaattacaaagtatatgtcgagggtccatgggatgcacccaaaggaaactactcggcaattgtcactggccgtgaaagacgggctgatagtagaaacactcaccgtgggctgcaagggcagtaaagcaggaatcgagcaagaggggtactggctgccgggcgatgaaatcgattgggaaaccgaaaaccacgattggtactgctttgagtgccacctgccaggcgaagtgctcatatgtgacctctgttttagggtatatcatagcaagtgcctctcagatgaatttcggctgcgggactcatcatccccgtggcagtgccctgtgtgtaggtctatcaagaaaaagaatactaataaacaggaaatgggaacctaccttaggttcattgtaagccgtatgaaagagagagccatagatttgaataaaaaaggcaaagataacaagcacccaatgtaccgcagactcgtacacagcgccgtggatgtacccacaatccaggaaaaagttaatgaggggaaataccggtcctatgaagagtttaaagcagatgcccagctgctcctgcataatacagtgatcttctatggagatagtgaacaggccgacattgccagaatgctgtacaaagacacctgtcatgaactggatgagctgcagctctgtaaaaattgtttctatctctcaaacgcccggccagataattggttctgttacccttgcatacctaaccacgagcttgtctgggccaaaatgaaggggtttggtttttggcctgcaaaggtgatgcagaaggaagataaccaggtggacgtgaggttcttcgggcaccatcaccaaagggcttggatcccatctgaaaacatccaggatatcaccgtcaacatccaccggttgcatgttaaacgctcaatgggatggaaaaaggcctgtgacgaactggagctgcatcaacgtttcttacgggagggaagattttggaagtcaaaaaatgaggaccgcggcgaagaagaggccgagtctagcatctcttcaactagcaacgagcagctgaaggttacccaggaacctcgcgccaagaaaggacggaggaaccagagcgtggagccaaagaaggaggaacctgagcccgaaacagaagccgtgtcttcgtcccaggagatacccactatgccacagccaatcgagaaggtttcagtgtctactcagacaaagaagctaagcgctagttcccctcgaatgttgcaccgctccacccagacgacaaacgatggcgtgtgccaaagcatgtgtcacgacaaatacacaaagatcttcaatgatttcaaagaccgaatgaagtccgaccataagcgggagacagagagagtagttcgcgaagccttggagaagcttcgttctgaaatggaagaagaaaagagacaggccgtcaacaaggccgtcgctaatatgcagggcgagatggatcggaagtgcaaacaagtgaaggaaaaatgcaaagaggagttcgtagaagagattaagaaattggcaacacaacataaacaactgataagccagaccaagaagaaacaatgggtcaatacttcattattctag

SEQ ID NO: 265662 - DNA, 1704 bp, Artificial Sequence
  derived and/or modified sequence
atggccaggctgacaaaacggaggcaagctgatacaaaggccattcagcacctgtgggctgccattgagattataaggaatcagaaacaaatcgcgaacatcgataggatcacaaagtatatgtctcgcgtgcatggcatgcaccccaaagagacaacgcggcagttgagcctagcggtgaaagacggtctgatcgtcgaaaccctgacagtaggctgcaagggttcgaaggcgggaattgaacaggaaggctactggctccctggggacgagattgattgggaaacggaaaaccacgactggtactgcttcgaatgccatctgccaggggaggtgctgatctgtgacctgtgcttccgtgtgtaccactcaaagtgcctaagcgatgaattccgattgcgcgactcttcttcaccatggcagtgccctgtctgccgttctataaaaaaaaagaatactaacaaacaggaaatgggtacttatttgcggttcatagtctcccgtatgaaagagagggcaatcgacctgaacaagaagggtaaagacaacaagcaccccatgtatcgcaggcttgtgcatagcgccgtggacgtacccacaatacaagagaaggtcaatgagggcaagtacaggagctacgaggagttcaaagccgacgctcaacttctgttgcacaatactgtgatattctacggagatagcgaacaggcagacatagcaagaatgctgtataaagacacatgccacgagctggatgaattacagctatgtaagaactgtttttatctcagcaatgcccgacccgacaactggttttgttatccttgcattcccaaccacgagcttgtttgggcgaaaatgaaggggtttggcttttggcccgctaaagtgatgcagaaggaagataaccaggttgacgtccggttctttggacaccaccatcagagagcctggattccaagcgaaaacatccaggacataacagttaatatccaccggctgcacgtcaaacggtctatgggctggaagaaggcttgcgacgagttggagcttcaccagcgctttctgcgtgaaggccgtttctggaaatctaagaatgaggatagaggagaagaggaagcagagagctctattagctctacctccaacgagcagcttaaagtgacacaagagccacgagcgaaaaaaggtaggcgcaaccagtcagtcgagcccaagaaggaggaacccgagcccgaaacagaagcagtctcctcttctcaagagattccaactatgccacaaccgattgagaaagtctccgtttcgacccagacaaaaaagctctcagcgtccagcccaaggatgttgcaccggagtacccaaacaacgaacgacggggtctgtcagtcaatgtgtcacgataagtataccaagatttttaatgactttaaggacaggatgaagagcgatcataaacgcgagaccgaaagggtagtccgagaagcactggagaagctacgcagcgagatggaggaggagaaaagacaggctgtcaataaggccgtggccaacatgcaaggggagatggatagaaaatgcaaacaagtcaaagagaagtgcaaagaagaattcgtggaagagattaaaaagctcgcaacccagcataagcagctgatcagccagactaaaaagaagcaatgggtcaatacttcactgttctag

SEQ ID NO: 265663 - DNA, 2065 bp, Artificial Sequence
  derived and/or modified sequence
ccggggctgagctgcggcggcgcctgacaatgccccctcgcgccccggcctcggcgcccgctcccggctccagcgcgcctgcacgtacgtagccttcacgtgtgtgtggatacggagtgcatgtgtggagacagaggaatatgctccaacaaatttcggatagaggcgccgaagacaggacgtggggaagctaaagaagtaaacaggtcatggcacgtttaacaaaaagacgacaggcggatacaaaagctatccagcatctttgggcagccattgagattatacggaaccagaagcagattgccaacattgaccgtattacaaagtatatgtctcgagtccacggtatgcaccctaaagagaccacccgtcagctgagcttagctgtgaaagatggtcttattgtcgaaactctaacagtgggctgcaaaggttcaaaagctggtattgaacaagaaggatattggttgccaggagatgagattgactgggaaacagaaaatcatgactggtattgttttgaatgccatttgcctggagaggtgttgatatgtgacctgtgttttcgtgtgtatcattccaagtgtttgtctgatgagttcaggcttagagacagcagtagtccctggcagtgcccagtttgcaggagcattaagaagaagaatacaaacaaacaggagatgggcacatacctcagattcattgtctcccgcatgaaggagagggctatagatcttaataaaaaggggaaggacaataaacacccgatgtacaggaggctggtgcactcagctgtggacgttcccaccattcaagagaaagtgaatgaagggaaataccgaagttatgaagagttcaaagctgatgcccaattgcttctccacaataccgtgattttctatggagacagtgagcaagctgacattgcgaggatgctatataaagacacatgtcatgagctggatgaactgcagctttgcaagaattgcttttacttgtcaaatgctcgtcctgacaactggttctgttatccttgtatacctaatcatgagctggtttgggctaaaatgaaaggttttgggttttggccagccaaagtcatgcagaaagaagacaatcaagtcgacgttcgcttctttggccaccaccaccagagggcctggattccttctgaaaacattcaagatatcacagtcaacattcatcggctgcacgtgaagcgcagtatgggttggaaaaaggcctgtgatgagctggagctgcatcagcgtttcctacgagaagggagattttggaaatctaagaatgaggaccgaggtgaggaagaggcagaatccagtatctcctccaccagtaatgagcagctaaaggtcactcaagaaccaagagcaaagaaaggacgacgtaatcaaagtgtggagcccaaaaaggaagaaccagagcctgaaacagaagcagtaagttctagccaggaaatacccacgatgcctcagcccatcgaaaaagtctccgtgtcaactcagacaaagaagttaagtgcctcttcaccaagaatgctgcatcggagcacccagaccacaaacgacggcgtgtgtcagagcatgtgccatgacaaatacaccaagatcttcaatgacttcaaagaccggatgaagtcggaccacaagcgggagacagagcgtgttgtccgagaagctctggagaagctgcgttctgaaatggaagaagaaaagagacaagctgtaaataaagctgtagccaacatgcagggtgagatggacagaaaatgtaagcaagtaaaggaaaagtgtaaggaagaatttgtagaagaaatcaagaagctggcaacacagcacaagcaactgatttctcagaccaagaagaagcagtgggtaaataccagtcttttttagacccttatttctgaaaatgtaccacaggtatgatgcccgttaattcagaaggtagctgtggcacatgcagaagatgtttctgaaataagatcaaatgtgaaatggtcagctttagttttaaaaattttattaaaagtcctatgatctctcaa

SEQ ID NO: 265664 - protein, 2477 aa, Artificial Sequence
  derived and/or modified sequence
MLRGPGPGLLLLAVQCLGTAVPSTGASKSKRQAQQMVQPQSPVAVSQSKPGCYDNGKHYQINQQWERTYLGNALVCTCYGGSRGFNCESKPEAEETCFDKYTGNTYRVGDTYERPKDSMIWDCTCIGAGRGRISCTIANRCHEGGQSYKIGDTWRRPHETGGYMLECVCLGNGKGEWTCKPIAEKCFDHAAGTSYVVGETWEKPYQGWMMVDCTCLGEGSGRITCTSRNRCNDQDTRTSYRIGDTWSKKDNRGNLLQCICTGNGRGEWKCERHTSVQTTSSGSGPFTDVRAAVYQPQPHPQPPPYGHCVTDSGVVYSVGMQWLKTQGNKQMLCTCLGNGVSCQETAVTQTYGGNSNGEPCVLPFTYNGRTFYSCTTEGRQDGHLWCSTTSNYEQDQKYSFCTDHTVLVQTRGGNSNGALCHFPFLYNNHNYTDCTSEGRRDNMKWCGTTQNYDADQKFGFCPMAAHEEICTTNEGVMYRIGDQWDKQHDMGHMMRCTCVGNGRGEWTCIAYSQLRDQCIVDDITYNVNDTFHKRHEEGHMLNCTCFGQGRGRWKCDPVDQCQDSETGTFYQIGDSWEKYVHGVRYQCYCYGRGIGEWHCQPLQTYPSSSGPVEVFITETPSQPNSHPIQWNAPQPSHISKYILRWRPKNSVGRWKEATIPGHLNSYTIKGLKPGVVYEGQLISIQQYGHQEVTRFDFTTTSTSTPVTSNTVTGETTPFSPLVATSESVTEITASSFVVSWVSASDTVSGFRVEYELSEEGDEPQYLDLPSTATSVNIPDLLPGRKYIVNVYQISEDGEQSLILSTSQTTAPDAPPDTTVDQVDDTSIVVRWSRPQAPITGYRIVYSPSVEGSSTELNLPETANSVTLSDLQPGVQYNITIYAVEENQESTPVVIQQETTGTPRSDTVPSPRDLQFVEVTDVKVTIMWTPPESAVTGYRVDVIPVNLPGEHGQRLPISRNTFAEVTGLSPGVTYYFKVFAVSHGRESKPLTAQQTTKLDAPTNLQFVNETDSTVLVRWTPPRAQITGYRLTVGLTRRGQPRQYNVGPSVSKYPLRNLQPASEYTVSLVAIKGNQESPKATGVFTTLQPGSSIPPYNTEVTETTIVITWTPAPRIGFKLGVRPSQGGEAPREVTSDSGSIVVSGLTPGVEYVYTIQVLRDGQERDAPIVNKVVTPLSPPTNLHLEANPDTGVLTVSWERSTTPDITGYRITTTPTNGQQGNSLEEVVHADQSSCTFDNLSPGLEYNVSVYTVKDDKESVPISDTIIPEVPQLTDLSFVDITDSSIGLRWTPLNSSTIIGYRITVVAAGEGIPIFEDFVDSSVGYYTVTGLEPGIDYDISVITLINGGESAPTTLTQQTAVPPPTDLRFTNIGPDTMRVTWAPPPSIDLTNFLVRYSPVKNEEDVAELSISPSDNAVVLTNLLPGTEYVVSVSSVYEQHESTPLRGRQKTGLDSPTGIDFSDITANSFTVHWIAPRATITGYRIRHHPEHFSGRPREDRVPHSRNSITLTNLTPGTEYVVSIVALNGREESPLLIGQQSTVSDVPRDLEVVAATPTSLLISWDAPAVTVRYYRITYGETGGNSPVQEFTVPGSKSTATISGLKPGVDYTITVYAVTGRGDSPASSKPISINYRTEIDKPSQMQVTDVQDNSISVKWLPSSSPVTGYRVTTTPKNGPGPTKTKTAGPDQTEMTIEGLQPTVEYVVSVYAQNPSGESQPLVQTAVTNIDRPKGLAFTDVDVDSIKIAWESPQGQVSRYRVTYSSPEDGIHELFPAPDGEEDTAELQGLRPGSEYTVSVVALHDDMESQPLIGTQSTAIPAPTDLKFTQVTPTSLSAQWTPPNVQLTGYRVRVTPKEKTGPMKEINLAPDSSSVVVSGLMVATKYEVSVYALKDTLTSRPAQGVVTTLENVSPPRRARVTDATETTITISWRTKTETITGFQVDAVPANGQTPIQRTIKPDVRSYTITGLQPGTDYKIYLYTLNDNARSSPVVIDASTAIDAPSNLRFLATTPNSLLVSWQPPRARITGYIIKYEKPGSPPREVVPRPRPGVTEATITGLEPGTEYTIYVIALKNNQKSEPLIGRKKTDELPQLVTLPHPNLHGPEILDVPSTVQKTPFVTHPGYDTGNGIQLPGTSGQQPSVGQQMIFEEHGFRRTTPPTTATPIRHRPRPYPPNVGEEIQIGHIPREDVDYHLYPHGPGLNPNASTGQEALSQTTISWAPFQDTSEYIISCHPVGTDEEPLQFRVPGTSTSATLTGLTRGATYNVIVEALKDQQRHKVREEVVTVGNSVNEGLNQPTDDSCFDPYTVSHYAVGDEWERMSESGFKLLCQCLGFGSGHFRCDSSRWCHDNGVNYKIGEKWDRQGENGQMMSCTCLGNGKGEFKCDPHEATCYDDGKTYHVGEQWQKEYLGAICSCTCFGGQRGWRCDNCRRPGGEPSPEGTTGQSYNQYSQRYHQRTNTNVNCPIECFMPLDVQADREDSRE

SEQ ID NO: 265665 - DNA, 7434 bp, Artificial Sequence
  derived and/or modified sequence
atgctgagaggccccggccccggcctgctgctgctggccgtgcagtgcctgggcaccgccgtgcccagcaccggcgccagcaagagcaagagacaggcccagcagatggtgcagccccagagccccgtggccgtgagccagagcaagcccggctgctacgacaacggcaagcactaccagatcaaccagcagtgggagagaacctacctgggcaacgccctggtgtgcacctgctacggcggcagcagaggcttcaactgcgagagcaagcccgaggccgaggagacctgcttcgacaagtacaccggcaacacctacagagtgggcgacacctacgagagacccaaggacagcatgatctgggactgcacctgcatcggcgccggcagaggcagaatcagctgcaccatcgccaacagatgccacgagggcggccagagctacaagatcggcgacacctggagaagaccccacgagaccggcggctacatgctggagtgcgtgtgcctgggcaacggcaagggcgagtggacctgcaagcccatcgccgagaagtgcttcgaccacgccgccggcaccagctacgtggtgggcgagacctgggagaagccctaccagggctggatgatggtggactgcacctgcctgggcgagggcagcggcagaatcacctgcaccagcagaaacagatgcaacgaccaggacaccagaaccagctacagaatcggcgacacctggagcaagaaggacaacagaggcaacctgctgcagtgcatctgcaccggcaacggcagaggcgagtggaagtgcgagagacacaccagcgtgcagaccaccagcagcggcagcggccccttcaccgacgtgagagccgccgtgtaccagccccagccccacccccagccccccccctacggccactgcgtgaccgacagcggcgtggtgtacagcgtgggcatgcagtggctgaagacccagggcaacaagcagatgctgtgcacctgcctgggcaacggcgtgagctgccaggagaccgccgtgacccagacctacggcggcaacagcaacggcgagccctgcgtgctgcccttcacctacaacggcagaaccttctacagctgcaccaccgagggcagacaggacggccacctgtggtgcagcaccaccagcaactacgagcaggaccagaagtacagcttctgcaccgaccacaccgtgctggtgcagaccagaggcggcaacagcaacggcgccctgtgccacttccccttcctgtacaacaaccacaactacaccgactgcaccagcgagggcagaagagacaacatgaagtggtgcggcaccacccagaactacgacgccgaccagaagttcggcttctgccccatggccgcccacgaggagatctgcaccaccaacgagggcgtgatgtacagaatcggcgaccagtgggacaagcagcacgacatgggccacatgatgagatgcacctgcgtgggcaacggcagaggcgagtggacctgcatcgcctacagccagctgagagaccagtgcatcgtggacgacatcacctacaacgtgaacgacaccttccacaagagacacgaggagggccacatgctgaactgcacctgcttcggccagggcagaggcagatggaagtgcgaccccgtggaccagtgccaggacagcgagaccggcaccttctaccagatcggcgacagctgggagaagtacgtgcacggcgtgagataccagtgctactgctacggcagaggcatcggcgagtggcactgccagcccctgcagacctaccccagcagcagcggccccgtggaggtgttcatcaccgagacccccagccagcccaacagccaccccatccagtggaacgccccccagcccagccacatcagcaagtacatcctgagatggagacccaagaacagcgtgggcagatggaaggaggccaccatccccggccacctgaacagctacaccatcaagggcctgaagcccggcgtggtgtacgagggccagctgatcagcatccagcagtacggccaccaggaggtgaccagattcgacttcaccaccaccagcaccagcacccccgtgaccagcaacaccgtgaccggcgagaccacccccttcagccccctggtggccaccagcgagagcgtgaccgagatcaccgccagcagcttcgtggtgagctgggtgagcgccagcgacaccgtgagcggcttcagagtggagtacgagctgagcgaggagggcgacgagccccagtacctggacctgcccagcaccgccaccagcgtgaacatccccgacctgctgcccggcagaaagtacatcgtgaacgtgtaccagatcagcgaggacggcgagcagagcctgatcctgagcaccagccagaccaccgcccccgacgccccccccgacaccaccgtggaccaggtggacgacaccagcatcgtggtgagatggagcagaccccaggcccccatcaccggctacagaatcgtgtacagccccagcgtggagggcagcagcaccgagctgaacctgcccgagaccgccaacagcgtgaccctgagcgacctgcagcccggcgtgcagtacaacatcaccatctacgccgtggaggagaaccaggagagcacccccgtggtgatccagcaggagaccaccggcacccccagaagcgacaccgtgcccagccccagagacctgcagttcgtggaggtgaccgacgtgaaggtgaccatcatgtggaccccccccgagagcgccgtgaccggctacagagtggacgtgatccccgtgaacctgcccggcgagcacggccagagactgcccatcagcagaaacaccttcgccgaggtgaccggcctgagccccggcgtgacctactacttcaaggtgttcgccgtgagccacggcagagagagcaagcccctgaccgcccagcagaccaccaagctggacgcccccaccaacctgcagttcgtgaacgagaccgacagcaccgtgctggtgagatggaccccccccagagcccagatcaccggctacagactgaccgtgggcctgaccagaagaggccagcccagacagtacaacgtgggccccagcgtgagcaagtaccccctgagaaacctgcagcccgccagcgagtacaccgtgagcctggtggccatcaagggcaaccaggagagccccaaggccaccggcgtgttcaccaccctgcagcccggcagcagcatccccccctacaacaccgaggtgaccgagaccaccatcgtgatcacctggacccccgcccccagaatcggcttcaagctgggcgtgagacccagccagggcggcgaggcccccagagaggtgaccagcgacagcggcagcatcgtggtgagcggcctgacccccggcgtggagtacgtgtacaccatccaggtgctgagagacggccaggagagagacgcccccatcgtgaacaaggtggtgacccccctgagcccccccaccaacctgcacctggaggccaaccccgacaccggcgtgctgaccgtgagctgggagagaagcaccacccccgacatcaccggctacagaatcaccaccacccccaccaacggccagcagggcaacagcctggaggaggtggtgcacgccgaccagagcagctgcaccttcgacaacctgagccccggcctggagtacaacgtgagcgtgtacaccgtgaaggacgacaaggagagcgtgcccatcagcgacaccatcatccccgaggtgccccagctgaccgacctgagcttcgtggacatcaccgacagcagcatcggcctgagatggacccccctgaacagcagcaccatcatcggctacagaatcaccgtggtggccgccggcgagggcatccccatcttcgaggacttcgtggacagcagcgtgggctactacaccgtgaccggcctggagcccggcatcgactacgacatcagcgtgatcaccctgatcaacggcggcgagagcgcccccaccaccctgacccagcagaccgccgtgcccccccccaccgacctgagattcaccaacatcggccccgacaccatgagagtgacctgggcccccccccccagcatcgacctgaccaacttcctggtgagatacagccccgtgaagaacgaggaggacgtggccgagctgagcatcagccccagcgacaacgccgtggtgctgaccaacctgctgcccggcaccgagtacgtggtgagcgtgagcagcgtgtacgagcagcacgagagcacccccctgagaggcagacagaagaccggcctggacagccccaccggcatcgacttcagcgacatcaccgccaacagcttcaccgtgcactggatcgcccccagagccaccatcaccggctacagaatcagacaccaccccgagcacttcagcggcagacccagagaggacagagtgccccacagcagaaacagcatcaccctgaccaacctgacccccggcaccgagtacgtggtgagcatcgtggccctgaacggcagagaggagagccccctgctgatcggccagcagagcaccgtgagcgacgtgcccagagacctggaggtggtggccgccacccccaccagcctgctgatcagctgggacgcccccgccgtgaccgtgagatactacagaatcacctacggcgagaccggcggcaacagccccgtgcaggagttcaccgtgcccggcagcaagagcaccgccaccatcagcggcctgaagcccggcgtggactacaccatcaccgtgtacgccgtgaccggcagaggcgacagccccgccagcagcaagcccatcagcatcaactacagaaccgagatcgacaagcccagccagatgcaggtgaccgacgtgcaggacaacagcatcagcgtgaagtggctgcccagcagcagccccgtgaccggctacagagtgaccaccacccccaagaacggccccggccccaccaagaccaagaccgccggccccgaccagaccgagatgaccatcgagggcctgcagcccaccgtggagtacgtggtgagcgtgtacgcccagaaccccagcggcgagagccagcccctggtgcagaccgccgtgaccaacatcgacagacccaagggcctggccttcaccgacgtggacgtggacagcatcaagatcgcctgggagagcccccagggccaggtgagcagatacagagtgacctacagcagccccgaggacggcatccacgagctgttccccgcccccgacggcgaggaggacaccgccgagctgcagggcctgagacccggcagcgagtacaccgtgagcgtggtggccctgcacgacgacatggagagccagcccctgatcggcacccagagcaccgccatccccgcccccaccgacctgaagttcacccaggtgacccccaccagcctgagcgcccagtggaccccccccaacgtgcagctgaccggctacagagtgagagtgacccccaaggagaagaccggccccatgaaggagatcaacctggcccccgacagcagcagcgtggtggtgagcggcctgatggtggccaccaagtacgaggtgagcgtgtacgccctgaaggacaccctgaccagcagacccgcccagggcgtggtgaccaccctggagaacgtgagcccccccagaagagccagagtgaccgacgccaccgagaccaccatcaccatcagctggagaaccaagaccgagaccatcaccggcttccaggtggacgccgtgcccgccaacggccagacccccatccagagaaccatcaagcccgacgtgagaagctacaccatcaccggcctgcagcccggcaccgactacaagatctacctgtacaccctgaacgacaacgccagaagcagccccgtggtgatcgacgccagcaccgccatcgacgcccccagcaacctgagattcctggccaccacccccaacagcctgctggtgagctggcagccccccagagccagaatcaccggctacatcatcaagtacgagaagcccggcagcccccccagagaggtggtgcccagacccagacccggcgtgaccgaggccaccatcaccggcctggagcccggcaccgagtacaccatctacgtgatcgccctgaagaacaaccagaagagcgagcccctgatcggcagaaagaagaccgacgagctgccccagctggtgaccctgccccaccccaacctgcacggccccgagatcctggacgtgcccagcaccgtgcagaagacccccttcgtgacccaccccggctacgacaccggcaacggcatccagctgcccggcaccagcggccagcagcccagcgtgggccagcagatgatcttcgaggagcacggcttcagaagaaccaccccccccaccaccgccacccccatcagacacagacccagaccctacccccccaacgtgggcgaggagatccagatcggccacatccccagagaggacgtggactaccacctgtacccccacggccccggcctgaaccccaacgccagcaccggccaggaggccctgagccagaccaccatcagctgggcccccttccaggacaccagcgagtacatcatcagctgccaccccgtgggcaccgacgaggagcccctgcagttcagagtgcccggcaccagcaccagcgccaccctgaccggcctgaccagaggcgccacctacaacgtgatcgtggaggccctgaaggaccagcagagacacaaggtgagagaggaggtggtgaccgtgggcaacagcgtgaacgagggcctgaaccagcccaccgacgacagctgcttcgacccctacaccgtgagccactacgccgtgggcgacgagtgggagagaatgagcgagagcggcttcaagctgctgtgccagtgcctgggcttcggcagcggccacttcagatgcgacagcagcagatggtgccacgacaacggcgtgaactacaagatcggcgagaagtgggacagacagggcgagaacggccagatgatgagctgcacctgcctgggcaacggcaagggcgagttcaagtgcgacccccacgaggccacctgctacgacgacggcaagacctaccacgtgggcgagcagtggcagaaggagtacctgggcgccatctgcagctgcacctgcttcggcggccagagaggctggagatgcgacaactgcagaagacccggcggcgagcccagccccgagggcaccaccggccagagctacaaccagtacagccagagataccaccagagaaccaacaccaacgtgaactgccccatcgagtgcttcatgcccctggacgtgcaggccgacagagaggacagcagagagtag

SEQ ID NO: 265666 - DNA, 7434 bp, Artificial Sequence
  derived and/or modified sequence
atgttgcggggcccaggaccaggtcttcttcttctggccgtgcagtgtcttggcactgcagtgccttcgacgggtgccagtaagtccaagaggcaggcccagcagatggttcaacctcaaagccccgtggcagtgagccaaagtaaacctggctgctatgataacgggaagcactatcaaatcaaccaacagtgggagcgcacatatctgggtaacgccctggtgtgtacctgctacggcggttctcggggatttaactgtgaatctaaacctgaggctgaggagacatgcttcgataaatacactggcaacacgtacagagtgggcgacacatatgagcgccctaaggacagcatgatctgggattgtacatgcattggagctggcagaggcaggatttcttgtacaattgctaatcggtgccatgagggcggccagtcctataaaattggcgacacgtggcgtcgcccccacgagacaggaggctacatgctcgaatgtgtgtgcttgggcaatgggaaaggcgagtggacatgcaaaccaatcgcggagaagtgctttgatcacgctgctggcacgtcctacgttgtcggggagacatgggaaaaaccttatcaaggctggatgatggtggactgtacttgcctcggtgaaggaagcggcaggattacgtgtacgagccggaacaggtgcaacgatcaggatacgagaacatcatatcgaattggggatacatggagcaaaaaagataatagggggaacttactgcagtgcatatgtactggcaatggccggggggaatggaagtgcgagagacataccagtgtccagactacctcttcggggagcggtcctttcaccgatgtgagagcagccgtctatcagccccagcctcacccccagccacccccatacggccattgcgtgactgacagtggagtcgtgtacagtgtgggaatgcaatggctgaagacgcaaggcaacaaacagatgttgtgcacatgcctggggaatggtgtgtcctgtcaggagaccgccgtcactcagacatacgggggcaattcaaacggcgaaccatgcgtgctgccatttacatataacggacgaacgttttactcctgcactactgagggtcgtcaggatggccacctgtggtgttccactactagcaactacgagcaggaccagaagtacagcttctgcactgatcacacagtgttagtgcaaacacgcggcggtaatagcaacggggccttgtgccatttcccatttctgtataacaaccataattacacagactgtacctcagagggacgtcgcgataacatgaaatggtgtggaacgacacagaactatgatgccgatcagaaattcggcttctgtccaatggcagctcatgaggagatctgcactactaacgagggagtcatgtatagaattggagatcagtgggacaaacagcacgatatggggcacatgatgaggtgcacttgcgtcggaaacggccggggcgaatggacttgcatagcttacagccagctcagggatcagtgcatagtggatgacatcacatacaacgtaaatgacacatttcacaaacgccacgaagaaggccacatgctgaactgcacctgtttcggccagggccgggggaggtggaaatgcgatccagtggatcaatgccaggactccgagaccggcacattttatcagatcggcgatagctgggagaaatacgtccacggggttcgatatcagtgttactgttatggcaggggaataggtgagtggcattgtcaacccctgcagacctaccctagcagctcaggacctgtcgaggtctttattaccgaaacaccttcccaaccaaatagtcacccgatacagtggaatgccccacagcccagccacatctccaaatatatcctcaggtggaggccgaaaaatagtgtgggcaggtggaaggaggctactataccaggacacctcaacagctatactatcaaagggctgaaacctggtgtggtatatgagggacagttaatcagcatacaacaatatggacatcaggaagtgactcgcttcgatttcacaacgacgtcaacttccacccctgttacgtccaacacggtaacgggcgaaaccacgccgttctctccattggtggctaccagcgagtcagtaaccgaaatcaccgcctcatctttcgtggtgtcatgggttagtgcatcagataccgtaagcggctttagagtagaatatgagctctcagaagagggtgacgaaccgcagtacttagacctcccatccacagccaccagtgtgaatattccagatctgctgcctggtaggaagtacatcgtgaatgtctaccagattagtgaggatggtgaacagtctctgattcttagcacgagccaaacaaccgctcccgatgctccacccgatactaccgtggatcaggtggacgatacatcaatagtcgtaagatggtcacggccccaagctccaatcaccggatatcggattgtttatagtccatcagtggagggatcatctactgagctgaacctccctgaaactgctaacagcgtgactctctcagacctacagccgggcgtgcagtacaatatcactatttatgccgtagaagaaaatcaggaatccacccctgttgttattcaacaggagaccaccggcacccctagatctgatacggtccccagcccccgcgacctgcagttcgtggaagtaactgacgtcaaggtaaccattatgtggaccccccctgagtccgccgttaccggataccgggtagatgttatcccagtcaatctgcctggtgagcacggccagcgcttaccaatctcccgcaatacgtttgccgaggttacaggattgagcccaggggtgacctattattttaaagtttttgccgtgagccacggacgcgaatctaaaccgttaactgctcagcaaactaccaagctggatgctcccacgaacttacaatttgtgaacgagactgacagcacagtgctggtgcgatggacccctccacgagcacagatcaccggttacagattgacagtaggtctgacgcggagggggcagcctagacagtacaacgtgggacctagcgttagtaaatatccactgcgcaatctgcagcctgcttcggagtataccgtttctcttgtggctattaagggtaatcaggagagccctaaggccaccggcgtctttaccacattacagccaggaagctcaatccccccttacaatacagaagtgaccgagactacgatcgtaatcacatggacgccggcgccaagaatcggctttaaactgggtgttcgtccatcacaggggggggaggcaccgcgagaggtgactagcgattcggggagtatcgtggtctcagggctgacaccaggagtcgaatatgtttacacaattcaggtgctgagagacggacaggagcgagacgctcccatcgttaacaaggtggtgactcctttatctccaccaactaatctgcacctggaagcaaaccccgacaccggagtgctaactgtgagttgggaacgcagtactacgcccgacataactggctatcgtatcacaacaacccccacaaacggacagcaggggaacagtctcgaggaagtagtgcacgctgatcaaagctcatgcacgttcgataatctgagtcccgggctggaatataacgtctccgtctacactgtgaaggatgataaagaatctgtaccaatctctgatacaattatcccagaagtgccacagctgaccgatctctcctttgtggatattactgactcaagtattggcctccgttggaccccgttaaactcatcaaccattattggatatcggattaccgtagtcgccgctggtgaagggattcctatcttcgaagactttgtggactcctccgtcggctactatactgtgaccggcctggagcccggcatagactatgacatttcggttattactctcatcaacggcggagaatctgccccaacaaccctgacgcagcagaccgccgtccctcccccaacagatcttcggttcaccaatatcggccctgataccatgcgggtcacttgggccccccctccatcaatcgacctgacaaacttccttgtgaggtactcaccagtcaagaacgaggaagacgtagcggagctgtccatctctccctctgataacgctgttgttctcacaaacttgctgcccgggaccgaatacgtagtttccgttagttctgtctacgaacagcacgaaagtactccacttagagggcgacagaagaccggcttagactcaccaaccggcatagatttcagtgacattaccgctaactcatttacagtccactggatagctccaagggcaaccattacagggtaccgaatacgacatcatcctgaacacttcagtggtaggcctcgagaagatcgcgtgccgcactcccgaaattccatcactctgacaaatctcacccccggaacggagtatgtggtaagcattgtggctctcaatggcagagaggagtcccctctactcatcggtcagcagagcacggtatcggacgtgcctagagatctggaggtggtggccgcaacacccacttcattactcatcagctgggacgccccagcagtcacagtgcggtactatcggattacttacggtgaaacaggtggcaacagcccagttcaagaatttactgtccccggctccaagtctactgccacaatttctggcctgaaacctggcgtggactatacaatcactgtctatgccgtgaccggaaggggggattcaccggcctcatctaagcctatctccataaactatagaactgagatagataagcccagccagatgcaggtcacagatgtgcaggacaatagcatcagtgtgaaatggctcccgtcctctagccccgtgactggctaccgcgtcactacgacccccaaaaacgggcctgggcctacaaaaacaaagacagcggggccagatcagacagaaatgacgattgagggactccaacctaccgtggagtacgtcgtttcggtttatgcacagaatccaagcggggagtctcagcctctggtgcagacggcagtcacgaatatcgacagaccaaaaggactggcatttacagacgtagatgtggactcaatcaagattgcttgggaatctcctcagggccaggtgtcgaggtacagagtgacctacagctccccagaagacggtattcacgaactgtttcccgcgcctgacggtgaagaggacacagccgaactgcagggcctgagacccgggtccgagtacacggtgagtgttgtggctttgcacgatgacatggagtcacagcccctcatcggcacacaaagcacagcgatcccagctcccactgatttgaaatttacacaagtgactcccacatcgttgtctgcccaatggacaccacctaacgtccagttaacaggctaccgtgtgcgggtgaccccaaaggagaagaccgggcctatgaaggaaatcaacctggcacccgacagtagcagcgtcgttgtatccggactgatggtggccactaagtacgaagttagcgtctatgcccttaaagatacactgacttccagaccagcacagggagtggtgacaactttggagaacgttagtccacctaggcgggctcgcgtgactgatgcgacggaaaccacaatcactatctcttggcggacaaaaacagaaactattacagggttccaagtggatgccgtcccagcaaacggtcaaactcctatccagaggaccattaagccagatgttaggtcctataccataaccggtttacaacctggcaccgattacaagatctacttatataccctaaacgataacgcgaggtcaagccctgttgtaatcgatgcttccaccgcaattgacgcccccagcaacctcaggtttctcgccactacccccaacagcctcctcgtctcatggcagcctcctcgcgctagaatcacaggctatattataaagtatgagaaaccaggctctccaccgcgggaagtggtacctagaccacggccaggcgtgactgaagccaccataaccggccttgaacctggaacagaatacaccatctatgtgatagccttaaaaaataaccagaagtcagaaccacttatcggtcgcaaaaagacggatgagctgccacagttggtaactctcccccaccctaacctgcacgggccggaaatcctggatgtcccctcgaccgtacaaaagacacctttcgtcacgcacccaggttatgatactggaaatggaattcagctgcctgggacaagtgggcagcagccgtccgtcggacaacagatgatttttgaggagcacggctttcgtcgtacaaccccgcctacgactgccacgcctataagacaccgcccgagaccatatccccccaatgtgggcgaggagatccaaattggccacatcccacgggaggacgttgattatcacttgtatccgcatggtcccggcctgaatccaaacgctagcaccggacaggaggccctgtcccagacgacaatctcttgggccccgtttcaggacacttccgagtacatcatcagctgtcatccagtcgggactgatgaagaacctcttcagttccgcgtgcccggtacaagcacatccgccacacttacaggactgactcgtggcgctacatataacgtgattgtggaagccttaaaagaccagcagcgccataaggtccgtgaggaggtggttacagtcgggaattccgtcaatgagggccttaaccaacccacggacgactcttgcttcgatccgtatactgtgtcacactatgcggtgggcgatgagtgggagagaatgagtgaaagcggcttcaagcttttatgccagtgcctcgggttcggcagcggacatttccggtgcgacagcagcaggtggtgccatgataacggggtaaattacaaaattggggaaaagtgggatcgtcagggagagaacggccaaatgatgtcctgtacttgtctggggaacggaaaaggcgagtttaagtgtgatcctcatgaagcaacatgctatgacgatggcaaaacttaccatgtgggagaacagtggcaaaaggaatatcttggagccatctgttcatgcacctgctttggcgggcagagagggtggcgatgcgataattgccggagacccgggggcgaacccagcccagagggaactacaggacagtcctataaccagtactcccagagataccaccaaagaacaaatacaaatgtcaattgccccatcgagtgtttcatgcccctagatgttcaagcagatcgggaggattcgagggagtag

SEQ ID NO: 265667 - DNA, 8905 bp, Artificial Sequence
  derived and/or modified sequence
cggggcggggacagcccggcgggtctctcctcccccgcgccccgggcctccagaggggcgggaggggaccgtcccatataagccccggctcccggcgctcggacgcccgcgccggctgtgctgcacagggggaggagagggaaccccaggcgcgagcgggaagaggggacctgcagccacaacttctctggtcctctgcatcccttctgtccctccacccgtccccttccccaccctctggcccccaccttcttggaggcgacaacccccgggaggcattagaagggatttttcccgcaggttgcgaagggaagcaaacttggtggcaacttgcctcccggtgcgggcgtctctcccccaccgtctcaacatgcttaggggtccggggcccgggctgctgctgctggccgtccagtgcctggggacagcggtgccctccacgggagcctcgaagagcaagaggcaggctcagcaaatggttcagccccagtccccggtggctgtcagtcaaagcaagcccggttgttatgacaatggaaaacactatcagataaatcaacagtgggagcggacctacctaggcaatgcgttggtttgtacttgttatggaggaagccgaggttttaactgcgagagtaaacctgaagctgaagagacttgctttgacaagtacactgggaacacttaccgagtgggtgacacttatgagcgtcctaaagactccatgatctgggactgtacctgcatcggggctgggcgagggagaataagctgtaccatcgcaaaccgctgccatgaagggggtcagtcctacaagattggtgacacctggaggagaccacatgagactggtggttacatgttagagtgtgtgtgtcttggtaatggaaaaggagaatggacctgcaagcccatagctgagaagtgttttgatcatgctgctgggacttcctatgtggtcggagaaacgtgggagaagccctaccaaggctggatgatggtagattgtacttgcctgggagaaggcagcggacgcatcacttgcacttctagaaatagatgcaacgatcaggacacaaggacatcctatagaattggagacacctggagcaagaaggataatcgaggaaacctgctccagtgcatctgcacaggcaacggccgaggagagtggaagtgtgagaggcacacctctgtgcagaccacatcgagcggatctggccccttcaccgatgttcgtgcagctgtttaccaaccgcagcctcacccccagcctcctccctatggccactgtgtcacagacagtggtgtggtctactctgtggggatgcagtggctgaagacacaaggaaataagcaaatgctttgcacgtgcctgggcaacggagtcagctgccaagagacagctgtaacccagacttacggtggcaactcaaatggagagccatgtgtcttaccattcacctacaatggcaggacgttctactcctgcaccacagaagggcgacaggacggacatctttggtgcagcacaacttcgaattatgagcaggaccagaaatactctttctgcacagaccacactgttttggttcagactcgaggaggaaattccaatggtgccttgtgccacttccccttcctatacaacaaccacaattacactgattgcacttctgagggcagaagagacaacatgaagtggtgtgggaccacacagaactatgatgccgaccagaagtttgggttctgccccatggctgcccacgaggaaatctgcacaaccaatgaaggggtcatgtaccgcattggagatcagtgggataagcagcatgacatgggtcacatgatgaggtgcacgtgtgttgggaatggtcgtggggaatggacatgcattgcctactcgcagcttcgagatcagtgcattgttgatgacatcacttacaatgtgaacgacacattccacaagcgtcatgaagaggggcacatgctgaactgtacatgcttcggtcagggtcggggcaggtggaagtgtgatcccgtcgaccaatgccaggattcagagactgggacgttttatcaaattggagattcatgggagaagtatgtgcatggtgtcagataccagtgctactgctatggccgtggcattggggagtggcattgccaacctttacagacctatccaagctcaagtggtcctgtcgaagtatttatcactgagactccgagtcagcccaactcccaccccatccagtggaatgcaccacagccatctcacatttccaagtacattctcaggtggagacctaaaaattctgtaggccgttggaaggaagctaccataccaggccacttaaactcctacaccatcaaaggcctgaagcctggtgtggtatacgagggccagctcatcagcatccagcagtacggccaccaagaagtgactcgctttgacttcaccaccaccagcaccagcacacctgtgaccagcaacaccgtgacaggagagacgactcccttttctcctcttgtggccacttctgaatctgtgaccgaaatcacagccagtagctttgtggtctcctgggtctcagcttccgacaccgtgtcgggattccgggtggaatatgagctgagtgaggagggagatgagccacagtacctggatcttccaagcacagccacttctgtgaacatccctgacctgcttcctggccgaaaatacattgtaaatgtctatcagatatctgaggatggggagcagagtttgatcctgtctacttcacaaacaacagcgcctgatgcccctcctgacacgactgtggaccaagttgatgacacctcaattgttgttcgctggagcagaccccaggctcccatcacagggtacagaatagtctattcgccatcagtagaaggtagcagcacagaactcaaccttcctgaaactgcaaactccgtcaccctcagtgacttgcaacctggtgttcagtataacatcactatctatgctgtggaagaaaatcaagaaagtacacctgttgtcattcaacaagaaaccactggcaccccacgctcagatacagtgccctctcccagggacctgcagtttgtggaagtgacagacgtgaaggtcaccatcatgtggacaccgcctgagagtgcagtgaccggctaccgtgtggatgtgatccccgtcaacctgcctggcgagcacgggcagaggctgcccatcagcaggaacacctttgcagaagtcaccgggctgtcccctggggtcacctattacttcaaagtctttgcagtgagccatgggagggagagcaagcctctgactgctcaacagacaaccaaactggatgctcccactaacctccagtttgtcaatgaaactgattctactgtcctggtgagatggactccacctcgggcccagataacaggataccgactgaccgtgggccttacccgaagaggacagcccaggcagtacaatgtgggtccctctgtctccaagtacccactgaggaatctgcagcctgcatctgagtacaccgtatccctcgtggccataaagggcaaccaagagagccccaaagccactggagtctttaccacactgcagcctgggagctctattccaccttacaacaccgaggtgactgagaccaccattgtgatcacatggacgcctgctccaagaattggttttaagctgggtgtacgaccaagccagggaggagaggcaccacgagaagtgacttcagactcaggaagcatcgttgtgtccggcttgactccaggagtagaatacgtctacaccatccaagtcctgagagatggacaggaaagagatgcgccaattgtaaacaaagtggtgacaccattgtctccaccaacaaacttgcatctggaggcaaaccctgacactggagtgctcacagtctcctgggagaggagcaccaccccagacattactggttatagaattaccacaacccctacaaacggccagcagggaaattctttggaagaagtggtccatgctgatcagagctcctgcacttttgataacctgagtcccggcctggagtacaatgtcagtgtttacactgtcaaggatgacaaggaaagtgtccctatctctgataccatcatcccagaggtgccccaactcactgacctaagctttgttgatataaccgattcaagcatcggcctgaggtggaccccgctaaactcttccaccattattgggtaccgcatcacagtagttgcggcaggagaaggtatccctatttttgaagattttgtggactcctcagtaggatactacacagtcacagggctggagccgggcattgactatgatatcagcgttatcactctcattaatggcggcgagagtgcccctactacactgacacaacaaacggctgttcctcctcccactgacctgcgattcaccaacattggtccagacaccatgcgtgtcacctgggctccacccccatccattgatttaaccaacttcctggtgcgttactcacctgtgaaaaatgaggaagatgttgcagagttgtcaatttctccttcagacaatgcagtggtcttaacaaatctcctgcctggtacagaatatgtagtgagtgtctccagtgtctacgaacaacatgagagcacacctcttagaggaagacagaaaacaggtcttgattccccaactggcattgacttttctgatattactgccaactcttttactgtgcactggattgctcctcgagccaccatcactggctacaggatccgccatcatcccgagcacttcagtgggagacctcgagaagatcgggtgccccactctcggaattccatcaccctcaccaacctcactccaggcacagagtatgtggtcagcatcgttgctcttaatggcagagaggaaagtcccttattgattggccaacaatcaacagtttctgatgttccgagggacctggaagttgttgctgcgacccccaccagcctactgatcagctgggatgctcctgctgtcacagtgagatattacaggatcacttacggagagacaggaggaaatagccctgtccaggagttcactgtgcctgggagcaagtctacagctaccatcagcggccttaaacctggagttgattataccatcactgtgtatgctgtcactggccgtggagacagccccgcaagcagcaagccaatttccattaattaccgaacagaaattgacaaaccatcccagatgcaagtgaccgatgttcaggacaacagcattagtgtcaagtggctgccttcaagttcccctgttactggttacagagtaaccaccactcccaaaaatggaccaggaccaacaaaaactaaaactgcaggtccagatcaaacagaaatgactattgaaggcttgcagcccacagtggagtatgtggttagtgtctatgctcagaatccaagcggagagagtcagcctctggttcagactgcagtaaccaacattgatcgccctaaaggactggcattcactgatgtggatgtcgattccatcaaaattgcttgggaaagcccacaggggcaagtttccaggtacagggtgacctactcgagccctgaggatggaatccatgagctattccctgcacctgatggtgaagaagacactgcagagctgcaaggcctcagaccgggttctgagtacacagtcagtgtggttgccttgcacgatgatatggagagccagcccctgattggaacccagtccacagctattcctgcaccaactgacctgaagttcactcaggtcacacccacaagcctgagcgcccagtggacaccacccaatgttcagctcactggatatcgagtgcgggtgacccccaaggagaagaccggaccaatgaaagaaatcaaccttgctcctgacagctcatccgtggttgtatcaggacttatggtggccaccaaatatgaagtgagtgtctatgctcttaaggacactttgacaagcagaccagctcagggagttgtcaccactctggagaatgtcagcccaccaagaagggctcgtgtgacagatgctactgagaccaccatcaccattagctggagaaccaagactgagacgatcactggcttccaagttgatgccgttccagccaatggccagactccaatccagagaaccatcaagccagatgtcagaagctacaccatcacaggtttacaaccaggcactgactacaagatctacctgtacaccttgaatgacaatgctcggagctcccctgtggtcatcgacgcctccactgccattgatgcaccatccaacctgcgtttcctggccaccacacccaattccttgctggtatcatggcagccgccacgtgccaggattaccggctacatcatcaagtatgagaagcctgggtctcctcccagagaagtggtccctcggccccgccctggtgtcacagaggctactattactggcctggaaccgggaaccgaatatacaatttatgtcattgccctgaagaataatcagaagagcgagcccctgattggaaggaaaaagacagacgagcttccccaactggtaacccttccacaccccaatcttcatggaccagagatcttggatgttccttccacagttcaaaagacccctttcgtcacccaccctgggtatgacactggaaatggtattcagcttcctggcacttctggtcagcaacccagtgttgggcaacaaatgatctttgaggaacatggttttaggcggaccacaccgcccacaacggccacccccataaggcataggccaagaccatacccgccgaatgtaggtgaggaaatccaaattggtcacatccccagggaagatgtagactatcacctgtacccacacggtccgggactcaatccaaatgcctctacaggacaagaagctctctctcagacaaccatctcatgggccccattccaggacacttctgagtacatcatttcatgtcatcctgttggcactgatgaagaacccttacagttcagggttcctggaacttctaccagtgccactctgacaggcctcaccagaggtgccacctacaacgtcatagtggaggcactgaaagaccagcagaggcataaggttcgggaagaggttgttaccgtgggcaactctgtcaacgaaggcttgaaccaacctacggatgactcgtgctttgacccctacacagtttcccattatgccgttggagatgagtgggaacgaatgtctgaatcaggctttaaactgttgtgccagtgcttaggctttggaagtggtcatttcagatgtgattcatctagatggtgccatgacaatggtgtgaactacaagattggagagaagtgggaccgtcagggagaaaatggccagatgatgagctgcacatgtcttgggaacggaaaaggagaattcaagtgtgaccctcatgaggcaacgtgttatgatgatgggaagacataccacgtaggagaacagtggcagaaggaatatctcggtgccatttgctcctgcacatgctttggaggccagcggggctggcgctgtgacaactgccgcagacctgggggtgaacccagtcccgaaggcactactggccagtcctacaaccagtattctcagagataccatcagagaacaaacactaatgttaattgcccaattgagtgcttcatgcctttagatgtacaggctgacagagaagattcccgagagtaaatcatctttccaatccagaggaacaagcatgtctctctgccaagatccatctaaactggagtgatgttagcagacccagcttagagttcttctttctttcttaagccctttgctctggaggaagttctccagcttcagctcaactcacagcttctccaagcatcaccctgggagtttcctgagggttttctcataaatgagggctgcacattgcctgttctgcttcgaagtattcaataccgctcagtattttaaatgaagtgattctaagatttggtttgggatcaataggaaagcatatgcagccaaccaagatgcaaatgttttgaaatgatatgaccaaaattttaagtaggaaagtcacccaaacacttctgctttcacttaagtgtctggcccgcaatactgtaggaacaagcatgatcttgttactgtgatattttaaatatccacagtactcactttttccaaatgatcctagtaattgcctagaaatatctttctcttacctgttatttatcaatttttcccagtatttttatacggaaaaaattgtattgaaaacacttagtatgcagttgataagaggaatttggtataattatggtgggtgattattttttatactgtatgtgccaaagctttactactgtggaaagacaactgttttaataaaagatttacattccacaacttgaagttcatctatttgatataagacaccttcgggggaaataattcctgtgaatattctttttcaattcagcaaacatttgaaaatctatgatgtgcaagtctaattgttgatttcagtacaagattttctaaatcagttgctacaaaaactgattggtttttgtcacttcatctcttcactaatggagatagctttacactttctgctttaatagatttaagtggaccccaatatttattaaaattgctagtttaccgttcagaagtataatagaaataatctttagttgctcttttctaaccattgtaattcttcccttcttccctccacctttccttcattgaataaacctctgttcaaagagattgcctgcaagggaaataaaaatgactaagatattaaaa

SEQ ID NO: 265668 - DNA, 7434 bp, Artificial Sequence
  derived and/or modified sequence
atgctgcggggccctggccctggcctgctgctgctggccgtgcagtgcctgggcacagctgtgcccagcactggagccagcaagagcaagaggcaggcccagcagatggtgcagccccagagccctgtggccgtgtcccagagcaagccaggctgctatgacaatggcaagcactaccagatcaaccagcagtgggagaggacctacctgggcaatgccctggtgtgcacctgctatggaggcagccggggcttcaactgtgagagcaagccagaggccgaggagacctgctttgacaagtacacaggcaacacctacagagtgggggacacctatgaaagacccaaggacagcatgatctgggactgcacctgcatcggggccggccggggccgcatcagctgcaccatcgccaaccgctgccacgagggcggccagagctacaagatcggggacacctggaggcggccccatgagaccggcggctacatgctggagtgtgtgtgcctgggcaatggcaagggggagtggacctgcaagcccatcgccgagaagtgctttgaccacgccgccggcaccagctatgtggtgggggagacctgggagaagccctaccagggctggatgatggtggactgcacctgcctgggggagggcagcggccgcatcacctgcaccagcaggaaccgctgcaatgaccaggacaccaggaccagctaccgcatcggggacacctggagcaagaaggacaacagaggcaacctgctgcagtgcatctgcacaggaaatggccgcggggagtggaagtgtgagcggcacacctctgtgcagaccaccagcagcggcagcggccccttcacagatgtgcgggctgctgtgtaccagccccagccccacccccagcccccaccctacggccactgtgtgacagacagcggcgtggtgtacagcgtgggcatgcagtggctgaagacccagggcaacaagcagatgctgtgcacctgcctgggcaatggagtgtcctgccaggagacagctgtgacccagacctatggaggcaacagcaatggagagccctgtgtgctgcccttcacctacaatggaagaaccttctacagctgcaccacagagggccggcaggacggccacctgtggtgcagcaccaccagcaactatgagcaggaccagaagtacagcttctgcacagaccacacagtgctggtgcagacccggggcggcaacagcaatggagccctgtgccacttccccttcctgtacaacaaccacaactacacagactgcaccagcgagggcagaagagacaacatgaagtggtgtggcaccacccagaactatgatgctgaccagaagtttggcttctgccccatggccgcccacgaggagatctgcaccaccaatgaaggagtgatgtaccgcatcggggaccagtgggacaagcagcacgacatgggccacatgatgcgctgcacctgtgtgggcaatggccgcggggagtggacctgcatcgcctacagccagctgcgggaccagtgcatcgtggatgacatcacctacaacgtgaatgacaccttccacaagagacatgaggagggccacatgctgaactgcacctgcttcggccagggccggggccgctggaagtgtgaccctgtggaccagtgccaggacagcgagaccggcaccttctaccagatcggggacagctgggagaagtatgtgcatggagtgcgctaccagtgctactgctacggccggggcatcggggagtggcactgccagcccctgcagacctaccccagcagcagcggccctgtggaggtgttcatcacagagacccccagccagcccaacagccaccccatccagtggaatgccccccagcccagccacatcagcaagtacatcctgcgctggaggcccaagaacagcgtgggccgctggaaggaggccaccatccctggccacctgaacagctacaccatcaagggcctgaagccaggagtggtgtatgagggccagctgatcagcatccagcagtatggccaccaggaggtgaccaggtttgacttcaccaccaccagcaccagcacccctgtgaccagcaacacagtgactggagagaccacccccttcagccccctggtggccaccagcgagagcgtgacagagatcacagccagcagctttgtggtgtcctgggtgtctgccagtgacacagtgtctggcttccgggtggagtatgagctgtctgaggagggagatgagccccagtacctggacctgcccagcacagccacctctgtgaacatcccagacctgctgcccggcaggaagtacatcgtgaatgtgtaccagatcagtgaagatggagagcagagcctcatcctgagcaccagccagaccacagccccagatgcccccccagacaccaccgtggaccaggtggatgacaccagcatcgtggtgcgctggagccggccccaggcccccatcaccggctacagaattgtgtacagccccagcgtggagggcagcagcacagagctgaacctgcctgagacagccaacagcgtgaccctgagtgacctgcagcccggggtgcagtacaacatcaccatctatgctgtggaggagaaccaggagagcacccctgtggtgatccagcaggagaccaccggcacccccaggagtgacacagtgcccagcccccgggacctgcagtttgtggaggtgacagatgtgaaggtgaccatcatgtggaccccacctgagagcgctgtgacaggctacagagtggatgtgattcctgtgaacctgcctggagagcacggccagaggctgcccatcagcaggaacacctttgctgaggtgacaggcctgagccctggggtgacctactacttcaaggtgtttgctgtgagccacggccgggagagcaagcccctgacagcccagcagaccaccaagctggatgcccccaccaacctgcagtttgtgaatgaaacagacagcacagtgctggtgcgctggaccccaccccgggcccagatcaccggctaccgcctgactgtgggcctgacccggcggggccagccccggcagtacaacgtgggccccagcgtgtccaagtaccccctgaggaacctgcagcctgccagcgagtacacagtgtccctggtggccatcaagggcaaccaggagagccccaaggccactggagtcttcaccaccctgcagcccggcagcagcatccccccctacaacacagaggtgacagagaccaccatcgtcatcacctggaccccagcccccagaattggcttcaagctgggcgtgcggcccagccagggcggggaggccccccgggaggtgaccagtgacagcggcagcatcgtggtgtctggcctgaccccaggagtggagtatgtgtacaccatccaggtgctgagagatggccaggagagagatgcccccatcgtgaacaaggtggtgacccccctgagcccccccaccaacctgcacctggaggccaacccagacaccggggtgctgactgtgtcctgggagaggagcaccaccccagacatcaccggctaccgcatcaccaccacccccaccaacggccagcagggcaacagcctggaggaggtggtgcatgctgaccagagcagctgcacctttgacaacctgagccctggcctggagtacaacgtgtctgtgtacacagtgaaggatgacaaggagagcgtgcccatcagtgacaccatcatccctgaggtgccccagctgacagacctgagctttgtggacatcacagacagcagcatcggcctgcgctggacccccctgaacagcagcaccatcatcggctaccgcatcaccgtggtggccgccggggagggcatccccatctttgaagattttgtggacagctctgtgggctactacacagtgacaggcctggagcccggcatcgactatgacatcagcgtcatcaccctcatcaatggaggagagagcgcccccaccaccctgacccagcagacagctgtgcccccacccacagacctgcgcttcaccaacattggaccagacaccatgagggtgacctgggcccctcctccttccattgacctgaccaacttcctggtgcgctacagccctgtgaagaatgaggaggatgtggccgagctgagcatcagccccagcgacaatgctgtggtgctgaccaacctgctgcctggaacagaatatgtggtgtctgtgtcctctgtgtatgagcagcacgagagcacccccctgcggggccggcagaagacaggcctggacagccccactggaattgacttcagtgacatcacagccaacagcttcaccgtgcactggatcgccccccgggccaccatcaccggctaccgcatccgccaccaccctgagcacttcagcggccggccccgggaggacagagtgccccacagcagaaattccatcaccctgaccaacctgaccccaggcacagaatatgtggtgtccatcgtggccctgaatggccgggaggagagccccctgctgattggccagcagagcacagtgtctgatgtgccccgggacctggaggtggtggccgccacccccaccagcctgctgatctcctgggatgccccagctgtgacagtgcgctactaccgcatcacctatggagagaccggcggcaacagccctgtgcaggagttcaccgtgcccggcagcaagagcacagccaccatcagcggcctgaagccaggagtggactacaccatcaccgtgtatgctgtgacaggccgcggggacagccctgccagcagcaagcccatcagcatcaactacagaacagaaattgacaagcccagccagatgcaggtgacagatgtgcaggacaacagcatctctgtgaagtggctgcccagcagcagccctgtgacaggctacagagtgaccaccacccccaagaatggacctggccccaccaagaccaagacagctggccctgaccagacagagatgaccatcgagggcctgcagcccaccgtggagtatgtggtgtctgtgtatgcccagaaccccagcggggagagccagcccctggtgcagacagctgtgaccaacatcgaccggcccaagggcctggccttcacagatgtggatgtggacagcatcaagatcgcctgggagagcccccagggccaggtgagccgctacagagtgacctacagcagcccagaagatggcatccacgagctgtttcctgccccagatggagaggaggacacagctgagctgcagggcctgcggcccggcagcgagtacacagtgtctgtggtggccctgcatgatgacatggagagccagcccctcatcggcacccagagcacagccatcccagcccccacagacctgaagttcacccaggtgacccccaccagcctgagcgcccagtggaccccaccaaatgtgcagctgaccggctacagagtgcgggtgacccccaaggagaagacaggccccatgaaggagatcaacctggccccagacagcagctctgtggtggtgtctggcctgatggtggccaccaagtatgaggtgtctgtgtatgccctgaaggacaccctgaccagcaggcctgcccagggcgtggtgaccaccctggagaatgtgtccccaccaagaagagcccgggtgacagatgccacagagaccaccatcaccatctcctggaggaccaagacagagaccatcaccggcttccaggtggatgctgtgcctgccaacggccagacccccatccagaggaccatcaagccagatgtgcgcagctacaccatcaccggcctgcagcccggcacagactacaagatctacctgtacaccctgaatgacaatgcccggagcagccctgtggtgattgatgccagcacagccattgatgcccccagcaacctgcgcttcctggccaccacccccaacagcctgctggtgtcctggcagcccccccgggcccgcatcaccggctacatcatcaagtatgagaagccaggcagccccccccgggaggtggtgccccggcccaggcctggggtgacagaggccaccatcaccggcctggagcccggcacagagtacaccatctacgtgattgccctgaagaacaaccagaagtctgagcccctgattggaaggaagaagacagatgagctgccccagctggtgaccctgccccaccccaacctgcacggccctgagatcctggatgtgcccagcacagtgcagaagaccccatttgtgacccaccctggctatgacacaggaaatggcatccagctgcccggcaccagcggccagcagcccagcgtgggccagcagatgatctttgaggagcacggcttccggaggaccaccccacccaccacagccacccccatccgccaccggccccggccctacccacccaacgtgggggaggagatccagatcggccacatccccagagaagatgtggactaccacctgtacccccacggccctggcctgaaccccaatgccagcacaggccaggaggccctgagccagaccaccatctcctgggcccccttccaggacaccagcgagtacatcatcagctgccaccctgtgggcacagatgaggagcccctgcagttccgggtgcccggcaccagcaccagcgccaccctgaccggcctgaccaggggggccacctacaacgtcatcgtggaggccctgaaggaccagcagaggcacaaggtgcgggaggaggtggtgacagtgggcaacagcgtgaatgaaggcctgaaccagcccacagatgacagctgctttgacccctacacagtgagccactatgctgtgggagatgagtgggagaggatgtctgagagcggcttcaagctgctgtgccagtgcctgggctttggaagtggccacttccgctgtgacagcagccgctggtgccacgacaatggagtgaactacaagattggagagaagtgggaccggcagggagaaaatggccagatgatgagctgcacctgcctgggcaatggcaagggggagttcaagtgtgacccccatgaggccacctgctatgatgatggcaagacctaccacgtgggggagcagtggcagaaggagtacctgggcgccatctgcagctgcacctgctttggaggccagaggggctggaggtgtgacaactgcagaagacctggaggagagcccagccctgagggcaccaccggccagagctacaaccagtacagccagcgctaccaccagaggaccaacaccaacgtgaactgccccatcgagtgcttcatgcccctggatgtgcaggccgaccgggaggacagccgggagtag

SEQ ID NO: 265669 - DNA, 7434 bp, Artificial Sequence
  derived and/or modified sequence
atgctgcggggccccggccccggcctgctgctgctggccgtgcagtgcctgggtacagccgtgccaagcacgggagcgtctaaatccaaacgccaggcccaacagatggtgcaaccacagtccccagtcgccgtttcgcagtccaaacctggatgctatgataacggcaagcattaccagattaaccaacagtgggaaagaacatacctgggcaatgcactggtctgtacatgttatggcgggagccgcgggtttaattgtgaaagcaagccagaggcagaagaaacctgcttcgacaagtacaccggcaacacatacagagtcggagacacatacgaacgaccaaaggactccatgatctgggactgtacctgcattggggccggccgcgggaggatctcttgtaccattgctaaccggtgtcacgagggaggtcagtcctataagatcggcgatacatggcgccgtccacatgagaccggaggatatatgttagagtgcgtatgtctggggaatggcaaaggggagtggacctgcaagcccatagccgaaaaatgtttcgatcacgctgccggtacctcttatgttgttggagagacatgggagaaaccttaccaaggctggatgatggtagattgcacatgcctgggtgagggaagcggcaggattacttgtacgagccgaaaccggtgcaatgatcaagatacgcgaactagctatcggattggagatacttggtctaaaaaagacaatcgcgggaacctgttacaatgtatctgcacagggaacggtagaggagaatggaaatgtgagcgacataccagcgtccagactacctcaagtggctccggaccttttaccgatgttagagccgcagtttatcagccgcaacctcatccacaacctcccccatatggtcactgtgttactgattcaggggtggtctattccgtcgggatgcagtggctgaaaactcaggggaacaagcaaatgctttgtacctgcctgggaaatggagtttcttgtcaggaaactgctgtgacacagacttatgggggaaacagcaacggagagccgtgtgtgctccccttcacctacaatggacggaccttttactcatgtactacagaaggcaggcaggatggacacctttggtgttctacaacttcgaactacgaacaggaccaaaagtatagcttctgcactgatcacacagtgctggtacagacacggggaggcaacagtaacggggcactgtgccattttcctttcctgtataacaatcataactacacagactgtacatccgagggccgacgcgacaatatgaagtggtgcggtaccacacagaactatgacgccgatcaaaagttcggcttttgtcccatggccgcccatgaagagatttgcacaaccaacgagggcgtgatgtacagaatcggcgaccagtgggataaacagcacgacatgggacacatgatgaggtgcacatgtgtcggaaacggtaggggcgagtggacttgtatcgcttactcccagttaagggaccagtgcatcgttgatgatattacttataatgtcaacgacaccttccacaagcgccacgaagaaggacatatgctgaattgtacgtgttttggccagggccggggtcgttggaaatgtgaccccgtggatcagtgccaggacagcgaaactgggacattttaccagatcggagatagttgggaaaagtatgtccatggtgttagataccagtgttactgctacgggcgtggaattggagagtggcactgccagccgctacaaacgtaccccagttcctctggtccagtggaagtcttcattacagagaccccttcgcagccgaatagccatcccatacagtggaatgcacctcaaccctcacacatcagcaaatacatcttgaggtggaggcccaagaattcagtaggcaggtggaaagaagcgaccattccgggacatctgaactcgtacacaattaaaggccttaagccaggcgtggtgtatgaaggccagctcatctcaattcagcaatacggccatcaggaggtgacccgatttgattttaccaccacatccacatctacaccagtgaccagcaacaccgtgaccggagagactacacccttctctcctctcgtggctacctccgagtcagtcaccgaaatcacagcatcttccttcgtggtcagctgggtgtccgcctcagacactgtaagcggcttccgggtggagtacgaactgagcgaagagggggacgagccgcaatacttagatctcccttccactgccacatcggttaacatccccgatctactcccaggtcgcaagtacatagtgaatgtctaccagatcagcgaagacggagaacagtctctgattctgtctaccagtcagacgaccgccccggacgctcctcccgacactaccgtggatcaggtggacgatacatccatagtcgttcgctggagtagaccgcaagcccccatcaccgggtacagaattgtatattccccgtccgttgaaggcagcagtacagaactgaatctgcccgagactgctaattcagtcaccctctccgacctgcaacctggcgtgcagtataacatcactatttatgccgttgaggagaatcaggagtccacccccgtggtcatccagcaggagacaaccggcacaccgcgcagcgacaccgtgcctagtccaagggacctgcagttcgtagaagtgactgatgtcaaggtgacaattatgtggacacccccagagagcgcagtgaccggctaccgagttgacgtaattcccgtcaatctgcccggggagcacggacagagactccccatctcgcgaaatactttcgctgaggtcacgggcttgagtccaggcgtgacttactatttcaaagttttcgcggtgtcgcatggtcgcgagagtaaacctcttactgctcagcaaacgactaaacttgacgccccaaccaacctgcagttcgttaatgagactgattccacggttctggtgcgatggacccccccgagggcccagattaccggctataggctcacagttgggctaactagaaggggtcagcctagacagtataacgtaggaccatccgtcagtaagtatccactcaggaacctgcagccggcctctgagtatacagtgtccctggtggctattaaaggcaatcaggaaagtcctaaggccacaggggttttcacgacactccagcctggatcgtccatccccccctataacaccgaggttactgagaccaccatagtgataacttggacaccggcccctcggatcggttttaaactgggcgtgcgaccctctcagggcggcgaagcaccccgggaggtcacgagtgattcaggcagtattgtggtgtcgggcctaacacccggcgttgagtacgtttataccatccaggtgttgcgagacgggcaagagagggatgcaccaatcgttaacaaggtggtcactccactctctccacccaccaacctgcacctggaggccaatcccgatacaggggtgctcactgttagctgggagcggagtaccactccagacattaccggctaccggattacaacgacacctacaaatggtcagcagggtaacagcttggaggaagttgtgcatgccgatcagtcctcttgcacatttgacaacctttctccaggcctggaatacaacgtgtctgtttatactgtgaaagacgacaaggagtcagttccgatttcagatacaattatcccagaggtgccacagctgaccgacctctcatttgtggacataaccgattctagtattggcctccggtggacacctcttaattcgagcaccattatcggctatagaatcacggtggtagccgctggagaaggaattcccatattcgaagactttgttgattctagcgtggggtactacaccgtgacgggactggaacccgggatcgactacgacatttccgtcattaccctgatcaacggaggggagagcgcaccaacgactctaactcagcagaccgctgtcccacccccaaccgacctgcggttcacgaatatcggacccgataccatgcgagttacatgggctcctcccccctccattgatttgacaaacttcttggtccggtattccccggtcaagaatgaggaagacgttgccgaacttagcatttccccatcggacaacgccgtggttctgaccaacctgttgcctgggacagaatacgtcgtgagcgtgtcttcagtatatgaacagcatgagtctacccccctaagaggacggcagaagacaggcctggatagtcccactggcatagatttcagcgatatcactgcgaatagtttcacggtccattggatcgccccaagggcaaccataacaggatacaggattaggcaccatcccgaacatttctccggacggccgagagaagatcgagttccccatagcagaaattcgattaccctgacaaacttaacccctggaaccgagtacgtggtgagtatcgttgctctgaatggcagagaagaatctcccctgctaattggtcaacagagcaccgtcagtgacgtcccccgagatctggaggtggtggcagcaactcctacgagtctgctgataagctgggatgcgcctgcagtcaccgtacgttattaccggatcacttatggagaaaccggcggcaattcccctgtgcaagagttcacagtgcccgggagcaaatccacggcaaccatctccggcctgaaacctggcgtagactatacgattaccgtatacgccgtgactggccgaggagacagccctgcctctagtaaacccataagcattaactatcgcactgaaatcgacaaacctagtcagatgcaggtgactgatgtccaggataactcgatatctgttaagtggctgccctcttcttccccggttaccggctaccgggttactactacgccaaagaacgggccaggccctacgaaaacaaagacggcgggtccagaccaaacggagatgacgatcgaaggacttcaacctactgtggaatatgttgtttctgtgtatgcccaaaatcccagtggcgagtcccagccacttgttcagactgctgttacgaacatcgacaggccgaaaggactggcctttaccgacgtcgacgtagactctattaaaattgcctgggagtcgccacagggacaggtgtcccgctacagagtgacatatagctcccccgaggatggcatccacgaattatttcctgcccctgatggcgaggaggatactgcagaactccaggggttaaggcccggatcagaatacactgtcagcgtggttgccctgcatgatgacatggaaagtcaaccgcttatcgggacccagagcactgctattcccgcacctactgacctgaaatttacccaggtgacacctacaagcctcagtgcccaatggactcctcctaatgtccagctgaccgggtaccgagtccgggtgacccccaaagagaagactggaccgatgaaagaaattaacctcgccccagattcctccagcgtggtagtgagcgggctcatggttgctaccaaatacgaagtttccgtctacgccttgaaagatacactaacatccaggcctgcacagggagtggtgaccaccttagagaacgtctcacccccccgcagagccagagtgacagacgcgacagaaaccaccatcaccattagttggagaacaaaaacggaaacgattactggtttccaggtagacgccgtgccagcaaacggccagactccgatacagaggacaatcaagcctgacgtgaggtcctacacgatcacagggctgcagccgggaaccgactataagatttacctgtacaccctaaacgataacgcaaggtcatcccccgttgtcatagatgctagtactgcgatagacgccccgagtaacctgcggtttcttgctaccacacccaactctttactcgtttcctggcaaccacctcgagcacgaatcaccgggtacattataaagtacgaaaaacccggctctcccccaagagaggttgtgcccagacctaggccaggggtgacagaagccacaatcaccggtctggagccaggcaccgagtacaccatctatgtcattgccctgaagaacaatcaaaagagtgagcctttgatcggcaggaagaagacagatgaattgccacagttggtaactctcccacacccaaacttacatgggcctgagattcttgacgtaccgagtactgtgcaaaaaactccatttgtcacccatcctggctacgacaccggaaacggcatccagcttcctgggacctccggacaacagccgtctgtgggccagcagatgatattcgaagagcatggatttagacggaccacaccacctactacagcaacgccgattagacacaggccgagaccttatccacctaacgtgggggaggagattcagattgggcacatcccccgggaagacgtcgattaccacctctaccctcacgggcccggtttgaaccccaacgcttcaacaggccaggaggctttatcacagaccacaatttcatgggccccctttcaggataccagtgagtacatcatctcctgccacccagtgggcacagatgaagaaccgctgcagttccgagtgccaggaacttctacgtcagccaccctgacaggtctgacaaggggtgccacgtataatgtgattgtggaggccctaaaggaccagcagcgtcataaagtgcgcgaggaggtcgttactgtgggcaactccgttaatgaaggactgaaccagccaaccgatgactcctgcttcgacccatataccgtcagtcactacgctgtaggggacgagtgggaaaggatgtcagaatcaggcttcaaactcttgtgccagtgcctaggtttcggatctggccatttccgatgcgactctagccggtggtgtcacgacaatggcgtgaactacaaaattggagagaaatgggaccggcagggggagaatgggcagatgatgtcctgcacttgcctgggcaacggcaaaggcgagttcaagtgcgacccacacgaagcaacctgctatgacgatgggaagacttatcacgtcggcgagcagtggcagaaagaatacctcggcgctatatgctcgtgcacctgcttcgggggacagcgcggttggcgctgcgacaactgtcgccggcctggtggagagccatctcccgaggggacaaccgggcagtcctacaaccagtacagccaacggtaccaccagaggaccaacacgaacgtaaactgcccgatagagtgcttcatgcctctcgatgtgcaagccgacagagaggatagccgggaatag

SEQ ID NO: 265670 - DNA, 7434 bp, Artificial Sequence
  derived and/or modified sequence
atgttgaggggtcccggtcctggacttttgctcctggcagtccagtgcctgggaaccgcagtgccatcaacaggagctagcaagagcaaacgccaggcccagcagatggtacagcctcaatctccagtggcggtgtcacagtccaagccgggatgttacgacaatggaaagcattaccagattaaccaacagtgggagcgtacctacctagggaacgctctcgtgtgtacttgttatggcggaagtcggggatttaactgcgagtcgaagcctgaagctgaggagacctgtttcgataagtacactggcaacacataccgcgtcggagatacttacgaaagacccaaggacagtatgatctgggattgtacatgtatcggagccggaaggggaaggattagctgtactatagccaataggtgtcacgaggggggacagtcttacaaaatcggggacacctggaggcgtcctcatgaaacgggcggatacatgttggaatgtgtgtgcttgggcaatggcaagggtgaatggacttgtaaacccatagcagaaaagtgcttcgaccatgccgcagggactagttacgtagtgggagagacatgggagaaaccataccagggttggatgatggtcgactgcacttgcctaggcgagggctctgggcgaatcacctgtacctccaggaatcgctgtaatgaccaggatacaagaacttcctataggataggagacacatggagcaagaaagataatcggggaaatcttctgcaatgtatttgcaccggtaatgggagaggcgaatggaaatgtgaacgccacaccagtgttcagaccacaagcagcggctctggaccctttacggatgtccgcgctgccgtgtatcagccgcagccccatcctcagccgcctccttatggacactgcgtgaccgactccggcgtggtctactccgtgggtatgcaatggctaaagacccaaggaaacaaacaaatgctttgcacttgcctcgggaacggtgtctcttgtcaggagaccgccgtcacacagacatacgggggaaatagcaacggagaaccatgcgtactgccgtttacctacaatgggcgtacattctactcctgtaccactgagggacgccaggacgggcacctgtggtgctccacaacgtccaattatgaacaggaccagaagtactcgttctgcactgatcacaccgtgctggtgcaaacaagaggcggaaactctaatggagcactgtgtcattttccatttctgtataacaatcataattacacagattgcactagcgaaggcaggagggacaacatgaagtggtgtggcaccacccagaattatgacgcagatcagaaatttggtttctgcccgatggcggcacacgaagagatttgcaccaccaatgagggagtcatgtacaggatcggcgaccagtgggataaacagcatgatatgggccatatgatgcgatgcacttgcgtgggcaacggacggggagagtggacttgcatcgcttatagccaactgcgcgatcaatgcatcgtcgacgatatcacctacaacgtgaatgacaccttccataaaaggcacgaggagggacatatgcttaactgtacttgtttcggacagggacgcggacggtggaagtgcgacccggtggaccagtgtcaagacagtgagacgggaacgttttaccagattggggactcctgggagaaatatgtgcacggcgttcgctatcagtgctactgctacggaaggggcatcggggaatggcattgtcagccactgcagacatacccctcttccagtgggccagttgaagtgtttataaccgagaccccaagtcagcccaatagccacccaatacagtggaacgctcctcagccctcccatatctccaaatatatccttcggtggagacccaagaattctgtggggcgttggaaagaggcaactatccccggacatctgaactcttacactattaagggactgaaaccaggagttgtctatgaaggccaactcatatcaattcaacagtacggtcaccaagaagtaactcgcttcgatttcacgacaacctccacctctacaccagttacctccaatactgtaaccggagaaaccaccccatttagccccctggtggccacttccgagagcgtgacggagatcacagcttcatccttcgtggtgagctgggtgtcggcaagcgatacagtgtctggattccgggtcgaatatgagcttagtgaagagggcgatgaaccacagtacctagatttgccctctacagcaaccagtgtgaatattcctgatctgctcccaggacggaagtatattgtcaacgtgtatcaaatatccgaagatggcgagcaatccttaatacttagtacatcccagaccaccgctccagatgcccctcctgacaccactgtggatcaggtagacgacaccagcattgtcgttcgctggtccaggccccaggctccaattaccggctataggattgtgtattcaccatctgtcgagggctcttcaacagagttgaacctgcctgagactgcgaactccgtgactctttccgatctgcagcctggtgtgcagtataacatcacgatctatgccgttgaggagaatcaggaaagtacaccagtggtcatccaacaggagacgaccggcactcccaggtctgatacggtgccgtcaccgagagacctgcaatttgtagaagttaccgatgtgaaggtgactattatgtggacaccaccagaatctgccgtgacaggatacagagtggatgtgatcccggtaaacttgcccggtgaacatggccagcggctcccaatatctcgcaacactttcgccgaagttaccggcctgagtccaggtgttacctattacttcaaggtctttgccgttagccacggaagagagtccaaacctcttacagctcaacaaaccacgaagctggatgcaccgacaaacctgcagttcgtaaatgagaccgactcaacggtgctggtgcgctggaccccaccccgagctcagatcacgggataccgcctcaccgttggactcacgaggagggggcaaccacggcagtataacgttggaccctcggtctctaaatacccactgcgcaatttgcagccagcctctgagtatacggtatctcttgtagccattaaagggaatcaggaaagccctaaagccactggggtgtttactacgcttcagcccggatcgagcatcccgccatataataccgaagttactgagaccaccatcgtgattacttggactcctgcccctaggatcgggttcaagctgggggtgcgcccttcacaaggtggcgaggccccacgcgaagtgacttcagactccggaagcattgtggtcagtgggttgactccgggagtggagtacgtgtacactatccaagtgttgagggatggccaggagcgcgacgctcccatagtcaacaaggtggtgactccccttagccccccaactaacttgcatctggaggcaaatcctgacaccggggtccttactgtgtcatgggaaaggagtacgacgcccgacataaccggatatcgaattaccactacccccacaaacggccagcagggaaattccctggaggaggttgtgcacgcggaccagagctcatgcacattcgacaatcttagcccaggactggagtataacgtttcggtgtatacagtcaaagatgataaggagtccgtgccaatctccgacacaatcatccccgaagtccctcagttaaccgatttaagttttgtggacattactgacagcagtataggtttaagatggactcccctgaacagctctaccatcatcggttatcggatcacagtagtggccgctggggagggcattcccattttcgaggacttcgtggactcttctgtcggctactacaccgtaaccggtttagagccgggaatagactatgatatctccgtgattacattgatcaatgggggtgagtctgcccctaccacgctgacccaacagacagcagttcccccaccaacggacctgcgtttcactaatattggacctgacactatgagggtcacgtgggcgccaccaccgtccatcgacctgactaacttcctcgtaagatactcccctgtgaagaacgaagaagacgtcgcagaactctcaattagtccatcagacaacgctgtggtcttgactaacctcctacccggaactgaatacgtggtaagcgtcagcagcgtgtatgagcagcacgagtctacaccactgcgcggaaggcagaagactggcctggacagtcctaccgggattgacttcagcgatatcacggctaatagtttcaccgtccattggattgcccctagagccaccatcaccggatataggattagacatcatccggaacatttctctggccgacccagagaggacagggtgccgcatagtcggaactcaattaccttgaccaatctgacacctggcaccgaatacgttgtaagtatcgttgccctgaacgggagagaggaaagccctctgcttattggccagcagtctaccgtttccgacgttcctcgcgacctagaggtggttgctgcgaccccaaccagtttacttatcagttgggacgcgcctgccgtgactgttaggtattatcggatcacgtacggggaaaccggcggaaatagccccgtacaggaatttacagtgcctggcagcaagagcacagccacaatctctgggttgaagccaggcgtggattatacgatcaccgtatatgccgtcacagggaggggagactcccccgcttccagcaaaccaatcagcatcaattaccggacggagatagacaagccaagtcagatgcaggttacggacgttcaggacaactcaatctctgttaagtggctccctagtagcagtcctgtgacaggctaccgggtgacaaccacccctaagaacggtcccggtccaacaaagacaaaaaccgcgggtcccgaccagacagaaatgaccattgagggattgcagccaaccgtggaatacgtagtttcagtctatgcccagaatccatcgggggagtctcagccattggtgcaaacagcagtaactaatattgatcgaccaaagggactggcctttaccgatgtagatgtggactcgattaagatcgcctgggagtcgccacagggacaggtctctagataccgcgttacctactctagtcccgaagacggcatccacgaattgtttcccgcacccgatggcgaggaggataccgcagaattacagggcttgaggcccggatctgagtataccgtttctgtcgtagcccttcacgacgacatggaatcgcaacctctgattggcactcagagcacagctatccccgcaccaacagacctcaagtttacccaagtgacccccacttcactgtctgcccaatggactccacccaatgtacaattgactggttacagggtgcgagtgacccccaaggagaagactggacctatgaaggaaattaatctggcacctgattcaagcagcgtcgtggtatccggcctcatggttgccaccaagtatgaagtgagcgtgtatgccttgaaggacactctcacttcccgccctgctcaaggagtggtgaccactctggaaaacgtgagcccccctcgaagagcgcgtgtaactgatgcaaccgagacgaccattactatctcttggaggacaaagaccgagacgataacaggtttccaggtggatgcagttcccgcaaatgggcaaacacctatccagagaactatcaaaccagatgttaggtcttacaccatcactggtctgcagccgggaactgactacaaaatatacctttataccctgaatgacaacgctaggtcctcccctgtggtgatcgacgcttcaacagctattgacgctcctagtaacttgcgattcctggcgacgactcctaattctctgctagtgtcgtggcagcctccgagggcacgcattactggttacatcattaagtatgaaaagccagggagtcctccccgtgaggtggtaccaaggccccgtccgggtgtcacggaagcaaccattactggccttgagcctggtactgagtatacaatttatgtcatcgctttgaagaacaatcagaaatcagagccacttatagggcgaaagaagaccgatgagctgcctcaactggtgactttgccacatccaaacctgcatgggccagaaattctcgatgtgccctctacagtccaaaagacaccgtttgtgactcaccccggatatgacaccggcaacgggattcagctccccggaacgagcgggcagcagccaagtgtgggacagcagatgatcttcgaggaacacggtttcagacggactaccccgccaacaaccgccacaccaattcgccacagaccgaggccataccctccaaatgttggcgaggagatccagatcggacacattcccagagaggatgtggattaccatttgtacccgcatggccctggcctcaacccaaacgcttctaccgggcaggaggccctgtctcaaaccactattagttgggccccattccaggatacatccgagtacatcattagttgccaccccgtcggtacagatgaagagccgcttcaattccgagtgcccggaacatcgacaagcgccaccctgactggcctgacacgtggcgctacctacaatgtgatagttgaggccctcaaagaccaacagaggcataaggtccgggaggaagtggtcacagtggggaactcagtgaatgagggcctgaatcagccgactgacgacagctgttttgacccgtataccgtgtctcactatgctgtcggcgatgaatgggagagaatgagcgaatccggtttcaaattactttgtcagtgtttagggttcggtagtggtcatttccgatgcgatagcagccgctggtgccacgataacggggtaaattacaaaattggtgaaaaatgggacagacagggagagaatggacagatgatgagttgcacctgccttggcaatggaaagggtgagtttaagtgcgatcctcatgaggcaacatgttatgacgatggaaaaacctaccacgtgggcgaacagtggcagaaggagtacctgggagccatatgctcgtgtacgtgcttcggcggacagcggggatggcggtgcgataactgtcggagacctggtggggagccttcccccgaaggcacaacaggtcagtcttataaccagtacagtcagaggtaccaccaacggactaatacaaacgtcaattgccctatcgaatgtttcatgccactcgatgtacaagctgatcgggaagattctcgggaatac

SEQ ID NO: 265671 - DNA, 7434 bp, Artificial Sequence
  derived and/or modified sequence
atgcttcgcgggccgggacccgggcttctgctgttagctgtccaatgcctagggaccgccgtgccatctacaggagcaagcaaatctaagcggcaggcgcagcagatggtgcagcctcagtctcccgttgccgtgtcacagtctaagccgggctgttacgacaatggcaagcactaccagatcaaccagcaatgggaacgtacttatctgggaaacgcactcgtttgtacatgctatgggggatcccggggcttcaactgtgaatctaaacccgaagcagaagagacatgctttgataaatacaccggaaatacatacagagtcggcgatacttacgagcgccccaaggattctatgatttgggactgtacgtgcattggtgctgggcgcggacggatcagctgcaccatcgccaaccgctgtcatgagggtggacagagctacaaaataggggacacctggcggcggccccatgaaactggcggctacatgcttgaatgcgtctgcttggggaatggcaagggagaatggacatgcaagccgatagcagagaaatgcttcgatcatgcagctgggaccagctacgtggtcggcgaaacttgggagaagccctatcagggctggatgatggtggactgtacatgtctcggtgaggggagtggtagaattacctgcactagccgaaacaggtgcaacgatcaagacacaagaacaagctatcgcatcggtgatacatggtctaagaaagataaccgggggaatctgctccagtgcatctgtaccggaaacggacggggcgaatggaaatgtgaacgccacactagtgtacagacaacatcctcgggttcggggccttttactgacgtgagagctgccgtgtaccagccccagccacaccctcagccccccccttacggccactgtgtgaccgatagtggtgtagtttattctgttggcatgcagtggttaaagacacagggcaataaacagatgttgtgcacatgcctggggaacggggtgtcttgccaagagactgcagtgacccagacctatggcggcaactctaacggcgagccctgcgtactgccctttacctataacgggagaacattctattcctgcacaactgaaggccgacaagatggtcacctgtggtgcagcaccacatccaactatgagcaagaccaaaagtactccttttgtacggatcataccgtcctagtccaaacacgaggtggaaacagtaatggcgctctctgccactttccattcttatacaacaaccataactatactgactgtacctctgaggggaggcgtgataatatgaaatggtgcgggacgactcaaaattatgatgccgatcagaaatttgggttttgtccaatggccgctcatgaagaaatctgtaccactaatgaaggcgtgatgtatcggattggagatcaatgggacaagcaacatgatatgggccacatgatgcgatgtacatgcgtgggcaatggccgcggcgaatggacatgcatcgcctactcacaactgcgcgaccaatgcattgttgacgatatcacgtacaatgtcaacgacacattccataagaggcacgaagagggtcatatgcttaactgtacctgtttcggccagggaaggggcaggtggaagtgcgatcctgtggatcaatgccaagactccgaaaccggcacattctatcagatcggagactcatgggaaaagtacgtgcacggtgtaaggtatcagtgttattgctatggccgcggaatcggggaatggcattgtcagccccttcaaacttacccttcgtcatccggccccgtggaggtgttcattactgagaccccgtcccagcctaactctcatccgatccagtggaacgccccgcagcccagccacatctccaagtacatattacgatggaggccaaagaactccgtaggcagatggaaagaggctacaatccctggccatctgaacagctatacgattaaaggcctcaagccaggcgtggtgtacgagggccagctaatttccatccaacaatacggccaccaagaagtgacacgattcgattttacaactactagcactagcacacctgtcacatccaacacggttaccggcgaaaccactcctttcagtcctctggtggccacatccgagtctgtaaccgaaatcaccgccagctcttttgttgtatcttgggtaagcgcctcggacactgtgtccggatttcgcgtggaatatgagctctctgaagaaggcgatgagccccagtacctagacctgccttctacggcgacatcggtgaatattccagatttgctccccggcaggaagtatatcgtgaacgtgtatcaaattagcgaggatggcgaacagtcattgattctaagcacatcacagactactgcccctgacgccccacccgataccaccgttgaccaggtggacgacacgagtattgtggtccggtggtcccgccctcaggccccaattaccggttaccgcatcgtatatagcccatcggtggaagggtcttccacagaactgaatctgcctgagactgccaacagtgtgaccctttctgatctccagcctggcgttcagtataacataacaatctacgccgtggaagagaaccaggaatccacacccgtggtgatccagcaggagaccaccgggactcctagatccgataccgtgccctccccccgggacctgcagtttgtcgaagtaacagatgtgaaggtgactataatgtggaccccccctgaaagtgccgtcacaggatatcgagtcgatgtgatacccgtgaatctgccaggcgaacacggacaaaggctgcccattagtcgtaatacttttgcggaggtgaccggactgtctcccggcgtgacctactacttcaaggtgttcgcagtgtcccacggaagagagtctaagccactgacagcacagcagacgaccaagctggacgctcccacaaacctccaattcgttaacgaaaccgattctaccgtgctcgtacgatggacccccccccgcgcacaaattaccgggtacagactgacggtgggcttaactcgcaggggacagccaaggcagtacaacgtggggccttctgtaagcaaatacccactacgcaatctacaaccagcatccgagtatacggtaagtctggtagcgatcaaagggaaccaggaaagccccaaagctaccggggttttcactacactgcagccgggctcctctattccaccctacaacacagaggttacagaaaccacaatcgtgattacctggacccctgcccctcgcattggcttcaaacttggcgtgaggcccagccaaggcggggaagctcctagggaagtgacctcagactccggctctatcgtggtttccgggctcacaccaggcgtggagtacgtatatactatccaggtgttacgggatggccaggagagagatgcaccaatcgtgaataaagtggttactcctctctctccacctaccaaccttcatctggaagctaacccagatacaggcgttctcaccgtgtcatgggagcggagcactacgccggatataacaggctacagaattactaccactcccaccaatgggcaacaaggcaattccctggaggaggttgtgcatgccgatcaatccagttgtacgtttgataacctgagccctgggctcgaatacaatgtgagtgtgtacacggtcaaagacgataaggagtccgttccaataagtgacaccattattcctgaggtaccgcagttgactgatctgtccttcgttgatataacagactcctccattggactccgctggactcctctcaattcttcgactatcataggatataggattacggtcgtcgcagcgggcgaaggtatcccaatcttcgaagactttgttgatagcagcgtgggatactatacagtgacaggacttgaacctgggattgattacgacatttccgtcatcactctcatcaatggcggcgaaagcgcacctactacccttactcaacagactgctgtgcccccacctacagatctaaggttcactaacatcggacccgacacaatgcgcgttacctgggcaccacctccctctatcgatctcactaacttccttgtgaggtacagtcccgtgaaaaatgaagaagacgtggccgagctgagtatctctccttccgataacgcggtggtactcactaacttactgccaggtaccgagtatgtggtttctgtcagttccgtatacgaacaacatgagagcacacccctgcgcggccgtcaaaagaccggcctggattccccaacggggattgatttctcagacataacggcgaattccttcaccgtgcattggatagctcccagagcaaccatcacaggataccgtatcagacaccatccggagcattttagtggccggccacgagaggatagagtgccccattcaaggaactctatcactctgactaatttgacgccaggtaccgagtacgtagtgtctatcgtcgctcttaacggaagagaggagtcccctttgctgatcggacaacaaagcacagtctcagatgtccctagggacctggaggtcgttgcggctacgcctacgtcgttattgatctcatgggacgccccggcggtgactgtcagatactataggattacttacggagagactgggggtaatagtcctgttcaagagttcactgtccctggctctaagtctaccgctactataagcggattgaagcccggggttgactacaccatcacagtttacgccgtgacaggaagaggtgattctccggcctcatccaagccaatatctatcaattacaggacagagatcgacaaaccaagccagatgcaagtcacagatgtgcaggataactctatttcagttaaatggttgccctcgtcttcacctgttacagggtatagggtgacaactactcctaagaacggaccaggccctaccaagacgaaaaccgcgggaccagatcagacggagatgacaatcgaggggctgcagccaactgttgagtacgtggtgagcgtttacgcgcaaaacccatcaggtgagtcacagccactggtgcagacagctgtgactaacatcgaccgccccaaaggccttgcatttacagacgtggacgtggacagcatcaagatcgcttgggagagcccacaaggacaggtttctagatatagagtgacatactcttccccagaggatggaatccacgagctgtttcccgcaccagacggagaggaagataccgctgagctgcaggggctgcgtcctggcagtgaatacacagtcagcgtggtcgccctccatgacgatatggaaagtcagcccctgattggtacacagtccacggcgattcccgcccctaccgatctcaagttcactcaggtgactcctacatctctgtccgcgcagtggactcctccaaatgttcagcttaccggataccgggtaagggttacacccaaggagaagaccggacccatgaaggaaattaacctcgctcctgattcaagcagcgtggtcgtttccggcctcatggtcgctaccaagtatgaggtgagtgtgtacgctctgaaagataccctcacctctaggcccgcccagggcgtggtgacgaccctggaaaacgttagtccaccccggcgcgcacgcgtgactgatgcgaccgaaacaacaataactatctcctggagaacgaagaccgaaacgattacaggatttcaggtggatgcagtcccagctaatggtcagactccgatacagcgcacaattaaacccgacgtgcgcagctacactatcaccggtctccaacccgggaccgactacaaaatttatctgtatactcttaacgataacgcccggagctctccagtcgtgatcgatgcgtccactgctatagacgccccctccaaccttagatttcttgctacaacacctaacagcctactagtgtcgtggcagcctcctcgagcacgcattaccggatacattattaaatacgagaaacctggctctcctccccgggaagttgtgccgcgaccaagacccggcgtgaccgaggccacgattaccggtctcgaaccgggtaccgagtacactatttatgtgattgctttaaaaaacaaccagaagagcgagcctctgatcggccggaagaaaacagatgaattaccccaactcgtgaccctgccacatcccaacctccatgggcccgagattcttgacgtccccagtacagtccagaagaccccgttcgtaacacatcccggttatgacaccggcaatggaatacagctgccagggacaagtgggcagcagccatctgtgggtcagcagatgatcttcgaggagcatggcttccggaggacgactccgcctaccacagccactcctatccggcatcggcctagaccatacccacctaacgtgggggaagaaatacagattggccacatccctcgtgaggatgtcgactatcatctgtacccgcatggacccgggctaaacccaaacgcatcaactggacaagaagcactgagccagaccacaattagctgggctccattccaagacactagcgaatatattatctcctgccacccagtcgggaccgatgaggaacctttgcagttcagagtgccaggcaccagcacctccgctactctgactgggttaacccggggcgctacctacaatgtgattgttgaggcactgaaggaccaacagaggcacaaagttcgcgaggaggtcgttacggttggcaatagtgtcaatgaaggacttaaccaacctaccgacgactcgtgtttcgacccatataccgtctcacactatgccgtgggagatgagtgggaaagaatgtccgagtcaggatttaagctgctctgccaatgcttgggcttcggttcggggcattttaggtgcgatagttctagatggtgccacgacaatggggttaattacaaaataggggaaaagtgggatagacagggagagaatgggcagatgatgagctgcacatgcctgggaaatgggaaaggggagtttaaatgtgacccacacgaagccacgtgttatgatgacggcaagacataccacgttggagagcagtggcagaaagagtacctgggcgccatttgtagttgtacatgttttgggggacaacgtggatggcgctgtgataattgtagaagaccaggaggcgagcctagcccagagggcactaccggacagtcttataatcagtatagtcagagataccaccagaggactaatactaacgtcaattgcccgattgaatgctttatgcccttggacgtacaggccgacagggaggattcaagggaatag

SEQ ID NO: 265672 - DNA, 7434 bp, Artificial Sequence
  derived and/or modified sequence
atgttgcgggggccaggtccagggcttttactgctggccgtgcagtgcttgggcacagccgtcccttccaccggagcatctaagagcaaaagacaggcccagcagatggtgcaaccacaatctccagtggcagtatcacagtctaaacccggttgttacgacaatggcaagcattatcaaataaatcaacagtgggaaagaacttacctgggcaacgcgttagtctgcacatgctacggggggagtaggggttttaactgtgagtctaaacccgaagctgaggaaacatgtttcgacaagtacacagggaacacctatcgagtgggagatacttacgaacggcccaaagatagtatgatttgggactgcacatgtatcggtgccggccgggggcgaatttcttgcacgattgctaatagatgccatgaaggagggcaaagttataagattggagatacctggagacgaccacatgaaaccggcgggtacatgttggaatgcgtatgcttgggcaacggaaaaggtgaatggacgtgtaagcccatcgccgaaaaatgcttcgaccatgctgctggaacaagttacgtggtaggggaaacatgggaaaaaccttaccagggttggatgatggtggattgtacttgtttaggtgaaggtagtggccgcataacatgtacatctcggaatcgctgcaatgaccaagatacaagaacctcttatcgtattggtgatacttggagcaagaaagataacaggggtaacctcctccagtgcatttgtacaggaaatggacggggagaatggaagtgcgagaggcatacttctgtacagacaactagtagcgggtctgggccatttacggacgttagagccgctgtttatcagccccagcctcacccacaaccaccaccttatgggcattgcgtaacagactctggggtcgtttattcagtcggcatgcagtggctcaaaactcagggcaataagcaaatgctctgtacgtgtcttggaaatggggtgtcctgccaagagaccgccgtcactcagacatacggtggcaattctaacggcgagccatgcgtacttccatttacctacaatggacgaaccttctactcgtgcaccactgaaggtaggcaagatggtcacctgtggtgcagcacaacaagcaattacgaacaagatcaaaagtattcattttgtacggatcataccgtcctagtccaaacacgaggtggaaacagtaatggcgctctctgccactttccattcttatacaacaaccataactatactgactgtacctctgaggggaggcgtgataatatgaaatggtgcgggacgactcaaaattatgatgccgatcagaaatttgggttttgtccaatggccgctcatgaagaaatctgtaccactaatgaaggcgtgatgtatcggattggagatcaatgggacaagcaacatgatatgggccacatgatgcgatgtacatgcgtgggcaatggccgtggcgaatggacctgtattgcatattcgcaattgagagaccagtgcatagtggacgatattacttataatgtgaacgatacatttcataagcgccatgaagaaggacacatgctaaactgtacctgttttggtcaggggagagggagatggaaatgcgatccagtagaccaatgccaggattcagagacgggcacattttatcagatcggcgacagctgggaaaaatacgtgcatggggtaagataccagtgttattgttacgggagagggatcggggaatggcattgccagcctctgcagacataccctagcagtagcgggcccgttgaagttttcatcaccgagaccccctcacagccgaatagtcatcccattcagtggaacgccccccagccaagccacatttccaaatatattctgagatggcgacccaaaaactcggtgggacggtggaaagaggcaaccattcccggacatctgaacagctatactataaaaggtcttaaaccaggagtcgtatacgagggacagttaatcagtatccaacagtacggacatcaggaagtgacgcggttcgatttcaccactacatctaccagcacccccgtgacctctaacaccgttacaggagagaccactcctttcagtccgttggtggctacctccgaatccgttaccgaaatcacagcttcatcattcgtcgtgtcctgggtgtccgcatccgatacagtgtctggatttcgcgtagaatacgagctatctgaagagggtgatgagccacaatatttagacctgccatctactgcgacctccgtgaatatacccgacctcctgcccggtaggaagtacatcgtgaacgtttatcagatatctgaagatggcgaacagtccctcatattaagcacgtctcaaacgaccgctcccgacgcacctcctgacaccaccgtcgaccaagtggatgacacctcaattgtggttaggtggtccaggcctcaggcacctatcacaggctataggattgtatatagcccctcagtggagggatcatccacggaactaaatctacctgaaaccgctaatagtgtgacactcagtgatctccagccaggcgtccagtataacatcaccatttatgccgtcgaggaaaatcaagaatccacgcccgttgtcattcaacaggaaaccacaggaactcctagatccgataccgtgccctccccccgggacctgcagtttgtcgaagtaacagatgtgaaggtgactataatgtggaccccccctgaaagtgccgtcacaggatatcgagtcgatgtgatacccgtgaatctgccaggcgaacacggacaaaggctgcccattagtcgtaatacttttgcggaggtgaccggactgtctcccggcgtgacctactacttcaaggtgttcgcagtgtcccacggaagagagtctaagccactgacagcacagcagacgaccaagctggacgctcccacaaaccttcagtttgtgaatgaaaccgactctacagttctagttcggtggacaccccctagagcccagatcaccggatatagattgactgttggcctgactagaagaggccagccgagacaatacaatgtgggccctagcgtcagtaaataccctctcagaaatctgcagccagcatcagagtacactgtgtctcttgtggctatcaaaggaaaccaggagtcccccaaagctaccggtgtctttacaactctccaacccggatccagtattcctccctataacactgaagtaactgaaaccactatcgttattacatggacacccgcaccgaggatcgggttcaaactgggcgtcagaccctctcagggaggcgaagcaccacgggaggtgacctctgactcaggttctattgttgtgagtgggctaactccaggagtagagtacgtttataccatacaggtgttaagagatggccaggaaagggacgccccaatcgtgaacaaagtcgtgacgcctctgtccccacctactaatttacacctagaggccaacccggacacaggcgtcctcactgttagttgggaacgcagcactacacccgacattacaggttatagaatcaccaccactcccaccaatggccaacagggaaacagtcttgaagaagtcgtgcacgcagatcagagcagctgtacatttgataacttgagccccgggctggaatataacgtttctgtgtataccgtcaaggatgataaggaatccgtgccaataagcgacacaatcattccagaagtgcctcaacttaccgacctgtctttcgtggacattaccgactcatctattggcctccgatggactccattaaactcatccactatcatcggctaccggattaccgtagttgcagctggtgaaggaattcctatctttgaggattttgtagattcttcagtgggatactatactgtcaccggcctcgagccgggcatcgactatgacatctccgtgattacgcttattaatggaggcgaaagcgctcccactacattgacccagcaaaccgccgtcccaccgcccaccgacttacgattcactaatataggtcctgatacgatgcgggttacctgggctccccccccatcaatcgatctgactaactttctagtacggtactctccagtgaaaaatgaagaagacgtcgccgaactttcgattagcccatcggacaatgctgtggtcctgactaacttgctgcccggaacagagtatgttgtgtcagtctcaagtgtctatgaacaacatgagtccacgcctctgagaggacgtcagaagaccggcctggatagccccactggaatcgacttctccgacataactgctaattcctttactgtgcactggattgctccccgcgccactattacagggtatagaattagacatcatcctgagcatttctctggacgtccccgggaagatagggtgccccattcccgcaacagtataacactgacaaacctaacccccgggaccgagtacgttgtctctatcgtggcgcttaacgggcgcgaggaaagcccactgctaatcggtcagcagagtacagtgtcagacgtaccccgagacctggaagtagtcgctgcaactcccacctccctgttaatttcgtgggacgccccagcagtgaccgtgcgctactacagaattacttacggagaaacagggggaaacagtccagtgcaagaattcaccgtccccggctcgaagtccacggccaccataagcggactgaaacccggggtcgattacacaataaccgtatacgccgtaaccgggagaggtgactcaccagcatcaagcaagccaatttcaattaattaccgaaccgaaatagacaaaccttcccagatgcaggtcaccgatgtgcaggataatagtataagtgttaagtggctgcccagttcctcccccgttacgggctacagagttacaactaccccaaagaacggtcctggacctacaaagaccaaaaccgccggcccagaccagaccgagatgaccatcgaaggccttcaaccgaccgtggagtatgtcgtcagcgtatacgcccagaacccctccggcgaatcccagcctctcgttcaaacagcggtaaccaacattgaccgacctaagggactggcatttacggatgtggacgtagacagtattaaaatcgcatgggaatctccccagggacaagtgagccggtatagggttacatattctagtccagaagacggcattcacgagctgtttccggcaccagatggcgaggaagacacagccgagctccagggtctccggccaggttccgagtatacagtgagcgtggtcgccctgcatgacgatatggaaagccagcccttaataggcacccaatctacagcaatcccagcacctacagatctgaagtttactcaggtgacacccacatcactgtcagctcaatggactccgcctaacgtccagctgactggctaccgcgttagagtaaccccaaaggagaagacaggaccaatgaaggagatcaatctagcgccggacagctcttctgttgttgtgtctggtctgatggtcgctaccaaatatgaggtttcagtatacgccttgaaagatactttgacatcaagacctgcccagggggtcgtgaccaccttggaaaatgttagtccacctaggcgggcccgagtgaccgacgctaccgaaacaaccattaccatctcttggagaacgaaaactgaaacaattactggcttccaggtggacgctgtgcccgctaacggccaaactccaatccaaagaactatcaaaccagatgttagaagttatacaattacaggtctccagccaggaaccgactacaaaatttacctctacacactgaacgacaacgcgcgtagtagcccggtcgtgatcgatgccagcaccgccattgacgccccctctaatctccggtttttggccactacaccgaactctctacttgtctcctggcagccgccgcgcgcgcgaataacaggttatatcataaagtatgagaaacccggatcccccccacgagaggttgtgccaagacctagacccggtgtaactgaagcaactatcacaggacttgaaccggggactgaatacaccatctatgttattgctctcaagaataaccagaaatcagagccgctgatcggacgcaagaagactgatgaactgccacagctcgtcacgctgccccatcctaatttacatggacccgagattctagacgtgccttccactgtgcaaaagacgccattcgtaacgcacccaggctacgacaccggcaacggaattcaactgcctggtacgtcagggcagcaaccaagtgtcgggcagcaaatgatctttgaagagcacggcttcagaaggacaactcctccaaccaccgccacacctattcgtcatagacctagaccttatcctcctaacgtcggcgaggaaattcagatcggtcacatcccaagagaagacgtggactatcatctgtatccgcacggcccaggactcaaccccaacgcatctaccggccaagaagctctcagccagacgactatttcatgggctcctttccaggatacgtctgagtacatcattagctgtcaccccgttggaacagacgaagaacctctccagtttcgagtgcctggcacaagtacttcggccaccctgacagggctgacaagaggagcgacctacaacgttatcgtggaagctctcaaggatcagcagaggcataaggtcagagaagaagtggtgactgttgggaacagtgtgaacgaaggcctgaaccagcctacagatgacagctgttttgacccctatacggtctcccattatgcggttggagatgagtgggagagaatgtctgagagcgggttcaagctcctctgtcagtgccttggattcggatccggccattttaggtgtgatagttctagatggtgtcatgataacggagtgaactataagattggagaaaagtgggatcggcagggagagaatgggcaaatgatgtcctgtacttgcttagggaacgggaaaggcgaattcaaatgtgaccctcacgaagcaacatgttatgatgatggaaagacctaccacgtgggcgaacaatggcagaaggagtatctcggtgccatctgctcttgcacttgctttggaggacaaagagggtggagatgcgacaattgcaggagacccggcggagaacccagccccgaagggactactggtcagagttataatcagtacagtcagcgctaccaccagaggacaaacactaacgtaaactgccctatagaatgtttcatgcccctggacgtacaagccgaccgcgaagacagtcgcgagtag

SEQ ID NO: 265673 - RNA, 7434 nt, Artificial Sequence
  derived and/or modified sequence
augcuucgcgggccgggacccgggcuucugcuguuagcuguccaaugccuagggaccgccgugccaucuacaggagcaagcaaaucuaagcggcaggcgcagcagauggugcagccucagucucccguugccgugucacagucuaagccgggcuguuacgacaauggcaagcacuaccagaucaaccagcaaugggaacguacuuaucugggaaacgcacucguuuguacaugcuaugggggaucccggggcuucaacugugaaucuaaacccgaagcagaagagacaugcuuugauaaauacaccggaaauacauacagagucggcgauacuuacgagcgccccaaggauucuaugauuugggacuguacgugcauuggugcugggcgcggacggaucagcugcaccaucgccaaccgcugucaugaggguggacagagcuacaaaauaggggacaccuggcggcggccccaugaaacuggcggcuacaugcuugaaugcgucugcuuggggaauggcaagggagaauggacaugcaagccgauagcagagaaaugcuucgaucaugcagcugggaccagcuacguggucggcgaaacuugggagaagcccuaucagggcuggaugaugguggacuguacaugucucggugaggggagugguagaauuaccugcacuagccgaaacaggugcaacgaucaagacacaagaacaagcuaucgcaucggugauacauggucuaagaaagauaaccgggggaaucugcuccagugcaucuguaccggaaacggacggggcgaauggaaaugugaacgccacacuaguguacagacaacauccucggguucggggccuuuuacugacgugagagcugccguguaccagccccagccacacccucagccccccccuuacggccacugugugaccgauagugguguaguuuauucuguuggcaugcagugguuaaagacacagggcaauaaacagauguugugcacaugccuggggaacggggugucuugccaagagacugcagugacccagaccuauggcggcaacucuaacggcgagcccugcguacugcccuuuaccuauaacgggagaacauucuauuccugcacaacugaaggccgacaagauggucaccuguggugcagcaccacauccaacuaugagcaagaccaaaaguacuccuuuuguacggaucauaccguccuaguccaaacacgagguggaaacaguaauggcgcucucugccacuuuccauucuuauacaacaaccauaacuauacugacuguaccucugaggggaggcgugauaauaugaaauggugcgggacgacucaaaauuaugaugccgaucagaaauuuggguuuuguccaauggccgcucaugaagaaaucuguaccacuaaugaaggcgugauguaucggauuggagaucaaugggacaagcaacaugauaugggccacaugaugcgauguacaugcgugggcaauggccgcggcgaauggacaugcaucgccuacucacaacugcgcgaccaaugcauuguugacgauaucacguacaaugucaacgacacauuccauaagaggcacgaagagggucauaugcuuaacuguaccuguuucggccagggaaggggcagguggaagugcgauccuguggaucaaugccaagacuccgaaaccggcacauucuaucagaucggagacucaugggaaaaguacgugcacgguguaagguaucaguguuauugcuauggccgcggaaucggggaauggcauugucagccccuucaaacuuacccuucgucauccggccccguggagguguucauuacugagaccccgucccagccuaacucucauccgauccaguggaacgccccgcagcccagccacaucuccaaguacauauuacgauggaggccaaagaacuccguaggcagauggaaagaggcuacaaucccuggccaucugaacagcuauacgauuaaaggccucaagccaggcgugguguacgagggccagcuaauuuccauccaacaauacggccaccaagaagugacacgauucgauuuuacaacuacuagcacuagcacaccugucacauccaacacgguuaccggcgaaaccacuccuuucaguccucugguggccacauccgagucuguaaccgaaaucaccgccagcucuuuuguuguaucuuggguaagcgccucggacacuguguccggauuucgcguggaauaugagcucucugaagaaggcgaugagccccaguaccuagaccugccuucuacggcgacaucggugaauauuccagauuugcuccccggcaggaaguauaucgugaacguguaucaaauuagcgaggauggcgaacagucauugauucuaagcacaucacagacuacugccccugacgccccacccgauaccaccguugaccagguggacgacacgaguauugugguccgguggucccgcccucaggccccaauuaccgguuaccgcaucguauauagcccaucgguggaagggucuuccacagaacugaaucugccugagacugccaacagugugacccuuucugaucuccagccuggcguucaguauaacauaacaaucuacgccguggaagagaaccaggaauccacacccguggugauccagcaggagaccaccgggacuccuagauccgauaccgugcccuccccccgggaccugcaguuugucgaaguaacagaugugaaggugacuauaauguggacccccccugaaagugccgucacaggauaucgagucgaugugauacccgugaaucugccaggcgaacacggacaaaggcugcccauuagucguaauacuuuugcggaggugaccggacugucucccggcgugaccuacuacuucaagguguucgcagugucccacggaagagagucuaagccacugacagcacagcagacgaccaagcuggacgcucccacaaaccuccaauucguuaacgaaaccgauucuaccgugcucguacgauggacccccccccgcgcacaaauuaccggguacagacugacggugggcuuaacucgcaggggacagccaaggcaguacaacguggggccuucuguaagcaaauacccacuacgcaaucuacaaccagcauccgaguauacgguaagucugguagcgaucaaagggaaccaggaaagccccaaagcuaccgggguuuucacuacacugcagccgggcuccucuauuccacccuacaacacagagguuacagaaaccacaaucgugauuaccuggaccccugccccucgcauuggcuucaaacuuggcgugaggcccagccaaggcggggaagcuccuagggaagugaccucagacuccggcucuaucgugguuuccgggcucacaccaggcguggaguacguauauacuauccagguguuacgggauggccaggagagagaugcaccaaucgugaauaaagugguuacuccucucucuccaccuaccaaccuucaucuggaagcuaacccagauacaggcguucucaccgugucaugggagcggagcacuacgccggauauaacaggcuacagaauuacuaccacucccaccaaugggcaacaaggcaauucccuggaggagguugugcaugccgaucaauccaguuguacguuugauaaccugagcccugggcucgaauacaaugugaguguguacacggucaaagacgauaaggaguccguuccaauaagugacaccauuauuccugagguaccgcaguugacugaucuguccuucguugauauaacagacuccuccauuggacuccgcuggacuccucucaauucuucgacuaucauaggauauaggauuacggucgucgcagcgggcgaagguaucccaaucuucgaagacuuuguugauagcagcgugggauacuauacagugacaggacuugaaccugggauugauuacgacauuuccgucaucacucucaucaauggcggcgaaagcgcaccuacuacccuuacucaacagacugcugugcccccaccuacagaucuaagguucacuaacaucggacccgacacaaugcgcguuaccugggcaccaccucccucuaucgaucucacuaacuuccuugugagguacagucccgugaaaaaugaagaagacguggccgagcugaguaucucuccuuccgauaacgcggugguacucacuaacuuacugccagguaccgaguaugugguuucugucaguuccguauacgaacaacaugagagcacaccccugcgcggccgucaaaagaccggccuggauuccccaacggggauugauuucucagacauaacggcgaauuccuucaccgugcauuggauagcucccagagcaaccaucacaggauaccguaucagacaccauccggagcauuuuaguggccggccacgagaggauagagugccccauucaaggaacucuaucacucugacuaauuugacgccagguaccgaguacguagugucuaucgucgcucuuaacggaagagaggaguccccuuugcugaucggacaacaaagcacagucucagaugucccuagggaccuggaggucguugcggcuacgccuacgucguuauugaucucaugggacgccccggcggugacugucagauacuauaggauuacuuacggagagacuggggguaauaguccuguucaagaguucacugucccuggcucuaagucuaccgcuacuauaagcggauugaagcccgggguugacuacaccaucacaguuuacgccgugacaggaagaggugauucuccggccucauccaagccaauaucuaucaauuacaggacagagaucgacaaaccaagccagaugcaagucacagaugugcaggauaacucuauuucaguuaaaugguugcccucgucuucaccuguuacaggguauagggugacaacuacuccuaagaacggaccaggcccuaccaagacgaaaaccgcgggaccagaucagacggagaugacaaucgaggggcugcagccaacuguugaguacguggugagcguuuacgcgcaaaacccaucaggugagucacagccacuggugcagacagcugugacuaacaucgaccgccccaaaggccuugcauuuacagacguggacguggacagcaucaagaucgcuugggagagcccacaaggacagguuucuagauauagagugacauacucuuccccagaggauggaauccacgagcuguuucccgcaccagacggagaggaagauaccgcugagcugcaggggcugcguccuggcagugaauacacagucagcguggucgcccuccaugacgauauggaaagucagccccugauugguacacaguccacggcgauucccgccccuaccgaucucaaguucacucaggugacuccuacaucucuguccgcgcaguggacuccuccaaauguucagcuuaccggauaccggguaaggguuacacccaaggagaagaccggacccaugaaggaaauuaaccucgcuccugauucaagcagcguggucguuuccggccucauggucgcuaccaaguaugaggugaguguguacgcucugaaagauacccucaccucuaggcccgcccagggcguggugacgacccuggaaaacguuaguccaccccggcgcgcacgcgugacugaugcgaccgaaacaacaauaacuaucuccuggagaacgaagaccgaaacgauuacaggauuucagguggaugcagucccagcuaauggucagacuccgauacagcgcacaauuaaacccgacgugcgcagcuacacuaucaccggucuccaacccgggaccgacuacaaaauuuaucuguauacucuuaacgauaacgcccggagcucuccagucgugaucgaugcguccacugcuauagacgcccccuccaaccuuagauuucuugcuacaacaccuaacagccuacuagugucguggcagccuccucgagcacgcauuaccggauacauuauuaaauacgagaaaccuggcucuccuccccgggaaguugugccgcgaccaagacccggcgugaccgaggccacgauuaccggucucgaaccggguaccgaguacacuauuuaugugauugcuuuaaaaaacaaccagaagagcgagccucugaucggccggaagaaaacagaugaauuaccccaacucgugacccugccacaucccaaccuccaugggcccgagauucuugacguccccaguacaguccagaagaccccguucguaacacaucccgguuaugacaccggcaauggaauacagcugccagggacaagugggcagcagccaucugugggucagcagaugaucuucgaggagcauggcuuccggaggacgacuccgccuaccacagccacuccuauccggcaucggccuagaccauacccaccuaacgugggggaagaaauacagauuggccacaucccucgugaggaugucgacuaucaucuguacccgcauggacccgggcuaaacccaaacgcaucaacuggacaagaagcacugagccagaccacaauuagcugggcuccauuccaagacacuagcgaauauauuaucuccugccacccagucgggaccgaugaggaaccuuugcaguucagagugccaggcaccagcaccuccgcuacucugacuggguuaacccggggcgcuaccuacaaugugauuguugaggcacugaaggaccaacagaggcacaaaguucgcgaggaggucguuacgguuggcaauagugucaaugaaggacuuaaccaaccuaccgacgacucguguuucgacccauauaccgucucacacuaugccgugggagaugagugggaaagaauguccgagucaggauuuaagcugcucugccaaugcuugggcuucgguucggggcauuuuaggugcgauaguucuagauggugccacgacaaugggguuaauuacaaaauaggggaaaagugggauagacagggagagaaugggcagaugaugagcugcacaugccugggaaaugggaaaggggaguuuaaaugugacccacacgaagccacguguuaugaugacggcaagacauaccacguuggagagcaguggcagaaagaguaccugggcgccauuuguaguuguacauguuuugggggacaacguggauggcgcugugauaauuguagaagaccaggaggcgagccuagcccagagggcacuaccggacagucuuauaaucaguauagucagagauaccaccagaggacuaauacuaacgucaauugcccgauugaaugcuuuaugcccuuggacguacaggccgacagggaggauucaagggaauag

SEQ ID NO: 265674 - RNA, 7434 nt, Artificial Sequence
  derived and/or modified sequence
auguugcgggggccagguccagggcuuuuacugcuggccgugcagugcuugggcacagccgucccuuccaccggagcaucuaagagcaaaagacaggcccagcagauggugcaaccacaaucuccaguggcaguaucacagucuaaacccgguuguuacgacaauggcaagcauuaucaaauaaaucaacagugggaaagaacuuaccugggcaacgcguuagucugcacaugcuacggggggaguagggguuuuaacugugagucuaaacccgaagcugaggaaacauguuucgacaaguacacagggaacaccuaucgagugggagauacuuacgaacggcccaaagauaguaugauuugggacugcacauguaucggugccggccgggggcgaauuucuugcacgauugcuaauagaugccaugaaggagggcaaaguuauaagauuggagauaccuggagacgaccacaugaaaccggcggguacauguuggaaugcguaugcuugggcaacggaaaaggugaauggacguguaagcccaucgccgaaaaaugcuucgaccaugcugcuggaacaaguuacgugguaggggaaacaugggaaaaaccuuaccaggguuggaugaugguggauuguacuuguuuaggugaagguaguggccgcauaacauguacaucucggaaucgcugcaaugaccaagauacaagaaccucuuaucguauuggugauacuuggagcaagaaagauaacagggguaaccuccuccagugcauuuguacaggaaauggacggggagaauggaagugcgagaggcauacuucuguacagacaacuaguagcgggucugggccauuuacggacguuagagccgcuguuuaucagccccagccucacccacaaccaccaccuuaugggcauugcguaacagacucuggggucguuuauucagucggcaugcaguggcucaaaacucagggcaauaagcaaaugcucuguacgugucuuggaaaugggguguccugccaagagaccgccgucacucagacauacgguggcaauucuaacggcgagccaugcguacuuccauuuaccuacaauggacgaaccuucuacucgugcaccacugaagguaggcaagauggucaccuguggugcagcacaacaagcaauuacgaacaagaucaaaaguauucauuuuguacggaucauaccguccuaguccaaacacgagguggaaacaguaauggcgcucucugccacuuuccauucuuauacaacaaccauaacuauacugacuguaccucugaggggaggcgugauaauaugaaauggugcgggacgacucaaaauuaugaugccgaucagaaauuuggguuuuguccaauggccgcucaugaagaaaucuguaccacuaaugaaggcgugauguaucggauuggagaucaaugggacaagcaacaugauaugggccacaugaugcgauguacaugcgugggcaauggccguggcgaauggaccuguauugcauauucgcaauugagagaccagugcauaguggacgauauuacuuauaaugugaacgauacauuucauaagcgccaugaagaaggacacaugcuaaacuguaccuguuuuggucaggggagagggagauggaaaugcgauccaguagaccaaugccaggauucagagacgggcacauuuuaucagaucggcgacagcugggaaaaauacgugcaugggguaagauaccaguguuauuguuacgggagagggaucggggaauggcauugccagccucugcagacauacccuagcaguagcgggcccguugaaguuuucaucaccgagacccccucacagccgaauagucaucccauucaguggaacgccccccagccaagccacauuuccaaauauauucugagauggcgacccaaaaacucggugggacgguggaaagaggcaaccauucccggacaucugaacagcuauacuauaaaaggucuuaaaccaggagucguauacgagggacaguuaaucaguauccaacaguacggacaucaggaagugacgcgguucgauuucaccacuacaucuaccagcacccccgugaccucuaacaccguuacaggagagaccacuccuuucaguccguugguggcuaccuccgaauccguuaccgaaaucacagcuucaucauucgucguguccuggguguccgcauccgauacagugucuggauuucgcguagaauacgagcuaucugaagagggugaugagccacaauauuuagaccugccaucuacugcgaccuccgugaauauacccgaccuccugcccgguaggaaguacaucgugaacguuuaucagauaucugaagauggcgaacagucccucauauuaagcacgucucaaacgaccgcucccgacgcaccuccugacaccaccgucgaccaaguggaugacaccucaauugugguuaggugguccaggccucaggcaccuaucacaggcuauaggauuguauauagccccucaguggagggaucauccacggaacuaaaucuaccugaaaccgcuaauagugugacacucagugaucuccagccaggcguccaguauaacaucaccauuuaugccgucgaggaaaaucaagaauccacgcccguugucauucaacaggaaaccacaggaacuccuagauccgauaccgugcccuccccccgggaccugcaguuugucgaaguaacagaugugaaggugacuauaauguggacccccccugaaagugccgucacaggauaucgagucgaugugauacccgugaaucugccaggcgaacacggacaaaggcugcccauuagucguaauacuuuugcggaggugaccggacugucucccggcgugaccuacuacuucaagguguucgcagugucccacggaagagagucuaagccacugacagcacagcagacgaccaagcuggacgcucccacaaaccuucaguuugugaaugaaaccgacucuacaguucuaguucgguggacacccccuagagcccagaucaccggauauagauugacuguuggccugacuagaagaggccagccgagacaauacaaugugggcccuagcgucaguaaauacccucucagaaaucugcagccagcaucagaguacacugugucucuuguggcuaucaaaggaaaccaggagucccccaaagcuaccggugucuuuacaacucuccaacccggauccaguauuccucccuauaacacugaaguaacugaaaccacuaucguuauuacauggacacccgcaccgaggaucggguucaaacugggcgucagacccucucagggaggcgaagcaccacgggaggugaccucugacucagguucuauuguugugagugggcuaacuccaggaguagaguacguuuauaccauacagguguuaagagauggccaggaaagggacgccccaaucgugaacaaagucgugacgccucuguccccaccuacuaauuuacaccuagaggccaacccggacacaggcguccucacuguuaguugggaacgcagcacuacacccgacauuacagguuauagaaucaccaccacucccaccaauggccaacagggaaacagucuugaagaagucgugcacgcagaucagagcagcuguacauuugauaacuugagccccgggcuggaauauaacguuucuguguauaccgucaaggaugauaaggaauccgugccaauaagcgacacaaucauuccagaagugccucaacuuaccgaccugucuuucguggacauuaccgacucaucuauuggccuccgauggacuccauuaaacucauccacuaucaucggcuaccggauuaccguaguugcagcuggugaaggaauuccuaucuuugaggauuuuguagauucuucagugggauacuauacugucaccggccucgagccgggcaucgacuaugacaucuccgugauuacgcuuauuaauggaggcgaaagcgcucccacuacauugacccagcaaaccgccgucccaccgcccaccgacuuacgauucacuaauauagguccugauacgaugcggguuaccugggcuccccccccaucaaucgaucugacuaacuuucuaguacgguacucuccagugaaaaaugaagaagacgucgccgaacuuucgauuagcccaucggacaaugcugugguccugacuaacuugcugcccggaacagaguauguugugucagucucaagugucuaugaacaacaugaguccacgccucugagaggacgucagaagaccggccuggauagccccacuggaaucgacuucuccgacauaacugcuaauuccuuuacugugcacuggauugcuccccgcgccacuauuacaggguauagaauuagacaucauccugagcauuucucuggacguccccgggaagauagggugccccauucccgcaacaguauaacacugacaaaccuaacccccgggaccgaguacguugucucuaucguggcgcuuaacgggcgcgaggaaagcccacugcuaaucggucagcagaguacagugucagacguaccccgagaccuggaaguagucgcugcaacucccaccucccuguuaauuucgugggacgccccagcagugaccgugcgcuacuacagaauuacuuacggagaaacagggggaaacaguccagugcaagaauucaccguccccggcucgaaguccacggccaccauaagcggacugaaacccggggucgauuacacaauaaccguauacgccguaaccgggagaggugacucaccagcaucaagcaagccaauuucaauuaauuaccgaaccgaaauagacaaaccuucccagaugcaggucaccgaugugcaggauaauaguauaaguguuaaguggcugcccaguuccucccccguuacgggcuacagaguuacaacuaccccaaagaacgguccuggaccuacaaagaccaaaaccgccggcccagaccagaccgagaugaccaucgaaggccuucaaccgaccguggaguaugucgucagcguauacgcccagaaccccuccggcgaaucccagccucucguucaaacagcgguaaccaacauugaccgaccuaagggacuggcauuuacggauguggacguagacaguauuaaaaucgcaugggaaucuccccagggacaagugagccgguauaggguuacauauucuaguccagaagacggcauucacgagcuguuuccggcaccagauggcgaggaagacacagccgagcuccagggucuccggccagguuccgaguauacagugagcguggucgcccugcaugacgauauggaaagccagcccuuaauaggcacccaaucuacagcaaucccagcaccuacagaucugaaguuuacucaggugacacccacaucacugucagcucaauggacuccgccuaacguccagcugacuggcuaccgcguuagaguaaccccaaaggagaagacaggaccaaugaaggagaucaaucuagcgccggacagcucuucuguuguugugucuggucugauggucgcuaccaaauaugagguuucaguauacgccuugaaagauacuuugacaucaagaccugcccagggggucgugaccaccuuggaaaauguuaguccaccuaggcgggcccgagugaccgacgcuaccgaaacaaccauuaccaucucuuggagaacgaaaacugaaacaauuacuggcuuccagguggacgcugugcccgcuaacggccaaacuccaauccaaagaacuaucaaaccagauguuagaaguuauacaauuacaggucuccagccaggaaccgacuacaaaauuuaccucuacacacugaacgacaacgcgcguaguagcccggucgugaucgaugccagcaccgccauugacgcccccucuaaucuccgguuuuuggccacuacaccgaacucucuacuugucuccuggcagccgccgcgcgcgcgaauaacagguuauaucauaaaguaugagaaacccggaucccccccacgagagguugugccaagaccuagacccgguguaacugaagcaacuaucacaggacuugaaccggggacugaauacaccaucuauguuauugcucucaagaauaaccagaaaucagagccgcugaucggacgcaagaagacugaugaacugccacagcucgucacgcugccccauccuaauuuacauggacccgagauucuagacgugccuuccacugugcaaaagacgccauucguaacgcacccaggcuacgacaccggcaacggaauucaacugccugguacgucagggcagcaaccaagugucgggcagcaaaugaucuuugaagagcacggcuucagaaggacaacuccuccaaccaccgccacaccuauucgucauagaccuagaccuuauccuccuaacgucggcgaggaaauucagaucggucacaucccaagagaagacguggacuaucaucuguauccgcacggcccaggacucaaccccaacgcaucuaccggccaagaagcucucagccagacgacuauuucaugggcuccuuuccaggauacgucugaguacaucauuagcugucaccccguuggaacagacgaagaaccucuccaguuucgagugccuggcacaaguacuucggccacccugacagggcugacaagaggagcgaccuacaacguuaucguggaagcucucaaggaucagcagaggcauaaggucagagaagaaguggugacuguugggaacagugugaacgaaggccugaaccagccuacagaugacagcuguuuugaccccuauacggucucccauuaugcgguuggagaugagugggagagaaugucugagagcggguucaagcuccucugucagugccuuggauucggauccggccauuuuaggugugauaguucuagauggugucaugauaacggagugaacuauaagauuggagaaaagugggaucggcagggagagaaugggcaaaugauguccuguacuugcuuagggaacgggaaaggcgaauucaaaugugacccucacgaagcaacauguuaugaugauggaaagaccuaccacgugggcgaacaauggcagaaggaguaucucggugccaucugcucuugcacuugcuuuggaggacaaagaggguggagaugcgacaauugcaggagacccggcggagaacccagccccgaagggacuacuggucagaguuauaaucaguacagucagcgcuaccaccagaggacaaacacuaacguaaacugcccuauagaauguuucaugccccuggacguacaagccgaccgcgaagacagucgcgaguag

SEQ ID NO: 265675 - protein, 284 aa, Artificial Sequence
  derived and/or modified sequence
MIMNKMKNFKRRFSLSVPRTETIEESLAEFTEQFNQLHNRRNENLQLGPLGRDPPQECSTFSPTDSGEEPGQLSPGVQFQRRQNQRRFSMEVRASGALPRQVAGCTHKGVHRRAAALQPDFDVSKRLSLPMDIRLPQEFLQKLQMESPDLPKPLSRMSRRASLSDIGFGKLETYVKLDKLGEGTYATVFKGRSKLTENLVALKEIRLEHEEGAPCTAIREVSLLKNLKHANIVTLHDLIHTDRSLTLVFEYLDSDLKQYLDHCGNLMSMHNVKIFMFQLLRGLA

SEQ ID NO: 265676 - protein, 504 aa, Artificial Sequence
  derived and/or modified sequence
MIMNKMKNFKRRFSLSVPRTETIEESLAEFTEQFNQLHNRRNENLQLGPLGRDPPQECSTFSPTDSGEEPGQLSPGVQFQRRQNQRRFSMEVRASGALPRQVAGCTHKGVHRRAAALQPDFDVSKRLSLPMDIRLPQEFLQKLQMESPDLPKPLSRMSRRASLSDIGFGKLETYVKLDKLGEGTYATVFKGRSKLTENLVALKEIRLEHEEGAPCTAIREVSLLKNLKHANIVTLHDLIHTDRSLTLVFEYLDSDLKQYLDHCGNLMSMHNVKIFMFQLLRGLAYCHHRKILHRDLKPQNLLINERGELKLADFGLARAKSVPTKTYSNEVVTLWYRPPDVLLGSTEYSTPIDMWGVGCIHYEMATGRPLFPGSTVKEELHLIFRLLGTPTEETWPGVTAFSEFRTYSFPCYLPQPLINHAPRLDTDGIHLLSSLLLYESKSRMSAEAALSHSYFRSLGERVHQLEDTASIFSLKEIQLQKDPGYRGLAFQQPGRGKNRRQSIF

SEQ ID NO: 265677 - DNA, 855 bp, Artificial Sequence
  derived and/or modified sequence
atgatcatgaacaagatgaagaacttcaagagaagattcagcctgagcgtgcccagaaccgagaccatcgaggagagcctggccgagttcaccgagcagttcaaccagctgcacaacagaagaaacgagaacctgcagctgggccccctgggcagagaccccccccaggagtgcagcaccttcagccccaccgacagcggcgaggagcccggccagctgagccccggcgtgcagttccagagaagacagaaccagagaagattcagcatggaggtgagagccagcggcgccctgcccagacaggtggccggctgcacccacaagggcgtgcacagaagagccgccgccctgcagcccgacttcgacgtgagcaagagactgagcctgcccatggacatcagactgccccaggagttcctgcagaagctgcagatggagagccccgacctgcccaagcccctgagcagaatgagcagaagagccagcctgagcgacatcggcttcggcaagctggagacctacgtgaagctggacaagctgggcgagggcacctacgccaccgtgttcaagggcagaagcaagctgaccgagaacctggtggccctgaaggagatcagactggagcacgaggagggcgccccctgcaccgccatcagagaggtgagcctgctgaagaacctgaagcacgccaacatcgtgaccctgcacgacctgatccacaccgacagaagcctgaccctggtgttcgagtacctggacagcgacctgaagcagtacctggaccactgcggcaacctgatgagcatgcacaacgtgaagatcttcatgttccagctgctgagaggcctggcctag

SEQ ID NO: 265678 - DNA, 1515 bp, Artificial Sequence
  derived and/or modified sequence
atgatcatgaacaagatgaagaacttcaagagaagattcagcctgagcgtgcccagaaccgagaccatcgaggagagcctggccgagttcaccgagcagttcaaccagctgcacaacagaagaaacgagaacctgcagctgggccccctgggcagagaccccccccaggagtgcagcaccttcagccccaccgacagcggcgaggagcccggccagctgagccccggcgtgcagttccagagaagacagaaccagagaagattcagcatggaggtgagagccagcggcgccctgcccagacaggtggccggctgcacccacaagggcgtgcacagaagagccgccgccctgcagcccgacttcgacgtgagcaagagactgagcctgcccatggacatcagactgccccaggagttcctgcagaagctgcagatggagagccccgacctgcccaagcccctgagcagaatgagcagaagagccagcctgagcgacatcggcttcggcaagctggagacctacgtgaagctggacaagctgggcgagggcacctacgccaccgtgttcaagggcagaagcaagctgaccgagaacctggtggccctgaaggagatcagactggagcacgaggagggcgccccctgcaccgccatcagagaggtgagcctgctgaagaacctgaagcacgccaacatcgtgaccctgcacgacctgatccacaccgacagaagcctgaccctggtgttcgagtacctggacagcgacctgaagcagtacctggaccactgcggcaacctgatgagcatgcacaacgtgaagatcttcatgttccagctgctgagaggcctggcctactgccaccacagaaagatcctgcacagagacctgaagccccagaacctgctgatcaacgagagaggcgagctgaagctggccgacttcggcctggccagagccaagagcgtgcccaccaagacctacagcaacgaggtggtgaccctgtggtacagaccccccgacgtgctgctgggcagcaccgagtacagcacccccatcgacatgtggggcgtgggctgcatccactacgagatggccaccggcagacccctgttccccggcagcaccgtgaaggaggagctgcacctgatcttcagactgctgggcacccccaccgaggagacctggcccggcgtgaccgccttcagcgagttcagaacctacagcttcccctgctacctgccccagcccctgatcaaccacgcccccagactggacaccgacggcatccacctgctgagcagcctgctgctgtacgagagcaagagcagaatgagcgccgaggccgccctgagccacagctacttcagaagcctgggcgagagagtgcaccagctggaggacaccgccagcatcttcagcctgaaggagatccagctgcagaaggaccccggctacagaggcctggccttccagcagcccggcagaggcaagaacagaagacagagcatcttctag

SEQ ID NO: 265679 - DNA, 949 bp, Artificial Sequence
  derived and/or modified sequence
tcccgcgggcggtgcgcctgggaggaagggggaggtcggaggagcgggcaccgcggcgccgggtataaggagcaaaggacccggctgcccagtccctcatgatcatgaacaagatgaagaactttaagcgccgtttctccctgtcagtgccccgcactgagaccattgaagaatccttggctgaattcacggagcaattcaaccagctccacaaccggcggaatgagaacttgcagctcggtcctcttggcagagaccccccgcaggagtgcagcaccttctccccaacagacagcggggaggagccggggcagctctcccctggcgtgcagttccagcggcggcagaaccagcgccgcttctccatggaggtaagggcctctggagctctgccccggcaggtggcaggatgcacgcacaagggtgtgcacaggagggcagctgccttacagccagactttgacgtcagcaagaggctctctctgcccatggatatccgcctgccccaggaattcctacagaagctacagatggagagcccagatctgcccaagccgctcagccgcatgtcccgccgggcctccctgtcagacattggctttgggaaactggaaacatacgtgaaactggacaaactgggagagggcacctatgccacagtcttcaaagggcgcagcaaactgacggagaaccttgtggccctgaaagagatccggctggagcacgaggagggagcgccctgcactgccatccgagaggtgtctctgctgaagaacctgaagcacgccaatattgtgaccctgcatgacctcatccacacagatcggtccctcaccctggtgtttgagtacctggacagtgacctgaagcagtatctggaccactgtgggaacctcatgagcatgcacaacgtcaagattttcatgttccagctgctccggggcctcgc

SEQ ID NO: 265680 - DNA, 2143 bp, Artificial Sequence
  derived and/or modified sequence
ccttcctcctcctcctcctcctcctcctccctcctcttccccaccttcctccactccctcccttcccctccccttctacctcctcctcggccagctcaggttgcagcttctctggggaactgctcacctttccggagcaggggaagctgccccgtgcccgggagggagcgggcgcaccgcggcccccaggacacgcgctgacccggctgcccagtccctcatgatcatgaacaagatgaagaactttaagcgccgtttctccctgtcagtgccccgcactgagaccattgaagaatccttggctgaattcacggagcaattcaaccagctccacaaccggcggaatgagaacttgcagctcggtcctcttggcagagaccccccgcaggagtgcagcaccttctccccaacagacagcggggaggagccggggcagctctcccctggcgtgcagttccagcggcggcagaaccagcgccgcttctccatggaggtaagggcctctggagctctgccccggcaggtggcaggatgcacgcacaagggtgtgcacaggagggcagctgccttacagccagactttgacgtcagcaagaggctctctctgcccatggatatccgcctgccccaggaattcctacagaagctacagatggagagcccagatctgcccaagccgctcagccgcatgtcccgccgggcctccctgtcagacattggctttgggaaactggaaacatacgtgaaactggacaaactgggagagggcacctatgccacagtcttcaaagggcgcagcaaactgacggagaaccttgtggccctgaaagagatccggctggagcacgaggagggagcgccctgcactgccatccgagaggtgtctctgctgaagaacctgaagcacgccaatattgtgaccctgcatgacctcatccacacagatcggtccctcaccctggtgtttgagtacctggacagtgacctgaagcagtatctggaccactgtgggaacctcatgagcatgcacaacgtcaagattttcatgttccagctgctccggggcctcgcctactgtcaccaccgcaagatcctgcaccgggacctgaagccccagaacctgctcatcaacgagaggggggagctgaagctggccgactttggactggccagggccaagtcagtgcccacaaagacttactccaatgaggtggtgaccctgtggtacaggccccccgatgtgctgctgggatccacagagtactccacccccattgatatgtggggcgtgggctgcatccactacgagatggccacagggaggcccctcttcccgggctccacagtcaaggaggagctgcacctcatctttcgcctcctcgggacccccacagaagagacgtggcccggcgtgaccgccttctctgagttccgcacctacagcttcccctgctacctcccgcagccgctcatcaaccacgcgcccaggttggatacggatggcatccacctcctgagcagcctgctcctgtatgaatccaagagtcgcatgtcagcagaggctgccctgagtcactcctacttccggtctctgggagagcgtgtgcaccagcttgaagacactgcctccatcttctccctgaaggagatccagctccagaaggacccaggctaccgaggcttggccttccagcagccaggacgagggaagaacaggcggcagagcatcttctgagccacgcccaccttgctgtggccaagggacaagagatcacatggagcacaaattcgggtaggatggagcctgtgtggccctcggaggactgaagaacgagggctgacagccagcctggaagaccgcttggcagcccttctggccacggctgtttcttctttgtgcttcccgtgtgcctccccagtagccctcacctgcataccaacccctcctttacccacgttggggctggcataagctgcttccctgagaggacatgaggggggggcggtcctcgtaccctctcccaccctggtgtttgggcacctgcgtgggatgcacacggatgacagaatcaaggcgccaggatgggcactctgccctggatacaggctctaccctcctcccccaggacctgcctagtgccag

SEQ ID NO: 265681 - DNA, 855 bp, Artificial Sequence
  derived and/or modified sequence
atgatcatgaataagatgaaaaactttaagcgcagatttagcctcagtgtcccgaggaccgagacaatcgaggagagcttggccgagttcacagagcagtttaatcaactccataatcgccgcaacgagaacctccaacttgggccacttgggagagatcccccgcaagaatgttctactttcagcccaacagattccggcgaggaacccggccagttgtcacccggcgtacaatttcagcgccgccagaaccaacgtcggttttcaatggaagttcgcgcctccggcgctctgccccgccaggtcgccggctgcacccataaaggagttcaccgccgtgccgccgctctgcagcccgactttgacgtgtccaaaagactgtcattgccaatggatatccggctgccccaagagtttctgcaaaaactgcaaatggaaagccccgacctccctaaaccattaagccggatgagccgccgcgcatccctgtctgacatcgggtttgggaaattggaaacatacgtgaagctcgataagttaggcgagggtacctatgccaccgtgttcaagggccgcagcaaactcaccgaaaatctggtggccctaaaggagattaggttggagcatgaggagggagccccatgcacagccattagagaagtgtcgcttctcaagaatctgaaacatgccaacatcgtaaccctgcatgatctaatacatacagaccggtccctcacactggtttttgagtatcttgacagcgacctgaaacagtacttagatcattgtgggaatctaatgtcaatgcataatgtcaagatctttatgttccagctgctgagaggcctggcctag

SEQ ID NO: 265682 - DNA, 1515 bp, Artificial Sequence
  derived and/or modified sequence
atgattatgaacaaaatgaaaaatttcaaaaggaggttctccctctctgtgcccagaaccgagactattgaggagtcacttgctgagttcacagaacaatttaaccaactgcacaataggcgtaacgagaacctgcaactggggcctttggggagggacccaccccaggagtgcagtacattcagccccaccgatagcggtgaagagcccggtcagctgtcaccaggggttcagttccagcgacgccaaaatcagcgccggttttccatggaggtgagggcgagcggcgcactgcctcgacaagtcgcagggtgtacacataagggagtgcatagaagagccgccgccttacaacctgacttcgatgtgtccaaacggctctccttacccatggacatacgcctgccacaggagtttctgcaaaagctccagatggaaagcccggacctgcctaagccgttgtctaggatgtcgaggcgcgcttccctgtcagacattggattcgggaaattggagacctacgttaaactggataaacttggtgaaggaacttacgctaccgtgtttaaaggacggagcaaattgacagaaaatctggttgctctaaaagagatccgtctggaacacgaagagggggcgccctgtaccgctattcgggaggtctcgctgcttaagaatctgaagcatgccaacattgtaaccctacatgatctgatccacactgaccgctctctgaccctggttttcgaatacttggatagtgatttgaaacaatacctcgaccattgtggtaacttgatgtctatgcacaacgtaaagatcttcatgtttcagctattgagggggctcgcctattgccaccatcggaaaattttgcaccgagacctgaaaccccagaatctattaatcaatgaaaggggcgagttaaagctcgccgacttcgggctagcgcgggccaaatcagtacccacgaaaacctatagcaacgaagtggtgacactgtggtaccgtccccctgacgtcctgctggggagcacagaatacagcacccccatcgatatgtggggggtgggctgcattcactacgagatggccaccggccgcccactgttccctggaagcactgtcaaggaggagttacatctcatcttccggttgcttggtacaccaacagaggagacctggccaggggtgacagccttctccgagttccggacttattctttcccatgctacctgccccagccactgatcaaccacgccccaagactggacacggacggtatacatcttctgagctccttgctgctgtatgagtccaagagcaggatgtctgccgaggccgcgctgtcccattcttattttaggagccttggggaacgtgtgcaccaattggaagatacagcaagcattttttcactgaaagaaatccaactgcagaaggatcctggataccgtggactagctttccagcaaccaggacgagggaagaaccggaggcaatccatcttctag

SEQ ID NO: 265683 - DNA, 855 bp, Artificial Sequence
  derived and/or modified sequence
atgatcatgaacaagatgaagaacttcaagaggcgcttcagcctgtctgtgcccaggacagagaccatcgaggagagcctggccgagttcacagagcagttcaaccagctgcacaacagaagaaatgaaaacctgcagctgggccccctgggccgggaccccccccaggagtgcagcaccttcagccccacagacagcggggaggagcccggccagctgagccctggggtgcagttccagaggcggcagaaccagaggcgcttctccatggaggtgcgggccagcggggccctgccccggcaggtggccggctgcacccacaagggcgtgcaccggcgggctgctgccctgcagcctgactttgatgtgtccaagaggctgagcctgcccatggacatccggctgccccaggagttcctgcagaagctgcagatggagagcccagacctgcccaagcccctgagcaggatgagcagaagagccagcctgagtgacatcggctttgggaagctggagacctacgtgaagctggacaagctgggggagggcacctacgccaccgtcttcaagggccgcagcaagctgacagagaacctggtggccctgaaggagatccggctggagcacgaggagggcgccccctgcacagccatccgggaggtgtccctgctgaagaacctgaagcacgccaacatcgtgaccctgcatgacctgatccacacagacaggagcctgaccctggtgtttgagtacctggacagcgacctgaagcagtacctggaccactgcggcaacctgatgtccatgcacaacgtgaagatcttcatgttccagctgctgcggggcctggcctag

SEQ ID NO: 265684 - DNA, 1515 bp, Artificial Sequence
  derived and/or modified sequence
atgatcatgaacaagatgaagaacttcaagaggcgcttcagcctgtctgtgcccaggacagagaccatcgaggagagcctggccgagttcacagagcagttcaaccagctgcacaacagaagaaatgaaaacctgcagctgggccccctgggccgggaccccccccaggagtgcagcaccttcagccccacagacagcggggaggagcccggccagctgagccctggggtgcagttccagaggcggcagaaccagaggcgcttctccatggaggtgcgggccagcggggccctgccccggcaggtggccggctgcacccacaagggcgtgcaccggcgggctgctgccctgcagcctgactttgatgtgtccaagaggctgagcctgcccatggacatccggctgccccaggagttcctgcagaagctgcagatggagagcccagacctgcccaagcccctgagcaggatgagcagaagagccagcctgagtgacatcggctttgggaagctggagacctacgtgaagctggacaagctgggggagggcacctacgccaccgtcttcaagggccgcagcaagctgacagagaacctggtggccctgaaggagatccggctggagcacgaggagggcgccccctgcacagccatccgggaggtgtccctgctgaagaacctgaagcacgccaacatcgtgaccctgcatgacctgatccacacagacaggagcctgaccctggtgtttgagtacctggacagcgacctgaagcagtacctggaccactgcggcaacctgatgtccatgcacaacgtgaagatcttcatgttccagctgctgcggggcctggcctactgccaccacaggaagatcctgcaccgggacctgaagccccagaacctgctgatcaatgaaagaggagagctgaagctggccgactttggcctggcccgggccaagtctgtgcccaccaagacctacagcaatgaggtggtgaccctgtggtaccggcccccagatgtgctgctgggcagcacagagtacagcacccccatcgacatgtggggcgtgggctgcatccactatgagatggccaccggccggcccctcttccctggcagcacagtgaaggaggagctgcacctgatcttccggctgctgggcacccccacagaggagacctggccaggagtgacagccttcagcgagttccgcacctacagcttcccctgctacctgccccagcccctcatcaaccacgccccccggctggacacagatggcatccacctgctgagcagcctgctgctgtatgagagcaagagcaggatgtctgctgaggccgccctgagccacagctacttccgcagcctgggggagcgggtgcaccagctggaggacacagccagcatcttcagcctgaaggagatccagctgcagaaggaccccggctaccggggcctggccttccagcagcccggccggggcaagaacagacggcagagcatcttctag

SEQ ID NO: 265685 - DNA, 855 bp, Artificial Sequence
  derived and/or modified sequence
atgatcatgaacaagatgaagaacttcaagcggcggttcagcctgtcagtcccccgtaccgagaccatagaggaatctctcgccgaattcacagaacaatttaatcagctacataatcgacgtaacgagaacctgcagttaggccctctcggccgcgacccacctcaggagtgctctactttctctcccaccgattcaggtgaggagcccgggcagctgagccccggcgtacagttccagcgaaggcagaatcagcgcaggttctctatggaggttcgagccagtggagccctccctcggcaggttgctggctgtacccacaagggtgtgcacagacgggccgccgctctccagccagacttcgacgtgtcgaagcgactttcactaccaatggatatcagattgccacaggagttcctgcagaaactgcagatggagtctccagacctgccaaaaccgttatcaaggatgtccagaagggcaagcctgtccgacattggctttgggaaactagagacctacgttaaactggacaaactcggagagggcacatatgccaccgtattcaagggaagatccaagctgacagagaacctggtcgcactcaaagaaataaggctcgaacatgaagagggggcaccatgcacagcaatccgagaggtgtccctcttgaaaaatctcaagcatgctaatattgtaaccctacacgatcttattcatacagatcggtcccttacacttgtgttcgagtacctggattctgatctcaagcaataccttgaccattgcggcaatctgatgagtatgcataacgtgaagatctttatgttccagcttctacgaggcctcgcttag

SEQ ID NO: 265686 - DNA, 1515 bp, Artificial Sequence
  derived and/or modified sequence
atgatcatgaacaagatgaagaacttcaagcggcggttcagcctgagcgtcccacgaacagaaactattgaagaaagcctggccgagtttaccgaacagtttaatcagttacataaccgacgaaatgaaaatcttcagctgggtccactgggtagagaccctccccaggagtgttcaacgttcagcccgacagatagcggtgaagagcctgggcagctgtcacccggcgtgcagtttcagagacgccaaaaccagagaagattctcaatggaggtgagggcaagtggtgccctacctcgccaagtagccggatgtactcacaagggggtgcaccggagggccgcagcactgcagcctgacttcgatgtatccaagcgtctgtcacttccgatggacatccgcctaccacaggaatttttgcagaagcttcagatggaatctcctgacctgccaaagccactgtccaggatgagccggagggcgagcttgtctgacatcggtttcggcaaactggaaacatacgtgaaactagataagctgggagagggcacctacgccacagtcttcaagggaaggtctaagctcactgaaaacttggtggccctgaaggaaatccgtctagagcacgaggagggtgcgccatgcacggctataagagaggtgtcattgttgaaaaacctcaagcatgccaacattgttaccttacacgaccttatccacaccgatcggtctcttacgctagtctttgaatacctagattcagacctaaaacagtacctcgatcactgtggtaatctcatgtccatgcataatgtgaagatcttcatgtttcagctgctgaggggactggcgtactgccatcaccgtaagattcttcacagagatctgaagccacagaatctgctcatcaacgagcgaggggagctaaaattggcagattttgggcttgccagagccaaatccgtgcccacaaagacatactctaatgaggtggtgaccctctggtatcgccctccagatgtcctcctggggtctactgaatacagtaccccgatcgacatgtggggggtcgggtgtatccattacgaaatggccaccggaaggccgctcttccccggtagtaccgtgaaggaggagctccacttaatttttcgtctgctgggcacaccaactgaagaaacatggcccggggtgacagcgttttcagaatttagaacctattccttcccctgctacctgccacaacctctcatcaatcatgctccacggctcgacaccgacggcattcatcttttgtcatcactgctgttgtatgaaagcaaatccagaatgtcagctgaggctgctctctcacattcatatttccggtcgctgggcgagagggtgcatcaactggaggatacagctagcattttttccttgaaggagatccagttgcagaaagaccccgggtatcgaggtctggcattccaacagcctggccggggaaagaaccgtcgacagtccatcttctag

SEQ ID NO: 265687 - DNA, 855 bp, Artificial Sequence
  derived and/or modified sequence
atgatcatgaacaaaatgaaaaattttaaaagacggtttagcttaagcgtgccgcgaacagagaccatcgaggagtccttggctgagttcacggaacagtttaaccagctgcacaatcggaggaatgaaaacctccagttggggccacttggcagggaccctccccaagaatgcagtactttctctccgaccgattcgggagaagaaccgggacagttgtcacccggtgttcagtttcaaaggcgacagaatcaaagaagattttctatggaagttcgcgctagcggagcgctcccccgtcaggttgccggatgcacccacaagggggtccatcgccgtgccgcagcactccagccagatttcgatgtttctaaacggctctcactgccgatggacatccgacttcctcaggagttcttgcagaagctacagatggagtcgcctgatctgcctaagcccctgagtaggatgtccaggcgcgctagcctgtctgatatcgggttcggaaagctcgaaacctatgtcaagctcgacaagctgggagagggcacttatgcgaccgtcttcaaaggcaggtctaaactcactgaaaatttggtggcactgaaggagatacgattagagcatgaggaaggcgctccttgcaccgccatacgggaagtgtcactgcttaaaaacttaaagcacgccaatattgtgacattgcacgatctgatccacaccgataggagcttgacactggttttcgaatatctggatagtgacctcaaacagtacctggatcattgtgggaaccttatgtctatgcacaatgtaaagatcttcatgtttcagctgctcagaggactggcatag

SEQ ID NO: 265688 - DNA, 1515 bp, Artificial Sequence
  derived and/or modified sequence
atgatcatgaataaaatgaagaacttcaaaaggagatttagtttatcagttcctcgcaccgaaacaatcgaggaaagcctggcggaattcacagaacagtttaaccagctacacaatcgtcgaaacgaaaacctgcagctaggtcctctcggcagagacccgccacaggagtgctcaactttttcgcctaccgatagcggagaggaacccggtcaattatctcccggagttcagtttcagagaagacagaatcagagacggtttagcatggaggtgcgtgccagtggcgctctgccacgccaggtcgccggatgtacgcacaagggagtccatcgacgggcagctgctctgcaaccagattttgatgtcagcaagcgcctgagtttaccgatggatatacggctacctcaagagttccttcaaaagctgcagatggagagccccgatctacccaaacctctgtctcgcatgtcccgtagggcatccctttcagatattggttttggcaagctggagacgtacgtcaaactcgacaaactcggagaaggaacttacgctacagtcttcaaaggacgctctaagttaacggagaatctagtagccctcaaagagatccggttggagcacgaggagggtgcaccatgcactgctattcgtgaagtgtctcttttgaagaacttgaagcatgcaaatattgtcaccttgcatgatttaatccatacagatcggtcgttgaccctggttttcgaatatcttgacagcgatttaaagcagtatctagatcattgcggtaacttaatgagcatgcataatgtcaaaattttcatgtttcaactgcttcgaggtctcgcctattgccaccaccggaagatcctgcacagagatctgaaaccacagaacttgctaattaacgagagaggagagttgaagctagccgacttcggcctggcgagggccaaatcggtgccaaccaagacatactcgaatgaagtggtgaccttgtggtatcgaccaccagacgtgctcctgggctctaccgagtacagtactcccatagatatgtggggtgtaggatgtatacactatgagatggcaacaggtagacccctcttccccggatccaccgttaaagaagaacttcatctgatctttcgactccttggcacccctaccgaggagacctggcccggagtgacggccttcagcgaattccggacctacagttttccgtgctacctgcctcaacccctaatcaatcacgcacccaggctggatacagatgggatccatttgctcagctcactcctgctgtacgaaagtaaatcacgtatgagcgccgaggcggctctgtcccatagttactttaggtccttaggcgaaagagtgcaccagctcgaggacacagcatccattttttccctgaaagagatccagctgcagaaggacccgggttatagggggcttgcttttcagcagcccggaagaggcaagaatcgcagacagagcattttctag

SEQ ID NO: 265689 - protein, 2466 aa, Artificial Sequence
  derived and/or modified sequence
MGRKTSRVQQGPPRSPACSAHGERSWGLEFPPFRWLLGIAGRTHLAALPPFQWVLAFEIFIPLVLFFILLGLRQKKPTISVKEVAFYTAAPLTSAGILPVMQSLCPDGQRDEFGFLQYANSTVTQLLERLDRVVEEGNLFDPARPSLGSELEALRQHLEALSAGPGTSGSHLDRSTVSSFSLDSVARNPQELWRFLTQNLSLPNSTAQALLAARVDPPEVYHLLFGPSSALDSQSGLHKGQEPWSRLGGNPLFRMEELLLAPALLEQLTCTPGSGELGRILTVPESQKGALQGYRDAVCSGQAAARARRFSGLSAELRNQLDVAKVSQQLGLDAPNGSDSSPQAPPPRRLQALLGDLLDAQKVLQDVDVLSALALLLPQGACTGRTPGPPASGAGGAANGTGAGAVMGPNATAEEGAPSAAALATPDTLQGQCSAFVQLWAGLQPILCGNNRTIEPEALRRGNMSSLGFTSKEQRNLGLLVHLMTSNPKILYAPAGSEVDRVILKANETFAFVGNVTHYAQVWLNISAEIRSFLEQGRLQQHLRWLQQYVAELRLHPEALNLSLDELPPALRQDNFSLPSGMALLQQLDTIDNAACGWIQFMSKVSVDIFKGFHDEESIVNYTLNQAYQDNVTVFASVIFQTRKDGSLPPHVHYKIRQNSSFTEKTNEIRRAYWRPGPNTGGRFYFLYGFVWIQDMMERAIIDTFVGHDVVEPGSYVQMFPYPCYTRDDFLFVIEHMMPLCMVISWVYSVAMTIQHIVAEKEHRLKEVMKTMGLNNAVHWVAWFITGFVQLSISVTALTAILKYGQVLMHSHVVIIWLFLAVYAVATIMFCFLVSVLYSKAKLASACGGIIYFLSYVPYMYVAIREEVAHDKITAFEKCIASLMSTTAFGLGSKYFALYEVAGVGIQWHTFSQSPVEGDDFNLLLAVTMLMVDAVVYGILTWYIEAVHPGMYGLPRPWYFPLQKSYWLGSGRTEAWEWSWPWARTPRLSVMEEDQACAMESRRFEETRGMEEEPTHLPLVVCVDKLTKVYKDDKKLALNKLSLNLYENQVVSFLGHNGAGKTTTMSILTGLFPPTSGSATIYGHDIRTEMDEIRKNLGMCPQHNVLFDRLTVEEHLWFYSRLKSMAQEEIRREMDKMIEDLELSNKRHSLVQTLSGGMKRKLSVAIAFVGGSRAIILDEPTAGVDPYARRAIWDLILKYKPGRTILLSTHHMDEADLLGDRIAIISHGKLKCCGSPLFLKGTYGDGYRLTLVKRPAEPGGPQEPGLASSPPGRAPLSSCSELQVSQFIRKHVASCLLVSDTSTELSYILPSEAAKKGAFERLFQHLERSLDALHLSSFGLMDTTLEEVFLKVSEEDQSLENSEADVKESRKDVLPGAEGPASGEGHAGNLARCSELTQSQASLQSASSVGSARGDEGAGYTDVYGDYRPLFDNPQDPDNVSLQEVEAEALSRVGQGSRKLDGGWLKVRQFHGLLVKRFHCARRNSKALFSQILLPAFFVCVAMTVALSVPEIGDLPPLVLSPSQYHNYTQPRGNFIPYANEERREYRLRLSPDASPQQLVSTFRLPSGVGATCVLKSPANGSLGPTLNLSSGESRLLAARFFDSMCLESFTQGLPLSNFVPPPPSPAPSDSPASPDEDLQAWNVSLPPTAGPEMWTSAPSLPRLVREPVRCTCSAQGTGFSCPSSVGGHPPQMRVVTGDILTDITGHNVSEYLLFTSDRFRLHRYGAITFGNVLKSIPASFGTRAPPMVRKIAVRRAAQVFYNNKGYHSMPTYLNSLNNAILRANLPKSKGNPAAYGITVTNHPMNKTSASLSLDYLLQGTDVVIAIFIIVAMSFVPASFVVFLVAEKSTKAKHLQFVSGCNPIIYWLANYVWDMLNYLVPATCCVIILFVFDLPAYTSPTNFPAVLSLFLLYGWSITPIMYPASFWFEVPSSAYVFLIVINLFIGITATVATFLLQLFEHDKDLKVVNSYLKSCFLIFPNYNLGHGLMEMAYNEYINEYYAKIGQFDKMKSPFEWDIVTRGLVAMAVEGVVGFLLTIMCQYNFLRRPQRMPVSTKPVEDDVDVASERQRVLRGDADNDMVKIENLTKVYKSRKIGRILAVDRLCLGVRPGECFGLLGVNGAGKTSTFKMLTGDESTTGGEAFVNGHSVLKELLQVQQSLGYCPQCDALFDELTAREHLQLYTRLRGISWKDEARVVKWALEKLELTKYADKPAGTYSGGNKRKLSTAIALIGYPAFIFLDEPTTGMDPKARRFLWNLILDLIKTGRSVVLTSHSMEECEALCTRLAIMVNGRLRCLGSIQHLKNRFGDGYMITVRTKSSQSVKDVVRFFNRNFPEAMLKERHHTKVQYQLKSEHISLAQVFSKMEQVSGVLGIEDYSVSQTTLDNVFVNFAKKQSDNLEQQETEPPSALQSPLGCLLSLLRPRSAPTELRALVADEPEDLDTEDEGLISFEEERAQLSFNTDTLC

SEQ ID NO: 265690 - DNA, 7401 bp, Artificial Sequence
  derived and/or modified sequence
atggggcggaaaacgtccagagtgcagcagggtccgcccaggtctcctgcatgttccgcccacggtgaacgttcctggggcctggagttccccccctttcggtggttgctgggtatagcgggccgcacacacctggcggccctgccacccttccagtgggtactggctttcgagatctttatccctcttgtcctgttcttcatcctcctcggtcttaggcagaaaaagccaaccatcagcgtgaaggaggtggccttttacacagctgcacctttgacgtcggctggcatcttgccagtaatgcagagcttgtgtcccgatggtcagagggacgaattcggattccttcagtatgcaaattcgacagtcacacaactgttggagcgcctggacagagtggtggaagagggtaacctgtttgatccggcaagacctagtctgggcagcgaacttgaggctttgcggcagcacctggaggctctgtctgccggacccgggaccagcggaagtcacctggaccgctcaacggtgtccagcttcagtctggactctgtagccagaaacccccaggagctctggaggtttcttacacagaatctgagcctgcccaacagcacagcgcaggcactgctcgccgccagggtcgatcccccagaggtgtaccacctgctgttcggcccaagttcggccctggactcgcagagtggccttcataaggggcaggagccctggtctcgcctgggcggcaatccattgttccggatggaagagctcctactggctccggctctgctggagcaactgacctgtacaccgggttctggagagttgggaaggatcctcaccgtcccggaatctcagaaaggcgcgctgcaggggtatagagacgccgtgtgtagcggacaggccgctgctcgcgccagacggttctccggactctcggcggaactccggaatcagcttgatgtcgctaaggtgtctcagcaactgggccttgatgctccaaacgggagcgactcatctccacaagccccccctcccaggagacttcaggccctcttaggagacctgctggacgcccagaaagtgctgcaggacgtggatgtcttaagcgcactcgccctgctgctgccacagggcgcctgcacagggaggaccccaggcccccccgcaagtggcgccggaggggccgccaatggtaccggcgcaggagctgtcatggggcccaacgcaactgctgaagagggtgctccctccgcggccgcactggcaacacccgacacactgcagggtcagtgttctgctttcgtgcagctgtgggcaggcctccagccaattctgtgcggaaataaccggacaatagaacctgaagctttgagaagagggaatatgagttctctgggctttacatctaaggaacagcgcaatctggggctgttggtccacctgatgacctcgaatcccaagattctttacgcccctgcgggatccgaagttgacagggtgatcctgaaagcgaacgaaactttcgcctttgtggggaatgtgacgcactatgcccaggtctggctgaacatttcagctgagattcgcagttttttggagcagggcagactccaacaacacctgaggtggttgcaacagtacgttgctgaactccgactgcacccggaggccctaaatctgagcctggacgaactgccccctgcgctccgacaggataactttagtttgccatcgggcatggctcttctgcagcagctcgacactatcgacaatgccgcctgcgggtggatccagtttatgtctaaggtatctgttgatatttttaaggggttccacgacgaggagtcaatagtaaactacaccctgaatcaagcctaccaggacaatgtgacagtgttcgccagcgtgatcttccagacacggaaggacggctctctccccccccacgtgcactacaagatccgccagaactcctcttttacagagaagacaaatgagattcggcgagcctactggagacccggtcccaatacagggggcagattttatttcctatacggctttgtgtggatacaggatatgatggaacgtgcaatcatcgacacattcgttggccacgatgtggtcgaacccggatcttatgttcagatgttcccatacccttgctacaccagggatgacttcctgtttgtaattgagcatatgatgccactctgtatggtaatttcttgggtgtacagcgtagctatgacaattcagcatattgtggcggaaaaggagcatagactcaaggaagtgatgaaaaccatgggactgaacaacgccgtgcattgggtcgcttggtttatcaccgggttcgtgcagctcagcatttcagttactgctctcactgccattctcaaatacggacaggtgttgatgcacagccatgtcgtgataatctggctgtttctcgcagtctacgcagtggctaccattatgttctgctttctggtatcggtgctgtattctaaggccaaactagccagcgcatgtggcggcataatatatttccttagttatgttccctatatgtacgtggccatcagggaggaggtggcccacgataaaataaccgcttttgaaaaatgcatcgcttcactgatgagcactactgcctttggtctcggaagcaagtacttcgctctttacgaagttgcaggggtcggaatacagtggcatacattcagtcagagcccagtcgaaggcgacgatttcaatcttctccttgcggtcaccatgcttatggtggacgctgtagtgtacggcattctcacctggtatatcgaggccgtccacccaggcatgtatggactgccccgaccctggtattttcccctccagaagtcctactggttaggatctggccgcaccgaggcgtgggagtggagctggccgtgggctaggacacctcgactcagtgtaatggaggaggatcaagcctgtgccatggagagccgacgctttgaagaaacacgcggcatggaggaggaaccaacccacctgcccctggtggtatgcgtggataagctgacaaaggtgtacaaggatgataaaaaactggcactcaacaagctgtccttaaatctttatgagaatcaggtggtgtcgttccttggtcataatggcgccggaaaaacaacaacgatgagcatactcacgggactgtttccacctactagcggatcagcaactatctatggacacgatatacgcaccgagatggatgaaatccggaaaaatctggggatgtgtcctcaacataatgtgctctttgacagattgactgtcgaagagcacttgtggttctatagcaggctgaagtccatggcacaggaagaaattcggcgagagatggacaaaatgattgaagacttggagctctccaataagagacattccttggtgcagaccctttcgggggggatgaaacggaagctttccgtggccatcgcctttgtagggggctcccgagctataatcctggatgaacccactgccggcgtggacccgtatgcgcggcgagccatctgggatcttatactgaaatacaagcccggaaggactatacttctgagtacgcatcacatggatgaggccgacttgctgggggatagaattgcaatcatatcacatggcaaactgaagtgctgtggcagcccattgttcttgaagggtacttacggtgatggttacaggctgacgcttgtaaaacggcccgctgagcccggtggcccacaggaaccaggtcttgcttcatcgccccctggacgcgccccactgtcttcctgctcagaactgcaggttagccagttcatccgtaagcatgtggcctcttgtcttctggttagtgacacatccactgaattgtcttatattctgccctctgaggcagctaaaaagggcgctttcgagcgactgttccagcacttggaacggtcactggacgctctgcatctgtcaagcttcggactgatggacacaacattagaggaagtcttcctgaaagtgagcgaagaagaccaatcactggagaattccgaagcagatgttaaagaaagccggaaagacgtgcttccaggtgcagagggccccgccagcggcgaggggcacgcaggaaatctggctcgttgttccgagctcacccaatctcaggcttctctccagagtgcgtcatcagtgggcagcgctaggggagacgagggcgccggctacactgatgtgtatggagattacaggccactgtttgataatccccaggatccagacaatgtgtccctgcaggaagtcgaggcagaggccctgagccgtgtcgggcagggctcccggaaactagatggaggttggctcaaggttcgtcaattccatggcctgctcgtgaagcggtttcactgcgcccgccggaattcaaaggccctgttctcccaaatacttctacccgcattttttgtctgcgtagccatgacggtggctctttcagtacctgaaatcggcgatctcccacctctagtgctgtccccctcccaataccataattatacacagccaaggggtaacttcattccctacgctaacgaggagcgtagggaataccgattgaggctaagtccagacgcatcaccccagcaacttgtgagtaccttcaggctccctagcggcgttggggccacgtgcgtgctgaaatccccagcaaacggaagcctgggccccactttgaacctgtcttccggggagagccgtctgttggccgcgcgcttttttgattctatgtgcttagaatcctttacgcagggattgcccctgtcgaacttcgtcccacctcccccatctcctgcacccagcgactcacctgccagtcccgacgaggacctccaagcctggaacgtctctctgccgcccaccgctggaccagaaatgtggacctcagcaccgagcttgcctagacttgtaagagaacctgtgcgctgcacttgcagtgcccaaggaaccggcttctcatgcccttccagtgttgggggccatccgccacagatgcgggttgtcacaggggatatcctgacagacataaccggccacaatgtctctgaatacctgctgtttacatcagatcggtttcgtctacacaggtacggcgctataacattcggcaacgtgctgaagagtatcccagcctccttcggaacccgcgctccacccatggtacggaagattgccgtccgacgcgccgctcaagtgttttataataacaaaggctaccactccatgccgacataccttaattcactgaataacgccatcctacgtgcaaacctcccaaagtccaaggggaacccagcggcatatggtatcacagtgactaatcacccaatgaacaagacatcagccagcctcagcctagattacctgcttcaggggactgatgtagttatcgccatatttattattgtcgccatgtcattcgtgcccgcgtcattcgtggttttcctggtggccgagaagagtacaaaggcgaagcatctccagttcgtgagcgggtgtaacccaattatctactggctggccaactatgtctgggatatgcttaactatctggttcctgctacttgctgcgtcattatcttgtttgtgtttgatctccccgcttacacctcccctacgaacttcccggcggtcctgagtttgttcctcctgtacggctggtctataacacctataatgtacccagcgagcttctggttcgaggtgccgtccagcgcctatgtctttctgatcgtcatcaacctgttcatcggaattaccgccaccgttgctactttcttactgcagttgtttgagcacgacaaggacttgaaagtcgtgaatagctatctgaagagctgtttcttaatttttcccaattataatttgggtcatggcttaatggagatggcatataatgagtacattaacgagtattatgcgaaaatagggcagttcgataagatgaaatcaccatttgaatgggacattgtcacacgcgggctggtcgcgatggctgtggaaggagtggtgggcttccttctgactataatgtgtcaatacaatttcctgagaaggcctcagcgaatgcctgtgtccaccaagccggttgaggatgacgtggatgtggcgagtgaaaggcagcgtgtgctgcgaggagatgccgacaacgacatggtcaaaatagagaacttgaccaaagtgtataaatcccgcaaaattggacgaatcctggcagttgatcggctgtgcctaggcgttcggccaggcgagtgctttggtcttctgggagtgaacggcgccggaaaaacctctacttttaagatgctgactggagacgaatcaacgacaggaggggaggcattcgtcaatggccacagtgtgctcaaggaactactgcaagtgcagcagtctctgggctactgcccccaatgcgacgccctgttcgacgagctaaccgcccgggaacaccttcagctatacactagactacgtggaatttcttggaaggatgaagcccgggtagttaagtgggctctggaaaagctcgaactgacaaaatatgctgataaaccggctggaacttactctggaggcaataagcgaaaactcagcacagcaattgcactaatcgggtacccagccttcatatttctggatgagccgacaaccggaatggatcccaaagcacggcggttcctgtggaacctgatcttggatctcatcaagaccgggcgcagtgtggtgcttacatcacatagcatggaggaatgcgaggcactatgtacgagacttgctattatggtgaacggacgtctacgttgtctcggctcaatccaacacctgaagaacagattcggagacggctatatgatcacggttcgtaccaagagtagccagtccgtgaaagacgtggtgcgattcttcaatcggaacttcccagaagcgatgcttaaagagagacaccataccaaggtccagtatcagttgaaaagcgaacacatcagcctggcccaggtgttttctaagatggaacaagtgtccggggtcctgggtatcgaggactactctgtgtctcagactaccctcgacaatgttttcgttaacttcgccaagaaacagtctgataacctcgagcagcaagagaccgaacctccaagcgccctgcaatctcctttagggtgcctgttatctctgttgaggcctaggtcagctcctaccgaacttcgagcattggtcgccgatgagccagaggatttagacaccgaggacgagggactaatctccttcgaagaagaacgcgctcagctgtcctttaacaccgacactctctgctag

SEQ ID NO: 265691 - DNA, 591 bp, Artificial Sequence
  derived and/or modified sequence
atgctgactggtgacgagagcaccaccggtggggaagcattcgtcaatggacattctgtattgaaggaattgctgcaggtccagcagtccctgggatactgccctcagtgcgacgcactcttcgacgagctcactgctcgcgagcacctgcagttatatactagattaagaggaatttcatggaaggacgaggcccgggttgtcaaatgggccttagaaaaactggagctgacaaaatacgcagataagccggcgggcacctatagtggcggtaataagcggaaactgtctacagcaattgccttgataggctatcctgcatttatcttcctggacgagccaaccactggcatggaccccaaggcccggcggttcctatggaatctcatactggatttaatcaagacaggtcgaagcgtcgtgctgacctcacactcaatggaggagtgtgaggccctttgcacccgccttgcaataatggagcggtcacccgctgtacctggccagcatcccgcacccgaagaacctgtatggagatggctgcacgatcatggtgcggaccaggagcagcctgaatgtgagggcaggtag

SEQ ID NO: 265692 - DNA, 7401 bp, Artificial Sequence
  derived and/or modified sequence
atgggcaggaagaccagccgggtgcagcagggcccccccaggagccctgcctgcagcgcccatggagagaggtcctggggcctggagttcccccccttccgctggctgctgggcattgctggccgcacccacctggccgccctgccccccttccagtgggtgctggcctttgagatcttcatccccctggtgctcttcttcatcctgctgggcctgcggcagaagaagcccaccatctctgtgaaggaggtggccttctacacagctgcccccctgaccagcgctggcatcctgcctgtgatgcagagcctgtgcccagatggccagagagatgaatttggcttcctgcagtatgccaacagcacagtgacccagctgctggagcggctggacagagtggtggaggagggcaacctgtttgatcctgcccggcccagcctgggcagcgagctggaggccctgcggcagcacctggaggccctgtctgctggccctggcaccagcggcagccacctggacaggagcacagtgtcctccttcagcctggacagcgtggccaggaacccccaggagctgtggaggttcctgacccagaacctgagcctgcccaacagcacagcccaggccctgctggccgcccgggtggaccccccagaggtgtaccacctgctgtttggccccagcagcgccctggacagccagagcggcctgcacaagggccaggagccctggagccggctgggcggcaaccccctcttcaggatggaggagctgctgctggccccagccctgctggagcagctgacctgcaccccaggcagcggggagctgggccgcatcctgactgtgcctgagagccagaagggggccctgcagggctacagagatgctgtgtgcagcggccaggccgccgcccgggcccggcgcttcagcggcctgtctgctgagctgaggaaccagctggatgtggccaaggtgtcccagcagctgggcctggatgcccccaacggcagtgacagcagcccccaggcccccccaccccggcggctgcaggccctgctgggggacctgctggatgcccagaaggtgctgcaggatgtggatgtgctgagcgccctggccctgctgctgccccagggcgcctgcaccggccgcaccccaggccccccagccagcggggccggcggggccgccaatggaactggagctggagctgtgatgggccccaatgccacagctgaggagggcgcccccagcgctgctgccctggccaccccagacaccctgcagggccagtgcagcgcctttgtgcagctgtgggccggcctgcagcccatcctgtgtggcaacaacagaaccatcgagcctgaggccctgcggcggggcaacatgagcagcctgggcttcaccagcaaggagcagaggaacctgggcctgctggtgcacctgatgaccagcaaccccaagatcctgtatgccccagctggcagcgaggtggacagagtcatcctgaaggccaatgagacctttgcctttgtgggcaatgtgacccactacgcccaggtgtggctgaacatctctgctgagatccgctccttcctggagcagggccgcctgcagcagcacctgcgctggctgcagcagtatgtggccgagctgcggctgcaccctgaggccctgaacctgagcctggatgagctgcccccagccctgcggcaggacaacttcagcctgcccagcggcatggccctgctgcagcagctggacaccatcgacaatgctgcctgtggctggatccagttcatgagcaaggtgtctgtggacatcttcaagggcttccatgatgaggagagcatcgtgaactacaccctgaaccaggcctaccaggacaacgtgacagtgtttgccagcgtcatcttccagaccaggaaggatggcagcctgccccctcatgtgcactacaagatccggcagaacagcagcttcacagagaagaccaatgagatccggcgggcctactggaggcctggccccaacacaggaggccgcttctacttcctgtatggctttgtgtggatccaggacatgatggagcgggccatcatcgacacctttgtgggccatgatgtggtggagcccggcagctatgtgcagatgttcccctacccctgctacaccagagatgacttcctgtttgtgattgagcacatgatgcccctgtgcatggtgatctcctgggtgtacagcgtggccatgaccatccagcacatcgtggccgagaaggagcaccggctgaaggaggtgatgaagaccatgggcctgaacaatgctgtgcactgggtggcctggttcatcaccggctttgtgcagctgagcatctctgtgacagccctgacagccatcctgaagtatggccaggtgctgatgcacagccacgtggtgatcatctggctgttcctggccgtgtatgctgtggccaccatcatgttctgcttcctggtgtctgtgctgtacagcaaggccaagctggccagcgcctgtggcggcatcatctacttcctgtcctatgtgccctacatgtatgtggccatccgggaggaggtggcccatgacaagatcacagcctttgagaagtgcatcgccagcctgatgagcaccacagccttcggcctgggcagcaagtactttgccctgtatgaggtggccggcgtgggcatccagtggcacaccttcagccagagccctgtggagggagatgacttcaacctgctgctggccgtgaccatgctgatggtggatgctgtggtgtatggcatcctgacctggtacatcgaggccgtgcaccctggcatgtatggcctgccccggccctggtacttccccctgcagaagagctactggctgggcagcggccgcacagaggcctgggagtggagctggccctgggcccggaccccccggctgtctgtgatggaggaggaccaggcctgtgccatggagagccgccgctttgaggagacccggggcatggaggaggagcccacccacctgcccctggtggtgtgtgtggacaagctgaccaaggtgtacaaggatgacaagaagctggccctgaacaagctgagcctgaacctgtatgagaaccaggtggtgtccttcctgggccacaatggagctgggaagaccaccaccatgagcatcctgaccggcctcttcccccccaccagcggcagcgccaccatctacggccatgacatcagaacagagatggatgagatcaggaagaacctgggcatgtgcccccagcacaacgtgctgtttgaccggctgactgtggaggagcacctgtggttctacagccggctgaagtccatggcccaggaggagatcagaagagagatggacaagatgattgaggacctggagctgagcaacaagaggcacagcctggtgcagaccctgagcggcggcatgaagaggaagctgtctgtggccatcgcctttgtgggcggcagccgggccatcatcctggatgagcccacagctggggtggacccctatgcccggcgggccatctgggacctgatcctgaagtacaagccaggccgcaccatcctgctgagcacccaccacatggatgaagctgacctgctgggggaccgcatcgccatcatcagccacggcaagctgaagtgctgcggcagccccctcttcctgaagggcacctatggagatggctaccgcctgaccctggtgaagaggcctgctgagcccggcggcccccaggagcccggcctggccagcagccccccaggccgggcccccctgagcagctgcagcgagctgcaggtgtcccagttcatcaggaagcacgtggccagctgcctgctggtgtctgacaccagcacagagctgagctacatcctgcccagcgaggccgccaagaagggggcctttgagcggctcttccagcacctggagaggagcctggatgccctgcacctgagcagctttggcctgatggacaccaccctggaggaggtgttcctgaaggtgtctgaggaggaccagagcctggagaacagcgaggctgatgtgaaggagagcaggaaggatgtgctgcctggagctgagggccctgccagcggggagggccatgctggcaacctggcccgctgcagcgagctgacccagagccaggccagcctgcagagcgccagctctgtgggcagcgcccggggagatgaaggagctggctacacagatgtgtatggagactaccggcccctgtttgacaacccccaggaccctgacaacgtgtccctgcaggaggtggaggccgaggccctgagccgggtgggccagggcagcaggaagctggatggcggctggctgaaggtgcggcagttccacggcctgctggtgaagcgcttccactgtgcccggaggaacagcaaggccctcttcagccagatcctgctgcctgccttctttgtgtgtgtggccatgacagtggccctgtctgtgcctgagatcggggacctgccccccctggtgctgagccccagccagtaccacaactacacccagccccggggcaacttcatcccctatgccaatgaggagcggcgggagtaccgcctgcggctgagcccagatgccagcccccagcagctggtgtccaccttccggctgcccagcggcgtgggcgccacctgtgtgctgaagagccctgccaacggcagcctgggccccaccctgaacctgagcagtggagagagccggctgctggccgcccgcttctttgacagcatgtgcctggagagcttcacccagggcctgcccctgagcaactttgtgcccccaccacccagccctgcccccagcgacagccctgccagcccagatgaggacctgcaggcctggaatgtgtccctgcccccaacagctggccctgagatgtggaccagcgcccccagcctgccccggctggtgcgggagcctgtgcgctgcacctgcagcgcccagggcaccggcttcagctgccccagctctgtgggcggccaccccccccagatgagggtggtgactggagacatcctgacagacatcaccggccacaacgtgtctgagtacctgctcttcaccagtgaccgcttccggctgcacagatatggagccatcacctttggaaatgtgctgaagagcatcccagccagctttggcacccgggccccacccatggtgaggaagattgctgtgagaagagctgcccaggtgttctacaacaacaagggctaccacagcatgcccacctacctgaacagcctgaacaatgccatcctgcgggccaacctgcccaagagcaagggcaacccagctgcctacggcatcaccgtgaccaaccaccccatgaacaagaccagcgccagcctgagcctggactacctgctgcagggcacagatgtggtgattgccatcttcatcatcgtggccatgagctttgtgcctgccagctttgtggtgttcctggtggccgagaagagcaccaaggccaagcacctgcagtttgtgtctggctgcaaccccatcatctactggctggccaactacgtgtgggacatgctgaactacctggtgcctgccacctgctgcgtcatcatcctgtttgtgtttgacctgcctgcctacaccagccccaccaacttccctgctgtgctgagcctcttcctgctgtatggctggagcatcacccccatcatgtacccagccagcttctggtttgaggtgcccagcagcgcctacgtgttcctgattgtcatcaacctcttcatcggcatcacagccaccgtggccaccttcctgctgcagctgtttgaacatgacaaggacctgaaggtggtgaacagctacctgaagagctgcttcctgatcttccccaactacaacctgggccacggcctgatggagatggcctacaatgagtacatcaatgagtactatgccaagattggccagtttgacaagatgaagagcccctttgagtgggacatcgtgacccggggcctggtggccatggctgtggagggcgtggtgggcttcctgctgaccatcatgtgccagtacaacttcctgcggcggccccagaggatgcctgtgtccaccaagcctgtggaggatgatgtggatgtggccagcgagcggcagagggtgctgcggggagatgctgacaatgacatggtgaagattgagaacctgaccaaggtgtacaagagcaggaagattggccgcatcctggccgtggaccggctgtgcctgggcgtgcggcctggagagtgcttcggcctgctgggcgtgaatggagctgggaagaccagcaccttcaagatgctgactggagatgagagcaccaccggcggggaggcctttgtgaatggccacagcgtgctgaaggagctgctgcaggtgcagcagagcctgggctactgcccccagtgtgatgccctgtttgatgagctgacagcccgggagcacctgcagctgtacacccggctgcggggcatctcctggaaggatgaggcccgggtggtgaagtgggccctggagaagctggagctgaccaagtatgctgacaagccagctggcacctacagcggcggcaacaagaggaagctgagcacagccatcgccctgattggctacccagccttcatcttcctggatgagcccaccaccggcatggaccccaaggcccggcgcttcctgtggaacctgatcctggacctgatcaagacaggccgctctgtggtgctgaccagccacagcatggaggagtgtgaggccctgtgcacccggctggccatcatggtgaatggccgcctgcgctgcctgggcagcatccagcacctgaagaacagatttggagatggctacatgatcaccgtgaggaccaagagcagccagagcgtgaaggatgtggtgcgcttcttcaacagaaacttccctgaggccatgctgaaggagcggcaccacaccaaggtgcagtaccagctgaagtctgagcacatcagcctggcccaggtgttcagcaagatggagcaggtgtctggagtgctgggcatcgaggactacagcgtgtcccagaccaccctggacaacgtgtttgtgaactttgccaagaagcagagcgacaacctggagcagcaggagacagagccccccagcgccctgcagagccccctgggctgcctgctgagcctgctgcggcccaggtctgcccccacagagctgcgggccctggtggctgatgagcctgaggacctggacacagaagatgagggcctcatcagctttgaggaggagcgggcccagctgtccttcaacacagacaccctgtgctag

SEQ ID NO: 265693 - DNA, 591 bp, Artificial Sequence
  derived and/or modified sequence
atgctgactggagatgagagcaccactggaggagaggcctttgtgaatggccacagcgtgctgaaggagctgctgcaggtgcagcagagcctgggctactgcccccagtgtgatgccctgtttgatgagctgacagcccgggagcacctgcagctgtacacccggctgcggggcatctcctggaaggatgaggcccgggtggtgaagtgggccctggagaagctggagctgaccaagtatgctgacaagccagctggcacctacagcggcggcaacaagaggaagctgagcacagccatcgccctgattggctacccagccttcatcttcctggatgagcccaccaccggcatggaccccaaggcccggcgcttcctgtggaacctgatcctggacctgatcaagacaggccgctctgtggtgctgaccagccacagcatggaggagtgtgaggccctgtgcacccggctggccatcatggagaggagccctgctgtgcccggccagcacccagcccctgaggagcctgtgtggcgctggctgcatgaccacggggctgaccaggagcagccagaatgtgagggccgctag

SEQ ID NO: 265694 - DNA, 7401 bp, Artificial Sequence
  derived and/or modified sequence
atgggccggaagaccagccgggtgcagcagggccccccccggagcccagcctgttccgcccatggagaaaggtcttgggggctagagtttccaccgttccggtggctcctgggcatcgcagggaggacacacctcgcagcactgccacccttccagtgggtcttggctttcgaaatcttcattcctctcgtgctgtttttcattctgttaggtctgaggcagaagaagcctactatctctgtaaaagaggttgcattctacaccgcagcccccttgacctcagcagggatcctgcctgtgatgcagagtctgtgccccgacgggcagcgggacgagttcgggttccttcagtatgccaactctactgttacccaattgctggagcgactggacagagttgtcgaagaaggcaatttgtttgatccagctcgaccttctttgggttccgagctggaagcactgaggcagcatctcgaggcgctgtcagcaggccccggaactagtggatctcatctggacaggagtactgtgtcgtccttcagtctggactccgtggcaagaaacccccaagaactctggcgtttcctgacacagaatctgtctctgcctaacagtaccgcccaagccctattagctgcccgggtggatccacctgaggtataccacctcctgtttggtcccagttccgcactggacagtcagtcaggccttcacaaagggcaggaaccctggagtcgcctgggtggcaatccactgttccggatggaagagctgctgctcgcaccagccctgctggaacagcttacttgtacccccgggtctggtgagctaggtcggatactgactgttcccgaatctcagaaaggcgcactccaaggttatcgggatgccgtgtgctcaggccaggcagccgcaagggcacggaggttcagtggattgagcgcagagctgcgtaatcagctcgacgtggctaaggtttcccaacagctgggactcgatgcccctaacgggtcagatagcagtccacaagctccacccccacggaggcttcaggccctcttgggagatctcctggacgcgcagaaggtgctgcaagacgtcgacgttctgagcgccctggccttgctgctgccccagggggcctgtacaggacggacccccggccccccagcttccggtgccggaggagcagccaacggaactggggccggggccgtcatggggcctaatgccactgcagaggagggcgctcccagcgcagccgcgctggctactcccgacacactgcagggccagtgctccgccttcgtgcagttatgggcgggccttcagcccattctgtgcgggaataaccgcaccatcgaaccagaagcccttcgaaggggcaacatgtcatcgctggggtttacatctaaagagcagcgcaacctgggactcctggtccatttgatgacctcaaacccaaaaatattatacgctccggccggaagcgaagtggatcgcgtaatcctgaaagccaatgaaacttttgcgtttgtggggaacgtaacgcactacgctcaagtttggcttaacattagcgcagaaattaggagtttcttggagcaaggtagattgcaacagcatctacgctggctccagcaatacgtggctgaactgcggcttcacccagaggccttgaatctctctcttgacgaacttccccctgctctgcgacaggacaacttcagcttaccatcaggaatggcgctgctccagcagttagacaccattgataatgctgcttgcggctggattcaattcatgagcaaagtctctgtggacatcttcaagggctttcatgacgaggaaagcattgtaaattatactttaaaccaggcgtaccaagataatgttacagtattcgcatcagtgatttttcagaccagaaaggacgggtctctgcctccccacgtgcattataagatccggcagaacagctcgtttactgaaaagacaaatgaaattaggagagcgtattggcggccggggcccaataccggcggcaggttttacttcctgtacggcttcgtgtggattcaggacatgatggaacgtgccatcatcgatacatttgtgggccacgacgttgtggagcctggctcctatgtacagatgttcccctacccttgttacacccgtgacgatttcctgttcgtaattgaacatatgatgccactgtgcatggtaatctcgtgggtgtacagtgtggctatgacgatccagcacatcgtagcagaaaaggaacaccgtctcaaagaggtgatgaaaactatgggtttgaacaatgctgtccactgggtcgcatggtttatcaccgggttcgtgcagttgtctatttccgtcacagcgttgaccgccatcctaaagtacggccaggtgctcatgcacagccacgtggtcatcatatggctttttctggcagtctacgccgttgccacaatcatgttctgcttcttggttagtgtgctgtactcaaaggctaagctcgcttctgcttgtggtggcataatatacttcctatcttacgtgccgtacatgtacgtggccatcagagaggaggtcgctcacgataaaatcacagcatttgaaaaatgtattgcttccctgatgtctaccacagcatttgggctgggttccaaatattttgctttatacgaggtcgccggtgtcggcattcagtggcatacattctcacagagtccagtcgagggcgacgacttcaaccttctcctcgcggttactatgctgatggtcgatgctgttgtttatggaattctgacttggtatattgaagcagttcaccccggtatgtacggcctccctagaccgtggtactttcccctccagaagtcgtattggcttggttctggacgcaccgaagcttgggaatggtcttggccttgggcccgcacaccccggctgtcagtgatggaggaggatcaagcctgcgccatggaatcacgccgcttcgaggagaccagaggaatggaagaggagcccacacacctgcccctcgtagtgtgtgtcgacaagttaactaaggtgtataaagatgataaaaagctcgcgctgaacaagctttctctcaacctctatgaaaatcaagtagtgtcatttctggggcataatggggctggcaagaccaccactatgtccattctgacgggcttgttccctcctacctccggctcggctacaatctacggccacgacattaggacagagatggatgagataagaaaaaacctcggaatgtgcccacagcataatgtgctttttgacagactcactgtggaagagcatttatggttctactctaggctaaagagcatggcccaggaggaaattcggcgagagatggacaagatgatcgaagatctggaactttctaataagaggcattcattagtccaaacactgagtggagggatgaagcgtaagttgtctgtagctatcgcctttgtgggaggaagcagggccattatcctcgatgaacctaccgctggagtggacccatatgcacgcagagctatctgggatctcatcctgaaatataaacctggccgtactattctcctaagcactcatcacatggacgaggctgacctattgggcgacaggattgcgatcatttcccacggtaaacttaagtgctgcgggtcccctctgttcttgaagggcacatatggtgatgggtaccggctcacgttggtgaagagaccagcagagccaggaggaccccaagagccagggctcgctagttccccaccggggagagcgcccctaagctcttgctccgaattgcaagtgtcacagtttatcaggaaacacgtcgcaagttgtttgttagtctctgatacatcgaccgaactcagctatattcttcctagcgaagccgccaaaaaaggcgctttcgagcgcctattccagcacctcgaaagatccctggatgcccttcacctgagctcctttggcctgatggacaccactttggaagaggtctttcttaaggtatcagaggaggaccaatccctggaaaatagcgaggccgatgtgaaggaaagccggaaggacgtcctcccaggtgctgaggggcccgccagtggggaaggccatgcaggaaacttagcaagatgcagtgagctcacgcagtcacaagccagtttacaaagcgcctctagtgttggatcggcgcgcggagatgagggggccggatataccgatgtttatggagattacaggcccctgttcgacaaccctcaggatcccgacaacgtgtcactgcaagaagttgaggcggaggccttgtcccgggttggtcaggggtcccgaaagctcgatggagggtggttgaaagtacggcagttccatggcctattggtgaagcgcttccactgtgccaggcgcaactctaaggcacttttctcccaaattctgctgcccgcattttttgtttgcgtggccatgaccgtagcactgtccgtgcccgagatcggcgatctgccgcctctcgttctatctccatcccagtaccataactatactcagcctagaggtaatttcattccctatgctaacgaagagaggagggaatacagattgcgcctgtctccggatgctagtcctcagcagctagtgagtacatttaggcttccttccggagtaggtgccacatgcgtcctgaaatctccggcaaacggtagcctcggaccaaccctcaatctgtcaagcggtgagagcagattgctcgcagctaggtttttcgactcaatgtgcttggagagtttcacacagggattacctctgtcgaacttcgtaccgcccccaccgagccccgctccttctgattcccccgctagtccagatgaagatctgcaagcctggaacgtgtctctcccaccaactgccggccccgagatgtggacctctgcccctagccttcctcggttggtgagggagcccgtgcgctgcacctgttccgctcaaggaaccggattttcctgcccctccagcgttggcgggcacccccctcaaatgcgcgtggttactggtgacatactgacagatataacaggtcataacgtgtccgagtatctgctgtttacatccgatcgctttagattacacaggtacggcgctataaccttcggcaatgtactgaagtctatcccagcaagtttcggcacccgggccccccccatggtgcgtaagattgctgtcagaagggcggcacaggtgttctataacaacaaaggttaccactcaatgccgacatacctgaattccttaaataacgctatactaagggcaaaccttccaaagagcaagggtaatcctgccgcttacggaatcactgtaactaaccatccgatgaacaagacctcagcgagcctgagtctggactacttattacagggaacagatgttgtcatcgctattttcatcatagtcgcgatgtcttttgtgccagcctctttcgtcgtgttcctggtcgctgaaaagagtacaaaggccaaacacttgcagtttgtttcgggctgcaatccaataatttactggctcgccaactacgtgtgggatatgttgaattatttggttcccgccacatgctgtgtaattatcctgttcgtgttcgacctccccgcttacacaagtcccacaaacttccctgctgtgttatctctgttcttactctatggatggagcatcacccccataatgtaccctgcgagcttttggtttgaagtgccgtcctctgcttatgtttttctgattgtcatcaacctgtttataggcattactgcaaccgtagctactttcctccttcagctgtttgagcacgacaaggatctgaaagtcgtcaatagttatcttaaatcctgctttctcatctttccaaattataatcttggccacgggttaatggagatggcttacaacgaatatattaacgagtattacgctaagattggtcaatttgacaagatgaaaagccccttcgaatgggacatcgtcacccgcggactggtggccatggcagtagagggcgttgtggggtttctattaaccattatgtgccagtataacttcctacggcgcccccaacgaatgccagtcagcactaaacccgtggaggacgatgtggatgtcgcgtccgaaagacagcgcgttctcaggggggacgcggacaacgatatggtgaaaatcgagaatctcactaaagtatataagagccggaaaattgggcggattctggcggtggacaggttgtgcctgggtgtgaggcctggagagtgctttgggctcctgggggtaaatggggccggcaagacctctacgtttaaaatgctcactggcgatgagtctaccacggggggagaggcctttgtgaatggccactcggtcctcaaagagctattacaggtgcagcagtccctgggatactgtcctcagtgtgacgcgcttttcgatgaactcacagccagagaacacctccaactctacactagattgagaggcatttcttggaaagacgaggcacgtgtcgtgaagtgggctctcgagaaactggagctgaccaaatatgccgataaaccggcaggaacctactcagggggaaacaagaggaaactgagtacagctatcgccctgattggctacccagccttcatctttcttgacgagcctactaccggaatggatcccaaagcaagacgatttttgtggaacctgatactagacctcatcaaaaccggtaggtccgtggtgttgaccagtcatagcatggaggagtgcgaagctctgtgtaccagattagccattatggtcaatggccgactgagatgtcttggatcaattcagcacctgaagaaccgctttggcgacggttatatgattactgttaggactaagtcctcacagtctgtcaaggatgtggtcaggttttttaaccgcaactttcctgaggccatgcttaaagaaaggcaccataccaaggtgcagtaccagcttaaatccgaacatattagtctggcccaagtgttctccaagatggagcaggtgagcggggtgctgggtatcgaggattacagtgtgagtcagaccaccttggacaacgtttttgtcaactttgctaagaaacaaagcgacaacttagagcagcaagagacagaaccgccctccgctctacagtcccctcttggctgccttttgagccttctgcggcctcgatctgctcctactgaactgcgagccctagtggcagatgagccagaagatctggacactgaggacgaggggcttatctccttcgaggaggagagagcccagctcagcttcaataccgataccctctgttag

SEQ ID NO: 265695 - DNA, 591 bp, Artificial Sequence
  derived and/or modified sequence
atgctgaccggcgacgagagcaccaccggcggcgaggccttcgtgaacggacactccgtgctaaaggaacttctgcaggtgcagcagagcctggggtactgcccccagtgcgacgccttgttcgatgaactgaccgctagggagcatttacagctctacactcggttgcggggaatctcctggaaggatgaagctcgggtggtgaagtgggcactggaaaagctcgagttaactaaatatgccgacaagcctgctggaacttactctgggggaaataaacgaaaattgagtactgccattgcactcattggctatcctgctttcattttccttgatgagcccaccaccggtatggaccctaaagcacgccgtttcctgtggaacttaattctggacctgatcaaaaccggtaggagcgtcgtcctgacctctcacagtatggaagaatgtgaagcactgtgcactaggctggctattatggaacgatcccctgcagtgccgggtcagcaccccgctcctgaggagcccgtgtggcgttggctacatgatcatggtgcagatcaggagcagcccgaatgtgaaggacgctag

SEQ ID NO: 265696 - DNA, 7400 bp, Artificial Sequence
  derived and/or modified sequence
atgggtaggaaaacttccagagtgcagcagggtccgcctagatcccccgcatgttccgcccatggtgagaggtcatgggggctggaatttcctccattccgttggttactgggcatcgccggacgaacacacctggccgcactcccaccatttcagtgggttcttgcatttgagatctttattccgctggttctattcttcatcctgcttggactgagacagaagaaacccactatctccgtgaaggaagtggctttttataccgcagcaccccttacatcggccggtattctgcccgtcatgcagtccctttgccctgacgggcagagagatgagttcggtttcctgcagtacgccaacagcactgtgacacagctcctggagcgcctggatcgcgttgtcgaagagggaaatctcttcgatcccgctaggccctcgcttgggagcgagctcgaagcgttacgacagcacctcgaggccctttccgccggacccggtaccagtggtagtcacctagataggtccactgtctccagtttttccttagacagtgttgccagaaacccacaagagttatggaggtttttgacacaaaaccttagccttcccaactccacagctcaggcactcctggcagctagagtggatccacctgaggtatatcatctcttatttgggccttcttcagctctcgatagtcagtctggcctgcacaagggacaggaaccgtggagtcggctgggcggaaatcccctgtttcggatggaggagctactgctggccccagccctgttagaacagctaacgtgcacgccaggaagcggagaacttggacggattctgaccgtgccagaaagccagaaaggtgcccttcaggggtaccgggatgcggtttgttctggacaggcagctgcaagggcccgtcgcttctccggattgtctgccgaactgagaaaccagctcgacgtggcaaaagtgagtcagcagctgggcttggatgctcctaatggatctgacagttctccacaggcaccaccgccacggcgacttcaggcactgctaggagacctcctggatgctcagaaggtactgcaggacgtggatgtgctctcagctcttgctctgcttttgccacagggtgcctgcactggacgaacacctgggccaccagccagcggagctggcggtgcagccaatggcactggcgcaggcgctgtgatgggtcctaatgccactgccgaggagggcgctccatcagctgcagctttagctactccagatacattgcaggggcagtgttccgccttcgttcaactttgggccggtctgcagccaatcttgtgtggcaacaaccgtacaattgagcctgaggctctccgtcggggaaacatgagctcccttggattcacgagcaaggagcagcgtaacctgggactactcgtgcacctgatgacgtccaatccaaaaattctgtacgcgccagcgggatccgaagtggaccgggtaattttgaaggctaatgaaaccttcgcttttgtgggaaatgttacgcattacgcacaggtgtggctcaacattagtgctgagatcaggtcctttttggagcagggcaggttacagcagcacctaaggtggctccaacagtacgttgctgagttgaggctgcacccagaggcactaaatctcagtctagatgaattgcccccagccttgcggcaagacaatttctctctgccatctgggatggctcttcttcagcagctggatacaatagacaacgccgcttgcggttggattcaattcatgtccaaagtctctgtcgacatcttcaaagggtttcacgatgaggaatccatagtgaactacacactgaatcaggcctaccaggataatgtgactgtctttgccagcgtcatatttcaaactcggaaggatggcagtctgccccctcatgttcactataaaatcaggcagaactcttccttcactgagaaaacaaacgaaattcgtagagcttattggcgccctgggcctaataccggaggtagattttatttcctgtacggttttgtttggattcaggatatgatggaaagggctatcattgacacgttcgtgggccatgacgttgtggaaccaggatcctacgtgcagatgttcccttacccatgttatacaagggacgatttcctctttgtcatcgagcatatgatgccgctttgtatggtaatttcctgggtgtacagtgtcgctatgaccattcagcacattgttgccgaaaaggagcatcggcttaaggaggtaatgaagacgatgggccttaacaatgcagtgcactgggtcgcatggtttattaccggcttcgtgcagctctcaatttccgtgacggcccttaccgctattctcaaatatgggcaagtcctgatgcattctcacgtggtgatcatttggctctttcttgctgtgtatgctgtggcaactatcatgttctgctttttggtgtccgtgctgtactccaaggctaagcttgcatccgcttgcggaggaattatttattttctgagttacgttccgtatatgtatgtagccattagagaagaggtcgcccatgataaaattactgctttcgagaagtgcatagcctcacttatgtccacaaccgcttttggattggggagcaaatatttcgccttgtatgaggttgcaggcgtgggcatccagtggcatacattctcacaaagtcccgttgagggagacgacttcaatctgctgctggcggtgaccatgctgatggtggatgcggtggtgtacgggatcctgacttggtacatcgaagccgtacaccctggtatgtatggtctgcccagaccatggtacttcccgctgcagaagagctactggctgggctcaggaaggactgaggcctgggaatggagctggccatgggctaggacccctagactgtccgtaatggaggaggaccaggcctgcgctatggagtcaagacggtttgaagaaacacgaggaatggaggaggagcccacacatctgccactcgtagtctgtgtggataaactcaccaaggtatataaggacgataaaaagctcgcgctcaacaaattgagtctgaatctgtacgagaaccaggttgtgtcattcctgggacacaacggtgctggcaaaaccaccaccatgtccatcctcaccggtctgttccccccaacttcaggttccgcaaccatttatggacatgacattagaaccgagatggatgagattcgtaagaacttagggatgtgtccgcaacacaatgtcctcttcgataggttgaccgtggaggagcacttgtggttttattcccgcttgaaaagcatggcccaggaagaaattcgcagggaaatggacaaaatgatcgaggacttggaacttagtaataaaagacactcactggtgcagaccctgagtggcggtatgaaaagaaagctctctgtagctatcgccttcgttggcggatcgagggcgataatcctggacgagccgacagctggcgtcgacccctacgcaagaagagctatttgggacttgatactgaagtataaaccaggcagaactatactgttgagcacacaccacatggatgaggctgacctgctgggcgacagaatcgctatcatcagccacgggaaactgaaatgctgtgggtcccctttgttcttaaagggaacgtacggcgatggataccggcttactctagtgaagcggccagcagaaccaggtggtcctcaagagcccggtttagcctccagtccccctggaagggcacctctgtcatcctgtagtgagctgcaagtgtcccagtttatccgcaagcacgtcgccagctgtttactggtgagtgatacttcaaccgaactctcatatattctccctagcgaagctgcaaaaaaaggggcattcgaacggctgtttcaacatttagagcgatcactggacgcgttgcacctgagctcgtttggactcatggacacaaccttggaggaggtgttcctgaaagtaagtgaggaagaccaatcactcgaaaattcagaagccgacgtaaaggagtcaagaaaagacgtgctgccgggagcagagggaccggctagcggggaagggcacgctgggaatctcgccagatgtagcgaactgacccagtctcaagcctctcttcagtcagcgtcaagcgtgggtagtgccaggggcgacgaaggagccggatacacagacgtctacggggattaccggcctctctttgataacccacaggaccctgataatgtgagcctgcaagaggtggaagcagaagctctgtcacgggttggccagggcagcaggaaactggatggcggttggcttaaagttaggcagttccacggacttctcgttaagcggttccattgtgcacggcgaaacagcaaagctctgttttcgcagattctgctgcctgcatttttcgtgtgtgtggccatgaccgtggccctctccgttccggagatcggggatctgccacctctggtcctctctccttcgcagtaccacaactacacgcagccacgaggaaatttcattccatacgccaacgaggagcggagggaatatagactgcgactatcccctgacgcaagtccccagcagctggtcagtacatttcgtctgccatccggcgtgggcgctacgtgtgtgctcaaaagtcctgctaatgggtccttaggacctactctcaacctgtcttctggcgagtccagattgctggcggctcgctttttcgacagcatgtgtctggagtcattcacacagggcttgcccctttctaactttgtgcctccccctccttctccagctccgagtgatagtccagccagtccagatgaagatcttcaggcctggaacgtcagccttccgccaacagccggacctgagatgtggacatcagccccttcactcccaaggcttgtcagggaacctgtgcgatgtacctgttctgcccagggcaccgggttctcatgtccatcaagcgtaggcggtcacccgcctcaaatgcgcgtggtaactggggatatattgacagacatcactggccacaacgtgtctgaatatttgctcttcacttcggatcgctttcgcctccatcgatacggagctatcacgtttggtaatgtgctgaagtccattccagcctcttttggaacgcgcgcaccacccatggtacggaagatagctgtcaggcgagccgctcaggtgttttacaataacaaaggctatcacagcatgcccacctacttgaattccctgaacaatgccatcctccgagccaatttgccaaagtccaagggcaatcctgctgcgtacggcatcacagttaccaaccacccaatgaataaaacctccgcttccctgagtctcgattaccttctacagggcaccgatgtcgtgatcgcaatttttattatcgtcgctatgtcattcgtgccggcatcattcgttgtcttcttggttgcagaaaagagcacaaaagcaaagcatctccagttcgtgtccggttgcaatcccattatctactggctagcaaattacgtgtgggatatgctgaactacctagttccagctacgtgttgcgtgataatacttttcgtgttcgatctacctgcctatacctctcccacgaactttccagctgtgcttagtctgtttcttctctatggatggtctattacacccatcatgtatcccgctagcttctggtttgaggtaccctcaagcgcctacgtgtttctaattgttataaacctgtttataggcatcacagccaccgtggctaccttccttctgcagctgttcgagcatgacaaggatctcaaggtggtgaattcatatctgaagtcttgttttttgatattcccgaattacaacctcggacatgggttgatggaaatggcttacaacgaatacattaatgaatattacgcaaagatcgggcaattcgataaaatgaaatccccattcgagtgggatatcgtcacccggggtttagttgctatggcagtggagggcgttgtggggttcctgctgacaattatgtgtcagtacaactttctgagaagaccccagaggatgccagtaagcacaaagcccgtggaggacgacgttgatgtggcgtcagaaaggcagcgagtgcttcgaggcgatgcggacaacgacatggtcaaaatcgagaaccttaccaaggtatacaaatccaggaaaatcgggagaatccttgcggtcgatcggctttgtttaggagttcggccaggtgagtgttttggcctgctgggtgttaatggcgctggaaagaccagcacatttaaaatgcttactggggacgagagcaccaccggcggtgaagcctttgtgaatggccatagcgtcctgaaggaactgcttcaagtgcagcaatccctcggctattgtcctcagtgtgatgccttatttgacgaactcacggctcgcgaacacttgcaactgtacactagattgcgtggcataagttggaaagacgaagcccgagtcgtgaagtgggctttagaaaagctggaactcaccaaatacgcggataaacccgctggtacctattctggagggaacaagaggaaactgagcaccgccatcgctcttattggataccctgccttcatctttctggatgagcccacaaccggaatggatccgaaagccaggcggtttctgtggaacctgatcctcgacttgattaaaaccggccgatcggttgtcctcaccagccatagcatggaagaatgcgaagcactttgtacccgcctggcgattatggtgaatggtaggttgcgctgtctcgggtcaattcagcatctgaagaatcggtttggggacggttacatgatcactgttcggaccaagtccagtcagtctgtgaaggatgttgttaggttctttaacagaaacttcccagaagcgatgctcaaggagcgacatcatactaaggtgcagtaccaattaaagtcagagcacatatcgcttgcccaggtgtttagtaaaatggaacaggtatctggtgtgctgggaatcgaggattactcagtttctcagactacattggacaacgtatttgtgaacttcgccaaaaaacagagtgacaacctcgaacaacaggaaactgagccccctagcgctctccagtccccgctgggctgcctgttatccctgctgcggccacgatctgccccaaccgagcttcgtgccctcgtagccgatgagccagaggatctcgacaccgaggatgagggattaatcagcttcgaggaggaaagagctcagttgagctttaacacagatacgttgtgtta

SEQ ID NO: 265697 - DNA, 591 bp, Artificial Sequence
  derived and/or modified sequence
atgctgacaggcgacgaaagtactactggcggtgaggcttttgtcaacgggcattccgtgctgaaggagctgctccaggtccagcagtccctgggctattgtcctcagtgcgatgcactgtttgacgagttaaccgcccgtgagcatcttcagctgtatacaagattacgcggtatttcctggaaggacgaagcgagagtggtgaagtgggccctggaaaagctggaattgacgaaatacgcagacaagcccgctggtacgtattctggcggaaataagcgcaaactgtctaccgcaattgcgcttataggatatcccgctttcatatttctcgacgaacccaccaccggtatggatcccaaagcacggaggttcttatggaatctcatcctggatctgatcaaaaccggccgaagcgtggtactgacctcacatagcatggaggagtgtgaggccctgtgcactagactagccattatggagaggtccccagctgtgcccggacagcatcctgcccctgaagagcctgtctggcggtggctgcacgatcatggagctgatcaggaacagccagaatgcgagggacgttag

SEQ ID NO: 265698 - DNA, 8146 bp, Artificial Sequence
  derived and/or modified sequence
agaaccgcctgatcccgaactccctgtgcagagaccagactcgcccgaatatggggagaaaaacgagccgcgtgcagcaggggccgcctcggtcccctgcctgctccgctcacggcgagcgttcctggggcctcgagtttccccccttccgctggctgctcggaatcgcgggacggacccacctggccgccctgcctcccttccagtgggtcctggccttcgagatcttcatccccctggtgctgttctttatcctgctggggctgcgacagaagaagcccaccatctccgtgaaggaagtcgccttctacacagcggcgcccctgacgtctgccggcatcctgcctgtcatgcaatcgctgtgcccggacggccagcgagacgagttcggcttcctgcagtacgccaactccacggtcacgcagctgcttgagcgcctggaccgcgtggtggaggaaggcaacctgtttgacccagcgcggcccagcctgggctcagagctcgaggccctacgccagcatctggaggccctcagtgcgggcccgggcacctcggggagccacctggacagatccacagtgtcttccttctctctggactcggtggccagaaacccgcaggagctctggcgtttcctgacgcaaaacttgtcgctgcccaatagcacggcccaagcactcttggccgcccgtgtggacccgcccgaggtctaccacctgctctttggtccctcatctgccctggattcacagtctggcctccacaagggtcaggagccctggagccgcctagggggcaatcccctgttccggatggaggagctgctgctggctcctgccctcctggagcagctcacctgcacgccgggctcgggggagctgggccggatcctcactgtgcctgagagtcagaagggagccctgcagggctaccgggatgctgtctgcagtgggcaggctgctgcgcgtgccaggcgcttctctgggctgtctgctgagctccggaaccagctggacgtggccaaggtctcccagcagctgggcctggatgcccccaacggctcggactcctcgccacaggcgccacccccacggaggctgcaggcgcttctgggggacctgctggatgcccagaaggttctgcaggatgtggatgtcctgtcggccctggccctgctactgccccagggtgcctgcactggccggacccccggacccccagccagtggtgcgggtggggcggccaatggcactggggcaggggcagtcatgggccccaacgccaccgctgaggagggcgcaccctctgctgcagcactggccaccccggacacgctgcagggccagtgctcagccttcgtacagctctgggccggcctgcagcccatcttgtgtggcaacaaccgcaccattgaacccgaggcgctgcggcggggcaacatgagctccctgggcttcacgagcaaggagcagcggaacctgggcctcctcgtgcacctcatgaccagcaaccccaaaatcctgtacgcgcctgcgggctctgaggtcgaccgcgtcatcctcaaggccaacgagacttttgcttttgtgggcaacgtgactcactatgcccaggtctggctcaacatctcggcggagatccgcagcttcctggagcagggcaggctgcagcaacacctgcgctggctgcagcagtatgtagcagagctgcggctgcaccccgaggcactgaacctgtcactggatgagctgccgccggccctgagacaggacaacttctcgctgcccagtggcatggccctcctgcagcagctggataccattgacaacgcggcctgcggctggatccagttcatgtccaaggtgagcgtggacatcttcaagggcttccacgacgaggagagcattgtcaactacaccctcaaccaggcctaccaggacaacgtcactgtttttgccagtgtgatcttccagacccggaaggacggctcgctcccgcctcacgtgcactacaagatccgccagaactccagcttcaccgagaaaaccaacgagatccgccgcgcctactggcggcctgggcccaatactggcggccgcttctacttcctctacggcttcgtctggatccaggacatgatggagcgcgccatcatcgacacttttgtggggcacgatgtggtggagccaggcagctacgtgcagatgttcccctacccctgctacacacgcgatgacttcctgtttgtcattgagcacatgatgccgctgtgcatggtgatctcctgggtctactccgtggccatgaccatccagcacatcgtggcggagaaggagcaccggctcaaggaggtgatgaagaccatgggcctgaacaacgcggtgcactgggtggcctggttcatcaccggctttgtgcagctgtccatctccgtgacagcactcaccgccatcctgaagtacggccaggtgcttatgcacagccacgtggtcatcatctggctcttcctggcagtctacgcggtggccaccatcatgttctgcttcctggtgtctgtgctgtactccaaggccaagctggcctcggcctgcggtggcatcatctacttcctgagctacgtgccctacatgtacgtggcgatccgagaggaggtggcgcatgataagatcacggccttcgagaagtgcatcgcgtccctcatgtccacgacggcctttggtctgggctctaagtacttcgcgctgtatgaggtggccggcgtgggcatccagtggcacaccttcagccagtccccggtggagggggacgacttcaacttgctcctggctgtcaccatgctgatggtggacgccgtggtctatggcatcctcacgtggtacattgaggctgtgcacccaggcatgtacgggctgccccggccctggtacttcccactgcagaagtcctactggctgggcagtgggcggacagaagcctgggagtggagctggccgtgggcacgcaccccccgcctcagtgtcatggaggaggaccaggcctgtgccatggagagccggcgctttgaggagacccgtggcatggaggaggagcccacccacctgcctctggttgtctgcgtggacaaactcaccaaggtctacaaggacgacaagaagctggccctgaacaagctgagcctgaacctctacgagaaccaggtggtctccttcttgggccacaacggggcgggcaagaccaccaccatgtccatcctgaccggcctgttccctccaacgtcgggttccgccaccatctacgggcacgacatccgcacggagatggatgagatccgcaagaacctgggcatgtgcccgcagcacaatgtgctctttgaccggctcacggtggaggaacacctctggttctactcacggctcaagagcatggctcaggaggagatccgcagagagatggacaagatgatcgaggacctggagctctccaacaaacggcactcactggtgcagacattgtcgggtggcatgaagcgcaagctgtccgtggccatcgccttcgtgggcggctctcgcgccatcatcctggacgagcccacggcgggcgtggacccctacgcgcgccgcgccatctgggacctcatcctgaagtacaagccaggccgcaccatccttctgtccacccaccacatggatgaggctgacctgcttggggaccgcattgccatcatctcccatgggaagctcaagtgctgcggctccccgctcttcctcaagggcacctatggcgacgggtaccgcctcacgctggtcaagcggcccgccgagccggggggcccccaagagccagggctggcatccagccccccaggtcgggccccgctgagcagctgctccgagctccaggtgtcccagttcatccgcaagcatgtggcctcctgcctgctggtctcagacacaagcacggagctctcctacatcctgcccagcgaggccgccaagaagggggctttcgagcgcctcttccagcacctggagcgcagcctggatgcactgcacctcagcagcttcgggctgatggacacgaccctggaggaagtgttcctcaaggtgtcggaggaggatcagtcgctggagaacagtgaggccgatgtgaaggagtccaggaaggatgtgctccctggggcggagggcccggcgtctggggagggtcacgctggcaatctggcccggtgctcggagctgacccagtcgcaggcatcgctgcagtcggcgtcatctgtgggctctgcccgtggcgacgagggagctggctacaccgacgtctatggcgactaccgccccctctttgataacccacaggacccagacaatgtcagcctgcaagaggtggaggcagaggccctgtcgagggtcggccagggcagccgcaagctggacggcgggtggctgaaggtgcgccagttccacgggctgctggtcaaacgcttccactgcgcccgccgcaactccaaggcactcttctcccagatcttgctgccagccttcttcgtctgcgtggccatgaccgtggccctgtccgtcccggagattggtgatctgcccccgctggtcctgtcaccttcccagtaccacaactacacccagccccgtggcaatttcatcccctacgccaacgaggagcgccgcgagtaccggctgcggctatcgcccgacgccagcccccagcagctcgtgagcacgttccggctgccgtcgggggtgggtgccacctgcgtgctcaagtctcccgccaacggctcgctggggcccacgttgaacctgagcagcggggagtcgcgcctgctggcggctcggttcttcgacagcatgtgtctggagtccttcacacaggggctgccactgtccaatttcgtgccacccccaccctcgcccgccccatctgactcgccagcgtccccggatgaggacctgcaggcctggaacgtctccctgccgcccaccgctgggccagaaatgtggacgtcggcaccctccctgccgcgcctggtacgggagcccgtccgctgcacctgctctgcgcagggcaccggcttctcctgccccagcagtgtgggcgggcacccgccccagatgcgggtggtcacaggcgacatcctgaccgacatcaccggccacaatgtctctgagtacctgctcttcacctccgaccgcttccgactgcaccggtatggggccatcacctttggaaacgtcctgaagtccatcccagcctcatttggcaccagggccccacccatggtgcggaagatcgcggtgcgcagggctgcccaggttttctacaacaacaagggctatcacagcatgcccacctacctcaacagcctcaacaacgccatcctgcgtgccaacctgcccaagagcaagggcaacccggcggcttacggcatcaccgtcaccaaccaccccatgaataagaccagcgccagcctctccctggattacctgctgcagggcacggatgtcgtcatcgccatcttcatcatcgtggccatgtccttcgtgccggccagcttcgttgtcttcctcgtggccgagaagtccaccaaggccaagcacctgcagtttgtcagcggctgcaaccccatcatctactggctggcgaactacgtgtgggacatgctcaactacctggtccccgctacctgctgtgtcatcatcctgtttgtgttcgacctgccggcctacacgtcgcccaccaacttccctgccgtcctctccctcttcctgctctatgggtggtccatcacgcccatcatgtacccggcctccttctggttcgaggtccccagctccgcctacgtgttcctcattgtcatcaatctcttcatcggcatcaccgccaccgtggccaccttcctgctacagctcttcgagcacgacaaggacctgaaggttgtcaacagttacctgaaaagctgcttcctcattttccccaactacaacctgggccacgggctcatggagatggcctacaacgagtacatcaacgagtactacgccaagattggccagtttgacaagatgaagtccccgttcgagtgggacattgtcacccgcggactggtggccatggcggttgagggcgtcgtgggcttcctcctgaccatcatgtgccagtacaacttcctgcggcggccacagcgcatgcctgtgtctaccaagcctgtggaggatgatgtggacgtggccagtgagcggcagcgagtgctccggggagacgccgacaatgacatggtcaagattgagaacctgaccaaggtctacaagtcccggaagattggccgtatcctggccgttgaccgcctgtgcctgggtgtgcgtcctggcgagtgcttcgggctcctgggcgtcaacggtgcgggcaagaccagcaccttcaagatgctgaccggcgacgagagcacgacggggggcgaggccttcgtcaatggacacagcgtgctgaaggagctgctccaggtgcagcagagcctcggctactgcccgcagtgtgacgcgctgttcgacgagctcacggcccgggagcacctgcagctgtacacgcggctgcgtgggatctcctggaaggacgaggcccgggtggtgaagtgggctctggagaagctggagctgaccaagtacgcagacaagccggctggcacctacagcggcggcaacaagcggaagctctccacggccatcgccctcattgggtacccagccttcatcttcctggacgagcccaccacaggcatggaccccaaggcccggcgcttcctctggaacctcatccttgacctcatcaagacagggcgttcagtggtgctgacatcacacagcatggaggagtgcgaggcgctgtgcacgcggctggccatcatggtgaacggtcgcctgcggtgcctgggcagcatccagcacctgaagaaccggtttggagatggctacatgatcacggtgcggaccaagagcagccagagtgtgaaggacgtggtgcggttcttcaaccgcaacttcccggaagccatgctcaaggagcggcaccacacaaaggtgcagtaccagctcaagtcggagcacatctcgctggcccaggtgttcagcaagatggagcaggtgtctggcgtgctgggcatcgaggactactcggtcagccagaccacactggacaatgtgttcgtgaactttgccaagaagcagagtgacaacctggagcagcaggagacggagccgccatccgcactgcagtcccctctcggctgcttgctcagcctgctccggccccggtctgcccccacggagctccgggcacttgtggcagacgagcccgaggacctggacacggaggacgagggcctcatcagcttcgaggaggagcgggcccagctgtccttcaacacggacacgctctgctgaccacccagagctgggccagggaggacacgctccactgaccacccagagctgggccagggactcaacaatggggacagaagtcccccagtgcctgccagggcctggagtggaggttcaggaccaaggggcttctggtcctccagcccctgtactcggccatgccctgtggtcactgcggttgccgcccctaattgtgccaaaggctgacccggcccgggctgcgtacacccttgccctgctttgccttaaagcctcggggtctgcccggcccctcgcccctgcctggcactgctcaccgcccaaggcgacgccggctggaccaggcactgctggcctttctcctgcccggcctcggaaccagcttttctctcttacgatgaaggctgatgccgagagcgggctgtgggcggagctgggtcagtcccgtatttattttgctttgagaagaggctcctctggccctgctctcctgcagggaggtggctgtcctgcgggaagccatcagcttgggccagctggcaggtggcaggaatggagaagctgaccctgctggccaggcaaggggccagaccccccccaacccccagctgccatcgctctcccacccagcttggccccctgcccgcccacctccctgggagccgggcctgtacatagcgcacagatgtttgttttaaataaataaacaaaatgtc

SEQ ID NO: 265699 - DNA, 3299 bp, Artificial Sequence
  derived and/or modified sequence
ctcggttcttcgacagcatgtgtctggagtccttcacacaggggctgccactgtccaatttcgtgccacccccaccctcgcccgccccatctgactcgccagcgtccccggatgaggacctgcaggcctggaacgtctccctgccgcccaccgctgggccagaaatgtggacgtcggcaccctccctgccgcgcctggtacgggagcccgtccgctgcacctgctctgcgcagggcaccggcttctcctgccccagcagtgtgggcgggcacccgccccagatgcgggtggtcacaggcgacatcctgaccgacatcaccggccacaatgtctctgagtacctgctcttcacctccgaccgcttccgactgcaccggtatggggccatcacctttggaaacgtcctgaagtccatcccagcctcatttggcaccagggccccacccatggtgcggaagatcgcggtgcgcagggctgcccaggttttctacaacaacaagggctatcacagcatgcccacctacctcaacagcctcaacaacgccatcctgcgtgccaacctgcccaagagcaagggcaacccggcggcttacggcatcaccgtcaccaaccaccccatgaataagaccagcgccagcctctccctggattacctgctgcagggcacggatgtcgtcatcgccatcttcatcatcgtggccatgtccttcgtgccggccagcttcgttgtcttcctcgtggccgagaagtccaccaaggccaagcacctgcagtttgtcagcggctgcaaccccatcatctactggctggcgaactacgtgtgggacatgctcaactacctggtccccgctacctgctgtgtcatcatcctgtttgtgttcgacctgccggcctacacgtcgcccaccaacttccctgccgtcctctccctcttcctgctctatgggtggtccatcacgcccatcatgtacccggcctccttctggttcgaggtccccagctccgcctacgtgttcctcattgtcatcaatctcttcatcggcatcaccgccaccgtggccaccttcctgctacagctcttcgagcacgacaaggacctgaaggttgtcaacagttacctgaaaagctgcttcctcattttccccaactacaacctgggccacgggctcatggagatggcctacaacgagtacatcaacgagtactacgccaagattggccagtttgacaagatgaagtccccgttcgagtgggacattgtcacccgcggactggtggccatggcggttgagggcgtcgtgggcttcctcctgaccatcatgtgccagtacaacttcctgcggcggccacagcgcatgcctgtgtctaccaagcctgtggaggatgatgtggacgtggccagtgagcggcagcgagtgctccggggagacgccgacaatgacatggtcaagattgagaacctgaccaaggtctacaagtcccggaagattggccgtatcctggccgttgaccgcctgtgcctgggtgtgcgtcctggcgagtgcttcgggctcctgggcgtcaacggtgcgggcaagaccagcaccttcaagatgctgaccggcgacgagagcacgacggggggcgaggccttcgtcaatggacacagcgtgctgaaggagctgctccaggtgcagcagagcctcggctactgcccgcagtgtgacgcgctgttcgacgagctcacggcccgggagcacctgcagctgtacacgcggctgcgtgggatctcctggaaggacgaggcccgggtggtgaagtgggctctggagaagctggagctgaccaagtacgcagacaagccggctggcacctacagcggcggcaacaagcggaagctctccacggccatcgccctcattgggtacccagccttcatcttcctggacgagcccaccacaggcatggaccccaaggcccggcgcttcctctggaacctcatccttgacctcatcaagacagggcgttcagtggtgctgacatcacacagcatggaggagtgcgaggcgctgtgcacgcggctggccatcatggaacggtcgcctgcggtgcctgggcagcatccagcacctgaagaaccggtttggagatggctacatgatcacggtgcggaccaagagcagccagagtgtgaaggacgtggtgcggttcttcaaccgcaacttcccggaagccatgctcaaggagcggcaccacacaaaggtgcagtaccagctcaagtcggagcacatctcgctggcccaggtgttcagcaagatggagcaggtgtctggcgtgctgggcatcgaggactactcggtcagccagaccacactggacaatgtgttcgtgaactttgccaagaagcagagtgacaacctggagcagcaggagacggagccgccatccgcactgcagtcccctctcggctgcttgctcagcctgctccggccccggtctgcccccacggagctccgggcacttgtggcagacgagcccgaggacctggacacggaggacgagggcctcatcagcttcgaggaggagcgggcccagctgtccttcaacacggacacgctctgctgaccacccagagctgggccagggaggacacgctccactgaccacccagagctgggccagggactcaacaatggggacagaagtcccccagtgcctgccagggcctggagtggaggttcaggaccaaggggcttctggtcctccagcccctgtactcggccatgccctgtggtcactgcggttgccgcccctaattgtgccaaaggctgacccggcccgggctgcgtacacccttgccctgctttgccttaaagcctcggggtctgcccggcccctcgcccctgcctggcactgctcaccgcccaaggcgacgccggctggaccaggcactgctggcctttctcctgcccggcctcggaaccagcttttctctcttacgatgaaggctgatgccgagagcgggctgtgggcggagctgggtcagtcccgtatttattttgctttgagaagaggctcctctggccctgctctcctgcagggaggtggctgtcctgcgggaagccatcagcttgggccagctggcaggtggcaggaatggagaagctgaccctgctggccaggcaaggggccagaccccccccaacccccagctgccatcgctctcccacccagcttggccccctgcccgcccacctccctgggagccgggcctgtacatagcgcacagatgtttgttttaaataaataaacaaaatgtc

SEQ ID NO: 265700 - DNA, 7401 bp, Artificial Sequence
  derived and/or modified sequence
atgggcagaaagaccagcagagtgcagcagggcccccccagaagccccgcctgcagcgcccacggcgagagaagctggggcctggagttcccccccttcagatggctgctgggcatcgccggcagaacccacctggccgccctgccccccttccagtgggtgctggccttcgagatcttcatccccctggtgctgttcttcatcctgctgggcctgagacagaagaagcccaccatcagcgtgaaggaggtggccttctacaccgccgcccccctgaccagcgccggcatcctgcccgtgatgcagagcctgtgccccgacggccagagagacgagttcggcttcctgcagtacgccaacagcaccgtgacccagctgctggagagactggacagagtggtggaggagggcaacctgttcgaccccgccagacccagcctgggcagcgagctggaggccctgagacagcacctggaggccctgagcgccggccccggcaccagcggcagccacctggacagaagcaccgtgagcagcttcagcctggacagcgtggccagaaacccccaggagctgtggagattcctgacccagaacctgagcctgcccaacagcaccgcccaggccctgctggccgccagagtggacccccccgaggtgtaccacctgctgttcggccccagcagcgccctggacagccagagcggcctgcacaagggccaggagccctggagcagactgggcggcaaccccctgttcagaatggaggagctgctgctggcccccgccctgctggagcagctgacctgcacccccggcagcggcgagctgggcagaatcctgaccgtgcccgagagccagaagggcgccctgcagggctacagagacgccgtgtgcagcggccaggccgccgccagagccagaagattcagcggcctgagcgccgagctgagaaaccagctggacgtggccaaggtgagccagcagctgggcctggacgcccccaacggcagcgacagcagcccccaggcccccccccccagaagactgcaggccctgctgggcgacctgctggacgcccagaaggtgctgcaggacgtggacgtgctgagcgccctggccctgctgctgccccagggcgcctgcaccggcagaacccccggcccccccgccagcggcgccggcggcgccgccaacggcaccggcgccggcgccgtgatgggccccaacgccaccgccgaggagggcgcccccagcgccgccgccctggccacccccgacaccctgcagggccagtgcagcgccttcgtgcagctgtgggccggcctgcagcccatcctgtgcggcaacaacagaaccatcgagcccgaggccctgagaagaggcaacatgagcagcctgggcttcaccagcaaggagcagagaaacctgggcctgctggtgcacctgatgaccagcaaccccaagatcctgtacgcccccgccggcagcgaggtggacagagtgatcctgaaggccaacgagaccttcgccttcgtgggcaacgtgacccactacgcccaggtgtggctgaacatcagcgccgagatcagaagcttcctggagcagggcagactgcagcagcacctgagatggctgcagcagtacgtggccgagctgagactgcaccccgaggccctgaacctgagcctggacgagctgccccccgccctgagacaggacaacttcagcctgcccagcggcatggccctgctgcagcagctggacaccatcgacaacgccgcctgcggctggatccagttcatgagcaaggtgagcgtggacatcttcaagggcttccacgacgaggagagcatcgtgaactacaccctgaaccaggcctaccaggacaacgtgaccgtgttcgccagcgtgatcttccagaccagaaaggacggcagcctgcccccccacgtgcactacaagatcagacagaacagcagcttcaccgagaagaccaacgagatcagaagagcctactggagacccggccccaacaccggcggcagattctacttcctgtacggcttcgtgtggatccaggacatgatggagagagccatcatcgacaccttcgtgggccacgacgtggtggagcccggcagctacgtgcagatgttcccctacccctgctacaccagagacgacttcctgttcgtgatcgagcacatgatgcccctgtgcatggtgatcagctgggtgtacagcgtggccatgaccatccagcacatcgtggccgagaaggagcacagactgaaggaggtgatgaagaccatgggcctgaacaacgccgtgcactgggtggcctggttcatcaccggcttcgtgcagctgagcatcagcgtgaccgccctgaccgccatcctgaagtacggccaggtgctgatgcacagccacgtggtgatcatctggctgttcctggccgtgtacgccgtggccaccatcatgttctgcttcctggtgagcgtgctgtacagcaaggccaagctggccagcgcctgcggcggcatcatctacttcctgagctacgtgccctacatgtacgtggccatcagagaggaggtggcccacgacaagatcaccgccttcgagaagtgcatcgccagcctgatgagcaccaccgccttcggcctgggcagcaagtacttcgccctgtacgaggtggccggcgtgggcatccagtggcacaccttcagccagagccccgtggagggcgacgacttcaacctgctgctggccgtgaccatgctgatggtggacgccgtggtgtacggcatcctgacctggtacatcgaggccgtgcaccccggcatgtacggcctgcccagaccctggtacttccccctgcagaagagctactggctgggcagcggcagaaccgaggcctgggagtggagctggccctgggccagaacccccagactgagcgtgatggaggaggaccaggcctgcgccatggagagcagaagattcgaggagaccagaggcatggaggaggagcccacccacctgcccctggtggtgtgcgtggacaagctgaccaaggtgtacaaggacgacaagaagctggccctgaacaagctgagcctgaacctgtacgagaaccaggtggtgagcttcctgggccacaacggcgccggcaagaccaccaccatgagcatcctgaccggcctgttcccccccaccagcggcagcgccaccatctacggccacgacatcagaaccgagatggacgagatcagaaagaacctgggcatgtgcccccagcacaacgtgctgttcgacagactgaccgtggaggagcacctgtggttctacagcagactgaagagcatggcccaggaggagatcagaagagagatggacaagatgatcgaggacctggagctgagcaacaagagacacagcctggtgcagaccctgagcggcggcatgaagagaaagctgagcgtggccatcgccttcgtgggcggcagcagagccatcatcctggacgagcccaccgccggcgtggacccctacgccagaagagccatctgggacctgatcctgaagtacaagcccggcagaaccatcctgctgagcacccaccacatggacgaggccgacctgctgggcgacagaatcgccatcatcagccacggcaagctgaagtgctgcggcagccccctgttcctgaagggcacctacggcgacggctacagactgaccctggtgaagagacccgccgagcccggcggcccccaggagcccggcctggccagcagcccccccggcagagcccccctgagcagctgcagcgagctgcaggtgagccagttcatcagaaagcacgtggccagctgcctgctggtgagcgacaccagcaccgagctgagctacatcctgcccagcgaggccgccaagaagggcgccttcgagagactgttccagcacctggagagaagcctggacgccctgcacctgagcagcttcggcctgatggacaccaccctggaggaggtgttcctgaaggtgagcgaggaggaccagagcctggagaacagcgaggccgacgtgaaggagagcagaaaggacgtgctgcccggcgccgagggccccgccagcggcgagggccacgccggcaacctggccagatgcagcgagctgacccagagccaggccagcctgcagagcgccagcagcgtgggcagcgccagaggcgacgagggcgccggctacaccgacgtgtacggcgactacagacccctgttcgacaacccccaggaccccgacaacgtgagcctgcaggaggtggaggccgaggccctgagcagagtgggccagggcagcagaaagctggacggcggctggctgaaggtgagacagttccacggcctgctggtgaagagattccactgcgccagaagaaacagcaaggccctgttcagccagatcctgctgcccgccttcttcgtgtgcgtggccatgaccgtggccctgagcgtgcccgagatcggcgacctgccccccctggtgctgagccccagccagtaccacaactacacccagcccagaggcaacttcatcccctacgccaacgaggagagaagagagtacagactgagactgagccccgacgccagcccccagcagctggtgagcaccttcagactgcccagcggcgtgggcgccacctgcgtgctgaagagccccgccaacggcagcctgggccccaccctgaacctgagcagcggcgagagcagactgctggccgccagattcttcgacagcatgtgcctggagagcttcacccagggcctgcccctgagcaacttcgtgccccccccccccagccccgcccccagcgacagccccgccagccccgacgaggacctgcaggcctggaacgtgagcctgccccccaccgccggccccgagatgtggaccagcgcccccagcctgcccagactggtgagagagcccgtgagatgcacctgcagcgcccagggcaccggcttcagctgccccagcagcgtgggcggccaccccccccagatgagagtggtgaccggcgacatcctgaccgacatcaccggccacaacgtgagcgagtacctgctgttcaccagcgacagattcagactgcacagatacggcgccatcaccttcggcaacgtgctgaagagcatccccgccagcttcggcaccagagccccccccatggtgagaaagatcgccgtgagaagagccgcccaggtgttctacaacaacaagggctaccacagcatgcccacctacctgaacagcctgaacaacgccatcctgagagccaacctgcccaagagcaagggcaaccccgccgcctacggcatcaccgtgaccaaccaccccatgaacaagaccagcgccagcctgagcctggactacctgctgcagggcaccgacgtggtgatcgccatcttcatcatcgtggccatgagcttcgtgcccgccagcttcgtggtgttcctggtggccgagaagagcaccaaggccaagcacctgcagttcgtgagcggctgcaaccccatcatctactggctggccaactacgtgtgggacatgctgaactacctggtgcccgccacctgctgcgtgatcatcctgttcgtgttcgacctgcccgcctacaccagccccaccaacttccccgccgtgctgagcctgttcctgctgtacggctggagcatcacccccatcatgtaccccgccagcttctggttcgaggtgcccagcagcgcctacgtgttcctgatcgtgatcaacctgttcatcggcatcaccgccaccgtggccaccttcctgctgcagctgttcgagcacgacaaggacctgaaggtggtgaacagctacctgaagagctgcttcctgatcttccccaactacaacctgggccacggcctgatggagatggcctacaacgagtacatcaacgagtactacgccaagatcggccagttcgacaagatgaagagccccttcgagtgggacatcgtgaccagaggcctggtggccatggccgtggagggcgtggtgggcttcctgctgaccatcatgtgccagtacaacttcctgagaagaccccagagaatgcccgtgagcaccaagcccgtggaggacgacgtggacgtggccagcgagagacagagagtgctgagaggcgacgccgacaacgacatggtgaagatcgagaacctgaccaaggtgtacaagagcagaaagatcggcagaatcctggccgtggacagactgtgcctgggcgtgagacccggcgagtgcttcggcctgctgggcgtgaacggcgccggcaagaccagcaccttcaagatgctgaccggcgacgagagcaccaccggcggcgaggccttcgtgaacggccacagcgtgctgaaggagctgctgcaggtgcagcagagcctgggctactgcccccagtgcgacgccctgttcgacgagctgaccgccagagagcacctgcagctgtacaccagactgagaggcatcagctggaaggacgaggccagagtggtgaagtgggccctggagaagctggagctgaccaagtacgccgacaagcccgccggcacctacagcggcggcaacaagagaaagctgagcaccgccatcgccctgatcggctaccccgccttcatcttcctggacgagcccaccaccggcatggaccccaaggccagaagattcctgtggaacctgatcctggacctgatcaagaccggcagaagcgtggtgctgaccagccacagcatggaggagtgcgaggccctgtgcaccagactggccatcatggtgaacggcagactgagatgcctgggcagcatccagcacctgaagaacagattcggcgacggctacatgatcaccgtgagaaccaagagcagccagagcgtgaaggacgtggtgagattcttcaacagaaacttccccgaggccatgctgaaggagagacaccacaccaaggtgcagtaccagctgaagagcgagcacatcagcctggcccaggtgttcagcaagatggagcaggtgagcggcgtgctgggcatcgaggactacagcgtgagccagaccaccctggacaacgtgttcgtgaacttcgccaagaagcagagcgacaacctggagcagcaggagaccgagccccccagcgccctgcagagccccctgggctgcctgctgagcctgctgagacccagaagcgcccccaccgagctgagagccctggtggccgacgagcccgaggacctggacaccgaggacgagggcctgatcagcttcgaggaggagagagcccagctgagcttcaacaccgacaccctgtgctag

SEQ ID NO: 265701 - DNA, 591 bp, Artificial Sequence
  derived and/or modified sequence
atgctgaccggcgacgagagcaccaccggcggcgaggccttcgtgaacggccacagcgtgctgaaggagctgctgcaggtgcagcagagcctgggctactgcccccagtgcgacgccctgttcgacgagctgaccgccagagagcacctgcagctgtacaccagactgagaggcatcagctggaaggacgaggccagagtggtgaagtgggccctggagaagctggagctgaccaagtacgccgacaagcccgccggcacctacagcggcggcaacaagagaaagctgagcaccgccatcgccctgatcggctaccccgccttcatcttcctggacgagcccaccaccggcatggaccccaaggccagaagattcctgtggaacctgatcctggacctgatcaagaccggcagaagcgtggtgctgaccagccacagcatggaggagtgcgaggccctgtgcaccagactggccatcatggagagaagccccgccgtgcccggccagcaccccgcccccgaggagcccgtgtggagatggctgcacgaccacggcgccgaccaggagcagcccgagtgcgagggcagatag

SEQ ID NO: 265702 - protein, 671 aa, Artificial Sequence
  derived and/or modified sequence
MADPAAGPPPSEGEESTVRFARKGALRQKNVHEVKNHKFTARFFKQPTFCSHCTDFIWGFGKQGFQCQVCCFVVHKRCHEFVTFSCPGADKGPASDDPRSKHKFKIHTYSSPTFCDHCGSLLYGLIHQGMKCDTCMMNVHKRCVMNVPSLCGTDHTERRGRIYIQAHIDRDVLIVLVRDAKNLVPMDPNGLSDPYVKLKLIPDPKSESKQKTKTIKCSLNPEWNETFRFQLKESDKDRRLSVEIWDWDLTSRNDFMGSLSFGISELQKASVDGWFKLLSQEEGEYFNVPVPPEGSEANEELRQKFERAKISQGTKVPEEKTTNTVSKFDNNGNRDRMKLTDFNFLMVLGKGSFGKVMLSERKGTDELYAVKILKKDVVIQDDDVECTMVEKRVLALPGKPPFLTQLHSCFQTMDRLYFVMEYVNGGDLMYHIQQVGRFKEPHAVFYAAEIAIGLFFLQSKGIIYRDLKLDNVMLDSEGHIKIADFGMCKENIWDGVTTKTFCGTPDYIAPEIIAYQPYGKSVDWWAFGVLLYEMLAGQAPFEGEDEDELFQSIMEHNVAYPKSMSKEAVAICKGLMTKHPGKRLGCGPEGERDIKEHAFFRYIDWEKLERKEIQPPYKPKARDKRDTSNFDKEFTRQPVELTPTDKLFIMNLDQNEFAGFSYTNPEFVINV

SEQ ID NO: 265703 - DNA, 2016 bp, Artificial Sequence
  derived and/or modified sequence
atggccgaccccgccgccggccccccccccagcgagggcgaggagagcaccgtgagattcgccagaaagggcgccctgagacagaagaacgtgcacgaggtgaagaaccacaagttcaccgccagattcttcaagcagcccaccttctgcagccactgcaccgacttcatctggggcttcggcaagcagggcttccagtgccaggtgtgctgcttcgtggtgcacaagagatgccacgagttcgtgaccttcagctgccccggcgccgacaagggccccgccagcgacgaccccagaagcaagcacaagttcaagatccacacctacagcagccccaccttctgcgaccactgcggcagcctgctgtacggcctgatccaccagggcatgaagtgcgacacctgcatgatgaacgtgcacaagagatgcgtgatgaacgtgcccagcctgtgcggcaccgaccacaccgagagaagaggcagaatctacatccaggcccacatcgacagagacgtgctgatcgtgctggtgagagacgccaagaacctggtgcccatggaccccaacggcctgagcgacccctacgtgaagctgaagctgatccccgaccccaagagcgagagcaagcagaagaccaagaccatcaagtgcagcctgaaccccgagtggaacgagaccttcagattccagctgaaggagagcgacaaggacagaagactgagcgtggagatctgggactgggacctgaccagcagaaacgacttcatgggcagcctgagcttcggcatcagcgagctgcagaaggccagcgtggacggctggttcaagctgctgagccaggaggagggcgagtacttcaacgtgcccgtgccccccgagggcagcgaggccaacgaggagctgagacagaagttcgagagagccaagatcagccagggcaccaaggtgcccgaggagaagaccaccaacaccgtgagcaagttcgacaacaacggcaacagagacagaatgaagctgaccgacttcaacttcctgatggtgctgggcaagggcagcttcggcaaggtgatgctgagcgagagaaagggcaccgacgagctgtacgccgtgaagatcctgaagaaggacgtggtgatccaggacgacgacgtggagtgcaccatggtggagaagagagtgctggccctgcccggcaagccccccttcctgacccagctgcacagctgcttccagaccatggacagactgtacttcgtgatggagtacgtgaacggcggcgacctgatgtaccacatccagcaggtgggcagattcaaggagccccacgccgtgttctacgccgccgagatcgccatcggcctgttcttcctgcagagcaagggcatcatctacagagacctgaagctggacaacgtgatgctggacagcgagggccacatcaagatcgccgacttcggcatgtgcaaggagaacatctgggacggcgtgaccaccaagaccttctgcggcacccccgactacatcgcccccgagatcatcgcctaccagccctacggcaagagcgtggactggtgggccttcggcgtgctgctgtacgagatgctggccggccaggcccccttcgagggcgaggacgaggacgagctgttccagagcatcatggagcacaacgtggcctaccccaagagcatgagcaaggaggccgtggccatctgcaagggcctgatgaccaagcaccccggcaagagactgggctgcggccccgagggcgagagagacatcaaggagcacgccttcttcagatacatcgactgggagaagctggagagaaaggagatccagcccccctacaagcccaaggccagagacaagagagacaccagcaacttcgacaaggagttcaccagacagcccgtggagctgacccccaccgacaagctgttcatcatgaacctggaccagaacgagttcgccggcttcagctacaccaaccccgagttcgtgatcaacgtgtag

SEQ ID NO: 265704 - DNA, 2016 bp, Artificial Sequence
  derived and/or modified sequence
atggcagatccggccgccggccccccgcccagtgagggtgaggaatccacagtcaggtttgctcggaagggtgccctcaggcagaaaaacgtccatgaggtaaagaaccataagttcaccgccaggtttttcaaacaaccaaccttctgttctcactgtactgacttcatctgggggttcggcaaacagggattccagtgccaggtctgctgctttgtggttcataagcgctgtcacgagttcgtgacattctcttgtccaggggcagacaagggacccgccagtgatgaccctcggagcaagcacaagttcaaaatccatacatatagctctcccactttttgtgatcactgtgggagcttattatatgggctcatccaccaaggtatgaaatgcgacacatgcatgatgaatgtgcacaaacggtgcgtgatgaatgtgccctctctgtgcggcactgatcatacagagcgacgcgggaggatctatattcaagcacatatagatagggacgtgctcatagtgctcgtacgcgatgccaaaaacctcgttccaatggatcccaatgggctgtccgatccatacgtcaaactgaagttaattcccgatccaaaatcagaaagcaagcaaaaaaccaagactattaagtgctcactgaacccagaatggaatgagaccttcagatttcagctcaaggaatccgacaaggatcgacgcctctccgtcgagatttgggattgggatcttacatcccgcaatgactttatggggtctttatcattcgggatcagcgagctacagaaggcatcagtggacggatggttcaaactcctgagtcaggaagagggggaatacttcaacgtgcccgtccctccagaaggctccgaggccaatgaggaactgcgccagaaatttgaacgagctaagatctcccagggcaccaaagtgccggaggaaaaaacaactaatactgtctccaaattcgacaataacgggaaccgcgacagaatgaaactcacggatttcaactttttgatggtcctcggtaaaggcagtttcggtaaggtcatgctctcagaacggaagggaaccgacgaactgtacgcggtgaaaatcctgaaaaaggatgttgtgatccaggacgacgacgtcgagtgcactatggtcgaaaagagagtacttgctctgcctggaaagcccccatttctcacgcaactccacagctgttttcagacgatggatcgtctgtacttcgtgatggagtacgtcaacggcggggatttaatgtatcatatccagcaggtggggcgttttaaggaaccacacgcggttttttacgctgccgagattgcaatagggctatttttcttacagtctaaaggaattatctatcgagatctgaaactggacaacgtgatgctcgactcagaaggtcatattaagatcgcagacttcggtatgtgcaaggagaacatttgggatggtgtaacaacaaagacgttttgcgggacacctgattatatcgcaccagaaattatagcctatcagccttatggtaaatctgtggactggtgggcatttggcgtgctcctttatgaaatgctagcggggcaggctccatttgagggtgaggacgaagatgagttattccagagcattatggagcataacgtcgcataccctaagagtatgtccaaggaggccgtcgccatatgcaaggggctgatgacaaagcacccaggaaagaggcttggatgcgggcccgagggtgaaagggacataaaagaacacgcgttttttcgctacatcgactgggagaaattggagagaaaagagatccagccaccatataaacctaaggccagagacaaacgcgacacaagcaatttcgacaaggagtttaccaggcagcccgtcgagctcactcccacggacaaattattcattatgaacctggaccagaatgagtttgctggctttagttataccaaccccgaattcgtaatcaatgtatag

SEQ ID NO: 265705 - DNA, 2016 bp, Artificial Sequence
  derived and/or modified sequence
atggctgaccctgctgctggccccccaccttctgagggggaggagagcacagtgcgctttgccaggaaaggagccctgcggcagaagaatgtgcatgaggtgaagaaccacaagttcaccgcccgcttcttcaagcagcccaccttctgcagccactgcacagacttcatctggggctttgggaagcagggcttccagtgccaggtgtgctgctttgtggtgcacaagcgctgccatgaatttgtgaccttcagctgccctggagctgacaagggccctgccagtgatgaccccaggagcaagcacaagttcaagatccacacctacagcagccccaccttctgtgaccactgcggcagcctgctgtatggcctcatccaccagggcatgaagtgtgacacctgcatgatgaatgtgcacaagagatgtgtgatgaatgtgcccagcctgtgtggcacagaccacacagagcggcggggccgcatctacatccaggcccacatcgacagagatgtgctgattgtgctggtgagagatgccaagaacctggtgcccatggaccccaacggcctgagtgacccctacgtgaagctgaagctgatcccagaccccaagtctgagagcaagcagaagaccaagaccatcaagtgcagcctgaaccctgagtggaatgagaccttccgcttccagctgaaggagagtgacaaggaccggcggctgtctgtggagatctgggactgggacctgaccagcagaaatgacttcatgggcagcctgagctttggcatcagcgagctgcagaaggcctctgtggatggctggttcaagctgctgagccaggaggagggggagtacttcaacgtgcctgtgcccccagagggcagcgaggccaatgaggagctgcggcagaagtttgagcgggccaagatcagccagggcaccaaggtgcctgaggagaagaccaccaacacagtgtccaagtttgacaacaatggaaacagagacaggatgaagctgacagacttcaacttcctgatggtgctgggcaagggcagctttgggaaggtgatgctgtctgagaggaagggcacagatgagctgtatgctgtgaagatcctgaagaaggatgtggtgatccaggatgatgatgtggagtgcaccatggtggagaagagggtgctggccctgcccgggaagccacccttcctgacccagctgcacagctgcttccagaccatggaccggctgtactttgtgatggagtatgtgaatggaggagacctgatgtaccacatccagcaggtgggccgcttcaaggagccccatgctgtgttctatgctgctgagatcgccatcggcctcttcttcctgcagagcaagggcatcatctacagagacctgaagctggacaacgtgatgctggacagcgagggccacatcaagattgctgactttggcatgtgcaaggagaacatctgggatggagtgaccaccaagaccttctgtggcaccccagactacatcgcccctgagatcatcgcctaccagccctacggcaagtctgtggactggtgggcctttggagtgctgctgtatgagatgctggccggccaggccccctttgaaggagaagatgaagatgagctgttccagagcatcatggagcacaacgtggcctaccccaagtccatgagcaaggaggccgtggccatctgcaagggcctgatgaccaagcaccctgggaagaggctgggctgcggccctgagggggagcgggacatcaaggagcacgccttcttccgctacatcgactgggagaagctggagaggaaggagatccagcccccctacaagcccaaggcccgggacaagagggacaccagcaactttgacaaggagttcacccggcagcctgtggagctgacccccacagacaagctgttcatcatgaacctggaccagaatgaatttgctggcttctcctacaccaaccctgagtttgtgatcaacgtgtag

SEQ ID NO: 265706 - DNA, 2016 bp, Artificial Sequence
  derived and/or modified sequence
atggccgaccccgccgccggccccccccccagcgagggcgaggagtccacggttcgcttcgccaggaagggagccctgagacagaaaaacgtgcacgaggtgaaaaatcacaaatttactgctaggtttttcaaacaaccaaccttttgcagccactgtacagactttatatgggggtttggtaagcagggctttcagtgtcaggtatgttgcttcgtagtgcataaacggtgccatgagtttgtgacgttcagctgtccaggcgctgacaaaggacccgctagtgatgacccccgctctaagcacaagttcaagatccacacttactccagtccaactttctgcgaccactgcggcagcctactatacgggctgattcatcaggggatgaaatgtgacacatgtatgatgaacgtgcacaagcgctgcgtaatgaacgtacccagtttgtgtgggacggatcatacggagagaagagggagaatttacattcaggcccatattgatagggatgtgttgatcgtgttagtgagggatgcaaaaaaccttgtgcccatggaccccaatggcctctccgacccatacgtaaaattgaagctaatcccagatcccaaatccgagagcaaacagaaaactaagacgatcaagtgttcattaaacccagagtggaatgaaactttccgcttccaactgaaagagagcgacaaggacagacggctatcagtggagatctgggactgggatctgacgtcaaggaacgactttatggggagcctgtctttcggcattagcgaactgcagaaggcaagtgtcgatggatggttcaagctcctcagccaggaggagggcgagtatttcaacgtgccagtccctccagaagggagcgaagccaacgaggaactcagacagaaattcgagagagccaagatctcccagggcaccaaagtgcctgaagagaagacaaccaacacagtgtcgaagttcgacaataacggaaatcgcgatcgaatgaagttgaccgactttaactttttaatggtcttgggtaaaggatcattcggtaaggttatgctctcagaacggaagggaacagatgaactgtatgccgttaagatcctcaagaaagatgtggtgattcaagatgatgacgttgagtgtacgatggtggagaagagagtgctggccctgccgggaaagcctcctttcctcacccagctccactcctgctttcaaaccatggaccgactctatttcgttatggagtatgtgaatgggggggatctcatgtaccatatccaacaggttgggcggtttaaggagcctcatgccgtgttttacgctgccgaaattgccatcggcctgtttttcttacagagtaagggcatcatctaccgcgatttgaagctggacaatgtgatgttagactccgaaggacacatcaaaatagctgattttggaatgtgcaaggaaaacatttgggatggggtcaccactaagactttttgtggcactcctgactacattgccccagagattatcgcctaccaaccatatggcaagagcgtagattggtgggcgttcggcgtacttctgtatgagatgctggccggacaggctcccttcgagggcgaggacgaggacgagctgtttcagtctattatggaacacaatgtggcgtacccaaagagcatgtctaaagaagctgttgccatctgtaaaggccttatgacaaagcaccctggaaaaaggctgggctgtggtcctgagggggagcgtgatatcaaagaacatgccttctttaggtacatcgactgggagaaattggaaaggaaagagatccagcccccctacaagcccaaagcgcgagacaaacgggatacctctaattttgacaaagagtttactcggcagcccgtggagctgacacccacagacaagctgtttatcatgaatcttgaccagaacgagttcgccgggttctcctacaccaaccccgagttcgttattaatgtctag

SEQ ID NO: 265707 - DNA, 2016 bp, Artificial Sequence
  derived and/or modified sequence
atggccgaccccgctgccggacctccaccttctgaaggggaagaatccaccgttcggttcgcccgaaagggtgccctccgccaaaaaaatgtgcacgaggtgaaaaatcataagtttactgccaggttctttaagcagcccacattctgttcccactgtacggacttcatttggggcttcgggaagcaggggtttcagtgtcaagtgtgttgctttgtcgttcacaagcgatgtcacgagtttgtgacgttttcgtgtcctggggctgataagggaccggcttctgacgaccccagatctaaacataagtttaagatacacacgtacagctcccccacattttgcgaccactgtgggagcctgctgtacgggctcattcaccagggtatgaagtgtgatacctgtatgatgaacgttcacaagcgctgcgtgatgaatgttccgagtctctgtggaactgatcacaccgagcggagagggaggatttacatccaggcccacatcgacagagacgttctgatcgttctagtaagggacgctaaaaacttagtgcctatggatccaaatggtcttagtgacccctacgtgaagctcaagctgattcccgaccctaaatctgagagcaagcagaagaccaaaacgatcaaatgcagtctcaacccggagtggaatgaaactttcagatttcagctcaaggaaagtgacaaggataggcggctttctgtggaaatatgggactgggatctgactagccggaatgacttcatggggagcctatcatttggaatatctgagctgcagaaggcatccgtggatggatggttcaaacttctgtcacaggaagaaggcgagtacttcaacgtgcccgtgcctccagaaggatctgaagctaatgaggagctgcggcagaagttcgagcgcgctaagatctctcagggtacaaaggttcccgaggagaagaccaccaacacggtatctaagtttgataacaatggcaacagagatagaatgaaattgacagacttcaactttctaatggtcctaggcaaggggagctttgggaaggttatgctttctgagcgaaagggcactgacgagctgtacgctgtgaagatcctgaaaaaagatgtcgtcattcaggatgacgacgtcgagtgcacgatggtggaaaagagagtgcttgcattgcccggaaagcctccattcctgacacagctccatagttgtttccagacaatggaccggttatattttgtgatggagtacgtgaacggtggagacctgatgtatcacatccagcaagtgggacgattcaaggaacctcatgctgtgttttatgccgctgaaattgcgatcggactcttctttctgcagagcaaaggaatcatctatcgggatctgaaattggataacgtaatgctggattccgaaggtcatattaagatcgcagatttcggcatgtgcaaggagaacatctgggacggcgtgactacaaagactttttgcggcactccagattatatcgcacctgagatcatagcctaccagccctacggtaaatcagtggactggtgggcatttggagtactgctgtacgagatgttagctggccaggccccatttgagggggaggatgaggacgagcttttccagagtattatggagcataacgtggcttacccgaaaagtatgagtaaggaggctgtcgcgatctgtaaagggttgatgacaaagcatcctggcaagcggctcggctgtggcccagagggtgagcgggatattaaagagcacgcatttttccggtatattgactgggaaaaattagaaagaaaggaaatacagccaccctacaagccaaaagctcgtgacaaaagggatacaagtaatttcgacaaagaattcacccgccagccggtggagctcacacccacggataagctttttattatgaacctagaccagaacgaattcgcaggatttagttataccaaccccgagttcgtgatcaacgtgtag

SEQ ID NO: 265708 - DNA, 2689 bp, Artificial Sequence
  derived and/or modified sequence
gggcgagtgacagccccggctccgcgcgccgcggccgccagagccggcgcaggggaagcgcccgcggccccgggtgcagcagcggccgccgcctcccgcgcctccccggcccgcagcccgcggtcccgcggccccggggccggcacctctcgggctccggctccccgcgcgcaagatggctgacccggctgcggggccgccgccgagcgagggcgaggagagcaccgtgcgcttcgcccgcaaaggcgccctccggcagaagaacgtgcatgaggtcaagaaccacaaattcaccgcccgcttcttcaagcagcccaccttctgcagccactgcaccgacttcatctggggcttcgggaagcagggattccagtgccaagtttgctgctttgtggtgcacaagcggtgccatgaatttgtcacattctcctgccctggcgctgacaagggtccagcctccgatgacccccgcagcaaacacaagtttaagatccacacgtactccagccccacgttttgtgaccactgtgggtcactgctgtatggactcatccaccaggggatgaaatgtgacacctgcatgatgaatgtgcacaagcgctgcgtgatgaatgttcccagcctgtgtggcacggaccacacggagcgccgcggccgcatctacatccaggcccacatcgacagggacgtcctcattgtcctcgtaagagatgctaaaaaccttgtacctatggaccccaatggcctgtcagatccctacgtaaaactgaaactgattcccgatcccaaaagtgagagcaaacagaagaccaaaaccatcaaatgctccctcaaccctgagtggaatgagacatttagatttcagctgaaagaatcggacaaagacagaagactgtcagtagagatttgggattgggatttgaccagcaggaatgacttcatgggatctttgtcctttgggatttctgaacttcagaaagccagtgttgatggctggtttaagttactgagccaggaggaaggcgagtacttcaatgtgcctgtgccaccagaaggaagtgaggccaatgaagaactgcggcagaaatttgagagggccaagatcagtcagggaaccaaggtcccggaagaaaagacgaccaacactgtctccaaatttgacaacaatggcaacagagaccggatgaaactgaccgattttaacttcctaatggtgctggggaaaggcagctttggcaaggtcatgctttcagaacgaaaaggcacagatgagctctatgctgtgaagatcctgaagaaggacgttgtgatccaagatgatgacgtggagtgcactatggtggagaagcgggtgttggccctgcctgggaagccgcccttcctgacccagctccactcctgcttccagaccatggaccgcctgtactttgtgatggagtacgtgaatgggggcgacctcatgtatcacatccagcaagtcggccggttcaaggagccccatgctgtattttacgctgcagaaattgccatcggtctgttcttcttacagagtaagggcatcatttaccgtgacctaaaacttgacaacgtgatgctcgattctgagggacacatcaagattgccgattttggcatgtgtaaggaaaacatctgggatggggtgacaaccaagacattctgtggcactccagactacatcgcccccgagataattgcttatcagccctatgggaagtccgtggattggtgggcatttggagtcctgctgtatgaaatgttggctgggcaggcaccctttgaaggggaggatgaagatgaactcttccaatccatcatggaacacaacgtagcctatcccaagtctatgtccaaggaagctgtggccatctgcaaagggctgatgaccaaacacccaggcaaacgtctgggttgtggacctgaaggcgaacgtgatatcaaagagcatgcatttttccggtatattgattgggagaaacttgaacgcaaagagatccagcccccttataagccaaaagctagagacaagagagacacctccaacttcgacaaagagttcaccagacagcctgtggaactgacccccactgataaactcttcatcatgaacttggaccaaaatgaatttgctggcttctcttatactaacccagagtttgtcattaatgtgtaggtgaatgcaaactccatcgttgagcctggggtgtaagacttcaagccaagcgtatgtatcaattctagtcttccaggattcacggtgcacatgctggcattcaacatgtggaaagcttgtcttagagggcttttctttgtatgtgtagcttgctagtttgttttctacatttgaaaatgtttagtttagaataagcgcattatccaattatagaggtacaattttccaaacttccagaaactcatcaaatgaacagacaatgtcaaaactactgtgtctgataccaaaatgcttcagtatttgtaatttttcaagtcagaagctgatgttcctggtaaaagtttttacagttattctataatatcttctttgaatgctaagcatgagcgatatttttaaaaattgtgagtaagctttgcagttactgtgaactattgtctcttggaggaagttttttgtttaagaattgatatgattaaactgaattaatatatgcaa

SEQ ID NO: 265709 - protein, 77 aa, Artificial Sequence
  derived and/or modified sequence
MAPFLRIAFNSYELGSLQAEDEANQPFCAVKMKEALSTERGKTLVQKKPTMYPEWKSTFDAHIYEGRVIQIVLMRAA

SEQ ID NO: 265710 - protein, 125 aa, Artificial Sequence
  derived and/or modified sequence
MAPFLRIAFNSYELGSLQAEDEANQPFCAVKMKEALSTERGKTLVQKKPTMYPEWKSTFDAHIYEGRVIQIVLMRAAEEPVSEVTVGVSVLAERCKKNNGKAEFWLDLQPQAKVLMSVQYFLEDV

SEQ ID NO: 265711 - DNA, 2031 bp, Artificial Sequence
  derived and/or modified sequence
atggccccctttctcagaatcgcatttaactcgtacgagctgggttccctccaggccgaggatgaagcaaatcagccgttttgtgctgtgaagatgaaagaagcactgtcaaccgagcgggggaagaccctagttcagaagaagcctacaatgtatcccgagtggaaatctactttcgacgcacacatctacgaaggacgggtcatccagatcgtgctgatgagggcagccgaggagcctgtttccgaagtgacggtcggcgtgagcgttctggcagagagatgtaaaaagaacaacggcaaagccgagttctggctcgacctacagccacaggccaaggtcctaatgagcgtccagtacttcctggaagatgtggattgcaaacaatccatgagaagtgaggacgaagccaagttccctacaatgaacaggcgcggcgccatcaagcaagctaagattcactatatcaagaatcatgaatttatcgccaccttcttcggacagccaacattctgttcagtgtgcaaggactttgtttggggcttaaataaacaagggtacaaatgccgtcagtgcaatgcagcaattcacaagaagtgtatagacaagatcatcggtcgatgcaccggtaccgctgctaactcgagggatacaatattccaaaaagagcggtttaatatagacatgccccacaggttcaaagttcacaactacatgtcccctaccttctgtgaccattgcggtagcctcctgtggggcctcgtgaagcagggacttaagtgtgaggactgcggaatgaacgttcaccacaagtgtagagagaaagttgccaatctctgcgggatcaaccagaagctgcttgcagaggcgctcaatcaagtgactcagagagcatccagaagatcagacagtgcctcaagtgagccggtgggcatctaccagggatttgaaaaaaagacaggagtcgcgggagaggatatgcaggataactccggaacctatggaaagatttgggagggcagctccaagtgtaacatcaataacttcattttccataaggtgcttggtaaaggctcctttgggaaagtgctcttgggggaactcaagggtcggggcgaatacttcgccattaaggcactcaagaaggatgtagtgttgattgacgatgacgtagaatgcacaatggtggagaagcgcgtccttacattggccgccgagaaccccttcctgacacacctcatctgcactttccagaccaaggatcacctcttcttcgtgatggagttcttaaacggaggagatctcatgtaccatatccaggataagggccgattcgaactgtacagagccaccttctacgccgcggagattatgtgtgggctccagtttctgcatagtaaaggcataatctatagagacctgaaacttgataatgtactgctggatcgcgatggacatatcaaaatcgctgactttgggatgtgcaaggagaatatcttcggcgagtctcgagctagcacgttttgtggaacccctgactatattgcaccagagatactgcagggcttaaaatacaccttcagtgtggactggtggagcttcggcgtcttactttacgagatgcttatcgggcagagcccctttcacggcgatgacgaggacgagctgtttgagagcatcagagtggacactccacactaccccaggtggatcaccaaagaatctaaggacatacttgagaaactgtttgagcgcgaacccactaagagactgggcgtaaccgggaatatcaaaatacatcctttctttaagaccatcaattggacactcttagagaagagaaggctggaaccgccctttcggcccaaggttaaatctcccagggattattccaattttgatcaggaattcctgaacgagaaagctcgcctgagctactctgataagaacctcattgacagtatggaccagtcagcgttcgccggtttctctttcgttaacccaaaattcgaacatttactggaggattag

SEQ ID NO: 265712 - DNA, 2031 bp, Artificial Sequence
  derived and/or modified sequence
atggccccttttttgcgaattgcctttaatagttatgaactggggagcctgcaggccgaagacgaagccaaccagcctttttgcgctgtgaaaatgaaggaagccctgagtaccgagcgcgggaagaccctggtccagaaaaagcccaccatgtacccagaatggaaatcgaccttcgatgcccatatctatgaagggcgtgtcatccaaatcgtacttatgcgagccgctgaggaaccagttagtgaggtgactgtaggggtttccgtgctcgccgagcggtgtaagaaaaacaacggcaaagccgagttttggctggacctccaaccccaggcaaaggtattgatgagcgtgcagtacttcctggaggatgtggactgcaagcaaagcatgcggagcgaagatgaggctaagttcccgaccatgaacagacgcggtgccatcaagcaggccaaaattcactacattaagaatcacgaatttatcgcgaccttctttggccagcctactttctgtagcgtatgtaaagacttcgtttggggcctgaataagcagggatacaaatgtaggcagtgcaacgcagctatccacaaaaagtgtattgataaaatcattgggaggtgcactggaacagctgctaatagtagagataccatattccaaaaggagaggttcaacattgatatgcctcacaggtttaaagtgcacaattacatgagccctacattctgcgatcattgcgggagcttactttggggcctggtcaagcaaggtctgaagtgtgaggactgcggcatgaacgtgcatcacaagtgccgggagaaagtggccaacctctgcgggataaaccagaaactcctggcagaggcgctgaaccaggtgacacagcgggcttcacggagatcagactccgcctcgtccgagcccgtgggaatttaccaggggttcgagaaaaaaacaggtgtggcaggagaggatatgcaggacaattctgggacttacggaaagatctgggagggctccagtaaatgtaatattaacaacttcatcttccataaagtgttgggtaagggatcattcggtaaggtcttacttggagaactgaagggtcggggagaatactttgctattaaggcgctgaaaaaggacgtggtgcttattgatgacgacgtcgagtgtacaatggtggagaagcgtgtgttgacactggccgccgagaatccgttcctcacacacctcatttgtacatttcagactaaggaccaccttttttttgtgatggaattcctcaacggcggcgacctcatgtaccatatccaggacaagggacgattcgaattatatcgagccaccttttacgccgctgagattatgtgcggactgcagtttctacacagtaagggtatcatctaccgtgatctgaagttagacaatgtgttgcttgaccgagacggccacattaaaatagccgatttcggcatgtgtaaagagaacatttttggcgagtcccgagcttctaccttttgtggcacacccgattatatcgcccccgagatcctgcaaggccttaagtacacattctccgtagactggtggagctttggcgtgctgctttacgagatgttgatcgggcagtccccgttccacggtgacgatgaagatgaactgttcgaatccataagagttgacaccccccactatccaaggtggatcaccaaggagagcaaggatattcttgagaagctcttcgaacgggaacccacaaaacgcctgggggtgaccggcaatataaaaatccaccccttttttaaaacgataaattggacactgctggaaaagagaaggctggaaccacccttcaggccgaaagtgaagagtcccagggactactcaaattttgatcaagagtttctgaacgagaaggctcgcctcagctactccgataagaatcttatcgattcgatggatcagagtgcattcgccgggttttcctttgttaatcccaaatttgagcacctgttagaggattag

SEQ ID NO: 265713 - DNA, 234 bp, Artificial Sequence
  derived and/or modified sequence
atggctccatttctcagaatagcttttaactcctacgaactaggaagtctacaggctgaagatgaggccaaccagcccttctgtgctgtaaagatgaaagaggctttgagcacagagagaggtaaaacactggtgcagaagaaacctaccatgtaccccgagtggaagtccacatttgacgcccatatatacgaaggcagagtaatacagattgtcctcatgagggctgcctag

SEQ ID NO: 265714 - DNA, 378 bp, Artificial Sequence
  derived and/or modified sequence
atggcccccttcctgcggatcgcctttaattcttatgaattgggatcccttcaggcagaggacgaagccaatcagccattttgcgccgtaaagatgaaagaggccctatccaccgaacgcggcaagactctagtgcagaaaaaacctaccatgtatcctgagtggaagtccacctttgatgcccacatctacgagggccgagtgatccagatcgtgctgatgagggctgccgaagagccagtgagtgaggtcaccgtgggcgtctccgtattggctgaacgttgcaagaaaaacaatggcaaggccgagttttggctggaccttcagcctcaggctaaagttctcatgtctgtgcagtacttcttggaagacgtgtag

SEQ ID NO: 265715 - DNA, 2031 bp, Artificial Sequence
  derived and/or modified sequence
atggcccccttcctgagaattgccttcaacagctatgagctgggcagcctgcaggccgaggatgaggccaaccagcccttctgtgctgtgaagatgaaggaggccctgagcacagagcggggcaagaccctggtgcagaagaagcccaccatgtacccagagtggaagagcacctttgatgcccacatctatgagggccgggtcatccagatcgtgctgatgagagctgctgaggagcctgtgtctgaggtgacagtgggcgtgtctgtgctggccgagcgctgcaagaagaacaacgggaaggccgagttctggctggacctgcagccccaggccaaggtgctgatgtctgtgcagtacttcctggaggatgtggactgcaagcagagcatgagaagtgaagatgaggccaagttccccaccatgaacagaagaggagccatcaagcaggccaagatccactacatcaagaaccacgagttcatcgccaccttcttcggccagcccaccttctgcagcgtgtgcaaggactttgtgtggggcctgaacaagcagggctacaagtgccggcagtgcaatgctgccatccacaagaagtgcatcgacaagatcatcggccgctgcacaggaacagctgccaacagccgggacaccatcttccagaaggagcgcttcaacatcgacatgccccaccgcttcaaggtgcacaactacatgagccccaccttctgtgaccactgcggcagcctgctgtggggcctggtgaagcagggcctgaagtgtgaggactgtggcatgaatgtgcaccacaagtgccgggagaaggtggccaacctgtgtggcatcaaccagaagctgctggccgaggccctgaaccaggtgacccagagggccagccgccgcagtgacagcgccagcagcgagcctgtgggcatctaccagggctttgagaagaagacaggagtggccggggaggacatgcaggacaacagcggcacctacggcaagatctgggagggcagcagcaagtgcaacatcaacaacttcatcttccacaaggtgctgggcaagggcagctttgggaaggtgctgctgggggagctgaagggccgcggggagtactttgccatcaaggccctgaagaaggatgtggtgctgattgatgatgatgtggagtgcaccatggtggagaagagggtgctgaccctggccgctgagaaccccttcctgacccacctgatctgcaccttccagaccaaggaccacctgttctttgtgatggagttcctgaatggaggagacctgatgtaccacatccaggacaagggccgctttgagctgtaccgggccaccttctacgccgctgagatcatgtgtggcctgcagttcctgcacagcaagggcatcatctacagagacctgaagctggacaacgtgctgctggacagagatggccacatcaagattgctgactttggcatgtgcaaggagaacatctttggagagagccgggccagcaccttctgtggcaccccagactacatcgcccctgagatcctgcagggcctgaagtacaccttctctgtggactggtggagctttggagtgctgctgtatgagatgctgattggccagagccccttccatggagatgatgaagatgagctgtttgagagcatccgggtggacaccccccactacccccgctggatcaccaaggagagcaaggacatcctggagaagctgtttgagcgggagcccaccaagaggctgggcgtgacaggcaacatcaagatccaccccttcttcaagaccatcaactggaccctgctggagaagaggcggctggagccccccttccggcccaaggtgaagagcccccgggactacagcaactttgaccaggagttcctgaatgagaaggcccggctgagctacagcgacaagaacctgattgacagcatggaccagagcgcctttgctggcttctcctttgtgaaccccaagtttgagcacctgctggaggactag

SEQ ID NO: 265716 - DNA, 234 bp, Artificial Sequence
  derived and/or modified sequence
atggcccccttcctgagaattgccttcaacagctatgagctgggcagcctgcaggccgaggatgaggccaaccagcccttctgtgctgtgaagatgaaggaggccctgagcacagagcggggcaagaccctggtgcagaagaagcccaccatgtacccagagtggaagagcacctttgatgcccacatctatgagggccgggtcatccagatcgtgctgatgagagctgcctag

SEQ ID NO: 265717 - DNA, 378 bp, Artificial Sequence
  derived and/or modified sequence
atggcccccttcctgagaattgccttcaacagctatgagctgggcagcctgcaggccgaggatgaggccaaccagcccttctgtgctgtgaagatgaaggaggccctgagcacagagcggggcaagaccctggtgcagaagaagcccaccatgtacccagagtggaagagcacctttgatgcccacatctatgagggccgggtcatccagatcgtgctgatgagagctgctgaggagcctgtgtctgaggtgacagtgggcgtgtctgtgctggccgagcgctgcaagaagaacaacgggaaggccgagttctggctggacctgcagccccaggccaaggtgctgatgtctgtgcagtacttcctggaggatgtgtag

SEQ ID NO: 265718 - DNA, 2031 bp, Artificial Sequence
  derived and/or modified sequence
atggcccccttcctgcggatcgccttcaacagctacgagctgggctccctacaggcagaggatgaagctaatcaacccttctgtgccgtgaagatgaaggaggccctgtctacagagagagggaagaccctcgtacagaaaaaacctaccatgtaccctgagtggaagagtactttcgatgcacatatatatgaaggccgggttatccagatcgtcctgatgagagccgccgaagagccagtgtccgaggtgaccgtgggcgtcagcgtgctcgcagagcgttgtaaaaagaacaatggtaaggcagaattctggctcgacctccaaccccaagccaaggtactcatgagcgtccaatatttcttggaggacgtcgattgtaaacagagcatgagatctgaggacgaggccaaattcccaacaatgaaccgccggggcgcgattaaacaggccaagatacactatattaagaaccacgaatttatcgcaacattcttcggccaacctaccttttgcagcgtgtgtaaagatttcgtttggggcctaaataaacaaggctataagtgtcggcaatgcaacgctgccatccataagaagtgtatagacaagataatcgggagatgcactggcactgcagctaatagtagagatactatatttcagaaagaaaggtttaatattgacatgccccatcggtttaaggtccataactacatgtcacccacattctgcgatcattgcggctccttattgtggggcttggtgaaacaggggctgaaatgcgaggactgtggaatgaacgtgcaccacaagtgtagagagaaagtggccaatctgtgtggaatcaaccagaagctgctggcggaggccctgaatcaagtcacgcaacgagcctctcggcggtcagattcggcatcatctgaacccgtaggaatataccagggttttgagaagaagacaggagtggctggcgaggacatgcaggataactctggcacatatgggaaaatctgggaggggtcctccaagtgcaacatcaacaacttcatctttcacaaagtgctgggaaagggctcattcggcaaagtgctgctcggcgaactgaagggcaggggcgaatacttcgcaattaaagcattgaagaaggatgtggtcctgatcgacgatgacgtggagtgcactatggtggagaagcgggtcctcaccctggctgccgagaatccattccttacgcacctgatctgcaccttccaaaccaaggaccatctgttctttgtgatggagttcctcaacggcggcgacctcatgtatcatatccaggacaaaggcaggttcgaattatatagagccactttttatgccgccgagatcatgtgcggcctgcaattcttgcattctaaaggtattatctatcgggacctgaaactggataatgttttgctcgatagggacggacatattaaaattgcggacttcgggatgtgcaaagaaaacatcttcggggagagccgcgcaagtactttttgtggcacccctgactatatcgctcctgagatactacaaggtctgaaatacaccttttctgtggattggtggagctttggtgtcctgctgtacgagatgctaatcggccaatccccattccacggggatgacgaggatgaattgtttgagagcataagggtagatacacctcactaccccagatggatcacgaaggaatccaaggacattcttgagaagctgtttgagcgagaacctaccaagagattgggtgtcactggaaacattaaaatccacccattctttaaaacaataaattggacgctgctagagaagcgtcggctggaacctccgtttcgccctaaggtgaaatctcctcgagactactcaaatttcgaccaggagtttctgaacgaaaaggctagactgtcgtattccgataagaacctgatcgactccatggaccagtcggcctttgctggattttctttcgttaacccaaagttcgaacacttactagaggactag

SEQ ID NO: 265719 - DNA, 2031 bp, Artificial Sequence
  derived and/or modified sequence
atggcccccttcctgcggatcgccttcaacagctacgagctgggcagcctccaggccgaagatgaagccaaccagcccttctgcgcagtgaagatgaaggaagctttgtctacagaacggggcaagactcttgtgcagaaaaaacctactatgtaccccgagtggaagagtacttttgacgcacatatttacgaaggaagagtcatccagatagtcctgatgagggccgcagaagaacccgtgtccgaggttacggtcggagtgagcgtcctcgcagagcgctgcaaaaaaaacaatggtaaggcggaattttggctggatcttcagccacaggcaaaagtgctaatgtccgtgcagtatttcttggaggatgttgactgcaaacagagcatgaggtctgaggacgaagcaaaattcccaaccatgaataggaggggagccataaagcaagccaaaattcactatatcaaaaaccatgagttcattgctactttcttcgggcagcccacattttgtagcgtctgcaaggactttgtttggggccttaataagcagggatataaatgtaggcagtgcaacgccgccatccataagaagtgcatagacaaaattatcgggaggtgtacaggcacagcagccaacagccgagacaccatttttcagaaggaacgatttaatatcgacatgccccatcgatttaaagtccacaattatatgagtccaacgttttgcgatcactgcggtagccttttatgggggctggtgaagcagggcttgaagtgcgaggattgcggcatgaatgtccaccacaagtgccgggagaaggtcgccaacctctgtggaataaaccaaaagctgttggcggaggccttaaaccaggtgacccagcgagccagtcgacgcagtgattccgcttcttccgagcctgtgggcatctaccagggcttcgagaaaaaaaccggagtcgctggcgaagacatgcaagataactctggaacatacggaaaaatctgggaggggtccagcaaatgcaatattaacaatttcatcttccacaaggtgttaggcaagggttcctttgggaaggtcctcctgggggaactgaaaggcaggggcgagtacttcgcaatcaaagctttaaaaaaggacgtagtcctcatcgatgacgacgtagagtgcacaatggtggagaagcgtgtgctgacgctggccgccgagaacccttttctgacccacctgatctgcacgtttcaaaccaaagaccacctattctttgttatggagttcctaaacgggggcgatttaatgtaccatattcaggataaagggcggttcgagctgtaccgtgccacattttatgcagccgagattatgtgcgggctccagtttctccactccaagggaattatctaccgtgacctcaagttggacaatgtgctcctcgaccgcgatggccatattaaaatcgctgacttcggcatgtgcaaggagaacatcttcggcgagtcccgagcctctacattctgtggaaccccagactacattgctcccgagatactccagggactgaaatatacgttttcagtggattggtggtcatttggggtgttgctgtacgagatgctgatcgggcaatctccctttcacggagatgatgaggacgagctgttcgaatccatacgtgtcgacaccccacactatccgcgttggatcaccaaggaaagcaaagatatcctggagaagcttttcgagcgcgagccgacaaagagactgggagtgacaggaaacataaagattcatccctttttcaaaacaattaattggacactcctggaaaagagacggttagaaccaccttttagaccaaaagtgaagtctcctagggattattctaacttcgaccaagaattcctgaatgagaaggccaggctcagttacagcgataaaaatctgattgactccatggatcagagcgcttttgccggtttttccttcgtcaatccaaagttcgagcacctgcttgaggattag

SEQ ID NO: 265720 - DNA, 234 bp, Artificial Sequence
  derived and/or modified sequence
atggcccccttcctgcggatcgccttcaacagctacgagctgggctcgctgcaagctgaggatgaggctaaccagcctttctgtgctgtaaaaatgaaagaagctctctccacagagagagggaagactctggtccagaaaaaaccaactatgtacccggaatggaaatcaacatttgacgctcacatatacgaagggcgggttatacagattgtcctcatgcgggctgcctag

SEQ ID NO: 265721 - DNA, 378 bp, Artificial Sequence
  derived and/or modified sequence
atggcccccttcctgcggatcgccttcaacagctacgagctgggcagtctccaagccgaggatgaagcaaatcaacctttctgtgccgtgaagatgaaggaggctttatctaccgaacgaggtaaaacactggtccaaaagaagcctacgatgtatcctgagtggaagagcactttcgatgcacacatatatgaaggacgcgtgatccagattgtgctgatgcgagcagcagaggaacctgtgtccgaggtgaccgtaggggtgagtgtgctcgctgagcgttgtaagaagaataacggaaaagcggagttctggcttgatctccaaccgcaggcgaaagtgcttatgagcgtacaatattttctcgaagatgtttag

SEQ ID NO: 265722 - DNA, 2031 bp, Artificial Sequence
  derived and/or modified sequence
atggctccattcctcagaattgcttttaattcttacgagcttggttctttacaggcagaagatgaggcgaaccaaccattctgtgcggtgaaaatgaaggaagctctgtccacagaacgtggcaagacactcgtccaaaaaaaaccaacgatgtatcccgaatggaaatccacgttcgacgctcacatctacgaaggcagagtgatacaaatcgtgttaatgagagcagccgaggaaccggtcagcgaagtaaccgtgggggtctccgtcctagcagagagatgcaagaaaaataacggcaaggccgaattttggctagacctgcagccccaggctaaggtgctgatgtcagtacagtactttctcgaggacgtcgattgcaaacaatcgatgcgaagcgaggacgaagctaaattcccaaccatgaaccgcagaggggcaatcaaacaggccaagatccattacattaagaaccatgaatttatagcgaccttctttggccagccaacattctgctccgtgtgtaaagattttgtttggggactaaataaacaagggtataagtgccggcagtgcaatgcagctatacacaaaaagtgtattgacaagataattgggcgatgcaccgggacagcagccaactcccgcgacacgatttttcagaaagaaagattcaatattgatatgccccaccggtttaaagtgcacaactatatgtctcctactttttgcgaccattgtgggtccctgctgtggggcctcgtgaagcagggactcaagtgcgaggactgcggtatgaacgtacatcacaagtgccgcgagaaggttgccaatctgtgtggcatcaatcagaagctccttgcagaggctttgaaccaagtcacgcagagggcctcacggaggtccgattcggccagttctgaacccgtcggcatctatcaagggtttgagaagaagaccggggtcgcaggggaagacatgcaagacaactccggtacttatggtaagatctgggagggatccagtaagtgcaatattaacaacttcattttccataaggtcctgggcaaggggagttttggcaaggtgctgctcggcgagctaaagggcagaggggaatacttcgccataaaagctctgaagaaagacgtcgttttgatcgatgatgacgtcgaatgcactatggtagaaaaacgcgtcctgaccctggctgctgagaatccattcctaactcacttaatatgtaccttccagaccaaggaccacctctttttcgtgatggagtttttaaacggcggtgatctaatgtatcatatccaggataagggacgtttcgaattataccgggcaacattctacgccgctgaaataatgtgtggtctacaattcctgcactccaagggtataatctatcgggacctgaagctcgataatgttctcctggatcgcgatggccatattaagatcgcagatttcggcatgtgcaaggagaacattttcggcgaaagtcgggcatccacgttttgcggaacccctgactatatagccccagagattctgcagggtttaaaatacaccttttcggtggactggtggtcttttggagtcctgttgtatgagatgcttatcggacagagcccttttcacggggatgacgaggacgaattgttcgagtctatccgagttgataccccacactaccctaggtggatcacaaaggaatcaaaggacatcctggaaaagcttttcgagcgggagcctacgaagcgactcggggtcacaggcaacatcaagattcatccattttttaaaaccataaactggacactgctcgaaaaacgccgactggagcccccttttcgccctaaggtgaagagcccacgtgactacagcaactttgaccaagagtttctcaatgagaaggcacggctgtcttactcagacaagaatctgatagacagcatggaccaatccgcatttgcaggattcagtttcgtgaacccaaagtttgaacacttattagaggactag

SEQ ID NO: 265723 - DNA, 2031 bp, Artificial Sequence
  derived and/or modified sequence
atggccccattcctgcggatagcattcaatagctacgagctcggctcgctgcaggcggaagacgaggccaaccaaccattctgtgcagtgaaaatgaaagaagcactgtctactgaacgcggtaagacattagtgcagaaaaagccgaccatgtacccagagtggaagtcaactttcgacgcccacatctacgaaggtagggtcattcagatagtcttaatgcgcgctgccgaggagcccgtttctgaggtaaccgtgggcgtgagcgtcctggctgagaggtgcaagaagaacaacgggaaagcagagttctggctggaccttcagccacaggccaaggtgctgatgagtgtccagtacttcctcgaggacgtcgattgcaaacagtccatgagatcagaagacgaggccaagttccctacaatgaacaggagaggagctatcaagcaggccaaaattcattacataaaaaatcatgagtttatcgccacgtttttcggtcagcctaccttctgcagcgtgtgcaaggacttcgtgtggggcctgaacaagcagggctacaagtgtcggcagtgtaacgccgctatccacaagaaatgtattgacaagattataggtaggtgcacaggtaccgctgcaaattctagggacacaattttccagaaggagcggtttaacatagacatgccccaccgatttaaagtgcacaactatatgtctccaaccttttgtgaccattgcggttctctgctatggggccttgtcaagcaaggcttgaagtgtgaggactgtggcatgaacgtgcaccataagtgcagggaaaaagtggccaatttatgcggcatcaaccagaagctgctcgccgaagccttgaatcaggtgacacaaagagcgagcagacgcagcgattctgcctcatctgagcctgtgggaatttatcagggattcgagaaaaagaccggcgtggctggcgaggacatgcaggataattcaggcacttatggcaaaatttgggagggcagcagcaagtgcaacatcaacaactttattttccacaaggtgctgggcaaaggaagctttggaaaggttctcttgggcgaactcaaagggaggggggaatatttcgcaattaaggccctgaaaaaagatgtcgtattaatcgatgacgatgtcgagtgtacgatggtggagaagcgtgtgcttacgctggcagccgagaacccctttttgacgcacctgatttgtaccttccagacaaaagaccatctgttctttgtaatggagtttctcaatggtggagacctaatgtatcacattcaggataaaggaagatttgagttatacagggccaccttttacgctgcggagatcatgtgtggattgcagtttttacactcaaaggggatcatataccgtgacctcaaactcgataacgtgcttcttgaccgagacggtcacatcaagattgctgattttgggatgtgtaaggaaaacatatttggagagtccagagcctccaccttttgcggtacccccgattatatcgccccagagatcttacagggactgaagtatacattcagtgtagattggtggagttttggtgtgctcctatacgagatgctcatcgggcagtctcccttccacggagatgatgaggacgagttgttcgaatctattagggtggacacccctcattacccgaggtggatcaccaaggaatccaaggacatactcgaaaagctattcgagagagagcccactaagcgtctcggagtgactgggaacattaaaatccatccattcttcaaaaccatcaactggaccctactggaaaagagaagactcgagcctcctttcagacccaaagtcaaaagccccagagattacagtaattttgaccaggaatttctgaatgagaaggctagattgtcttattccgataaaaatctaatcgacagcatggatcagtccgcattcgccggattttcatttgtcaatcctaagtttgaacacctgcttgaggactag

SEQ ID NO: 265724 - DNA, 234 bp, Artificial Sequence
  derived and/or modified sequence
atggctccttttttgagaattgctttcaattcctacgagctcggcagccttcaagctgaagatgaggccaaccagcccttttgtgctgtgaagatgaaagaggccctcagtactgaaagagggaagacgttagtgcaaaagaagcccacaatgtacccagagtggaaatccacctttgacgcccacatctatgagggaagggtgatccagatagtcctgatgcgagccgcttag

SEQ ID NO: 265725 - DNA, 378 bp, Artificial Sequence
  derived and/or modified sequence
atggcacccttcctgcgaatcgcatttaacagctatgaactcggatctctgcaagctgaggatgaggctaaccagccattttgcgcagtgaagatgaaggaagccctgtctaccgagaggggaaaaaccctcgtgcaaaagaagccaactatgtacccagaatggaaaagcaccttcgacgcccacatctacgaaggcagggtgatccagatcgtccttatgagagcggcagaggagccagtgagtgaagttaccgtgggagttagcgtgctcgcggagaggtgcaagaagaataatgggaaggccgaattttggctggatctgcagccccaggccaaggtattgatgagtgtccaatactttcttgaagacgtttag

SEQ ID NO: 265726 - DNA, 2680 bp, Artificial Sequence
  derived and/or modified sequence
ccgccccctcgcacttccgtgtgccgcggcgccggagcccgaggcggctgtagcccacatctcccgagcgacccccggcgcccgcccgccgcgcggaggcccgggccacacctcactggccgcttggcccatcccagtcagcgccgcgccgaaccccgtccgcgcgcgccggggagcggcgcccccgccgctgccgccgcgacccttggcgcctgcccctgcaacgggaggtctgcagggaactggccaggcaagggggcaggcccgtttctcctggtggttggtgcgttgtagcagcagcgggagccaggactaaggacaagcaggagctgggagccccagccccactgcaggccccaccatggcgccgttcctgcgcatcgccttcaactcctatgagctgggctccctgcaggccgaggacgaggcgaaccagcccttctgtgccgtgaagatgaaggaggcgctcagcacagagcgtgggaaaacactggtgcagaagaagccgaccatgtatcctgagtggaagtcgacgttcgatgcccacatctatgaggggcgcgtcatccagattgtgctaatgcgggcagcagaggagccagtgtctgaggtgaccgtgggtgtgtcggtgctggccgagcgctgcaagaagaacaatggcaaggctgagttctggctggacctgcagcctcaggccaaggtgttgatgtctgttcagtatttcctggaggacgtggattgcaaacagtctatgcgcagtgaggacgaggccaagttcccaacgatgaaccgccgcggagccatcaaacaggccaaaatccactacatcaagaaccatgagtttatcgccaccttctttgggcaacccaccttctgttctgtgtgcaaagactttgtctggggcctcaacaagcaaggctacaaatgcaggcaatgtaacgctgccatccacaagaaatgcatcgacaagatcatcggcagatgcactggcaccgcggccaacagccgggacactatattccagaaagaacgcttcaacatcgacatgccgcaccgcttcaaggttcacaactacatgagccccaccttctgtgaccactgcggcagcctgctctggggactggtgaagcagggattaaagtgtgaagactgcggcatgaatgtgcaccataaatgccgggagaaggtggccaacctctgcggcatcaaccagaagcttttggctgaggccttgaaccaagtcacccagagagcctcccggagatcagactcagcctcctcagagcctgttgggatatatcagggtttcgagaagaagaccggagttgctggggaggacatgcaagacaacagtgggacctacggcaagatctgggagggcagcagcaagtgcaacatcaacaacttcatcttccacaaggtcctgggcaaaggcagcttcgggaaggtgctgcttggagagctgaagggcagaggagagtactttgccatcaaggccctcaagaaggatgtggtcctgatcgacgacgacgtggagtgcaccatggttgagaagcgggtgctgacacttgccgcagagaatccctttctcacccacctcatctgcaccttccagaccaaggaccacctgttctttgtgatggagttcctcaacgggggggacctgatgtaccacatccaggacaaaggccgctttgaactctaccgtgccacgttttatgccgctgagataatgtgtggactgcagtttctacacagcaagggcatcatttacagggacctcaaactggacaatgtgctgctggaccgggatggccacatcaagattgccgactttgggatgtgcaaagagaacatattcggggagagccgggccagcaccttctgcggcacccctgactatatcgcccctgagatcctacagggcctgaagtacacattctctgtggactggtggtctttcggggtccttctgtacgagatgctcattggccagtcccccttccatggtgatgatgaggatgaactcttcgagtccatccgtgtggacacgccacattatccccgctggatcaccaaggagtccaaggacatcctggagaagctctttgaaagggaaccaaccaagaggctgggagtgaccggaaacatcaaaatccaccccttcttcaagaccataaactggactctgctggaaaagcggaggttggagccacctttcaggcccaaagtgaagtcacccagagactacagtaactttgaccaggagttcctgaacgagaaggcgcgcctctcctacagcgacaagaacctcatcgactccatggaccagtctgcattcgctggcttctcctttgtgaaccccaaattcgagcacctcctggaagattgaggttcctggacagatcaggctagccctgccctccacccacacctgcccgctccccacgataagcaccagtgggactgtggtgacttctgctgctggccccgcccctgcccccagagcgtccttggctgccgtctggccgggctctcatggtacttcctctgtgaactgtgtgtgaatctgcttttcctctgccttcggagggaaattgtaaatcctgtgtttcattacttgaatgtagttatctattgaaaatatatattatatacatagacatatatatatatataa

SEQ ID NO: 265727 - DNA, 562 bp, Artificial Sequence
  derived and/or modified sequence
aaactgagaaactgagccgcggtcagcgaaagtcccgccgcgccgagacctgccggtctgcagggaactggccaggcaagggggcaggcccgtttctcctggtggttggtgcgttgtagcagcagcgggagccaggactaaggacaagcaggagctgggagccccagccccactgcaggccccaccatggcgccgttcctgcgcatcgccttcaactcctatgagctgggctccctgcaggccgaggacgaggcgaaccagcccttctgtgccgtgaagatgaaggaggcgctcagcacagagcgtgggaaaacactggtgcagaagaagccgaccatgtatcctgagtggaagtcgacgttcgatgcccacatctatgaggggcgcgtcatccagattgtgctaatgcgggcagcagaggagccagtgtctgaggtgaccgtgggtgtgtcggtgctggccgagcgctgcaagaagaacaatggcaaggctgagttctggctggacctgcagcctcaggccaaggtgttgatgtctgttcagtatttcctggaggacgtgg

SEQ ID NO: 265728 - DNA, 2031 bp, Artificial Sequence
  derived and/or modified sequence
atggcccccttcctgagaatcgccttcaacagctacgagctgggcagcctgcaggccgaggacgaggccaaccagcccttctgcgccgtgaagatgaaggaggccctgagcaccgagagaggcaagaccctggtgcagaagaagcccaccatgtaccccgagtggaagagcaccttcgacgcccacatctacgagggcagagtgatccagatcgtgctgatgagagccgccgaggagcccgtgagcgaggtgaccgtgggcgtgagcgtgctggccgagagatgcaagaagaacaacggcaaggccgagttctggctggacctgcagccccaggccaaggtgctgatgagcgtgcagtacttcctggaggacgtggactgcaagcagagcatgagaagcgaggacgaggccaagttccccaccatgaacagaagaggcgccatcaagcaggccaagatccactacatcaagaaccacgagttcatcgccaccttcttcggccagcccaccttctgcagcgtgtgcaaggacttcgtgtggggcctgaacaagcagggctacaagtgcagacagtgcaacgccgccatccacaagaagtgcatcgacaagatcatcggcagatgcaccggcaccgccgccaacagcagagacaccatcttccagaaggagagattcaacatcgacatgccccacagattcaaggtgcacaactacatgagccccaccttctgcgaccactgcggcagcctgctgtggggcctggtgaagcagggcctgaagtgcgaggactgcggcatgaacgtgcaccacaagtgcagagagaaggtggccaacctgtgcggcatcaaccagaagctgctggccgaggccctgaaccaggtgacccagagagccagcagaagaagcgacagcgccagcagcgagcccgtgggcatctaccagggcttcgagaagaagaccggcgtggccggcgaggacatgcaggacaacagcggcacctacggcaagatctgggagggcagcagcaagtgcaacatcaacaacttcatcttccacaaggtgctgggcaagggcagcttcggcaaggtgctgctgggcgagctgaagggcagaggcgagtacttcgccatcaaggccctgaagaaggacgtggtgctgatcgacgacgacgtggagtgcaccatggtggagaagagagtgctgaccctggccgccgagaaccccttcctgacccacctgatctgcaccttccagaccaaggaccacctgttcttcgtgatggagttcctgaacggcggcgacctgatgtaccacatccaggacaagggcagattcgagctgtacagagccaccttctacgccgccgagatcatgtgcggcctgcagttcctgcacagcaagggcatcatctacagagacctgaagctggacaacgtgctgctggacagagacggccacatcaagatcgccgacttcggcatgtgcaaggagaacatcttcggcgagagcagagccagcaccttctgcggcacccccgactacatcgcccccgagatcctgcagggcctgaagtacaccttcagcgtggactggtggagcttcggcgtgctgctgtacgagatgctgatcggccagagccccttccacggcgacgacgaggacgagctgttcgagagcatcagagtggacaccccccactaccccagatggatcaccaaggagagcaaggacatcctggagaagctgttcgagagagagcccaccaagagactgggcgtgaccggcaacatcaagatccaccccttcttcaagaccatcaactggaccctgctggagaagagaagactggagccccccttcagacccaaggtgaagagccccagagactacagcaacttcgaccaggagttcctgaacgagaaggccagactgagctacagcgacaagaacctgatcgacagcatggaccagagcgccttcgccggcttcagcttcgtgaaccccaagttcgagcacctgctggaggactag

SEQ ID NO: 265729 - DNA, 234 bp, Artificial Sequence
  derived and/or modified sequence
atggcccccttcctgagaatcgccttcaacagctacgagctgggcagcctgcaggccgaggacgaggccaaccagcccttctgcgccgtgaagatgaaggaggccctgagcaccgagagaggcaagaccctggtgcagaagaagcccaccatgtaccccgagtggaagagcaccttcgacgcccacatctacgagggcagagtgatccagatcgtgctgatgagagccgcctag

SEQ ID NO: 265730 - DNA, 378 bp, Artificial Sequence
  derived and/or modified sequence
atggcccccttcctgagaatcgccttcaacagctacgagctgggcagcctgcaggccgaggacgaggccaaccagcccttctgcgccgtgaagatgaaggaggccctgagcaccgagagaggcaagaccctggtgcagaagaagcccaccatgtaccccgagtggaagagcaccttcgacgcccacatctacgagggcagagtgatccagatcgtgctgatgagagccgccgaggagcccgtgagcgaggtgaccgtgggcgtgagcgtgctggccgagagatgcaagaagaacaacggcaaggccgagttctggctggacctgcagccccaggccaaggtgctgatgagcgtgcagtacttcctggaggacgtgtag

SEQ ID NO: 265731 - protein, 344 aa, Artificial Sequence
  derived and/or modified sequence
MGFNLTFHLSYKFRLLLLLTLCLTVVGWATSNYFVGAIQEIPKAKEFMANFHKTLILGKGKTLTNEASTKKVELDNCPSVSPYLRGQSKLIFKPDLTLEEVQAENPKVSRGRYRPQECKALQRVAILVPHRNREKHLMYLLEHLHPFLQRQQLDYGIYVIHQAEGKKFNRAKLLNVGYLEALKEENWDCFIFHDVDLVPENDFNLYKCEEHPKHLVVGRNSTGYRLRYSGYFGGVTALSREQFFKVNGFSNNYWGWGGEDDDLRLRVELQRMKISRPLPEVGKYTMVFHTRDKGNEVNAERMKLLHQVSRVWRTDGLSSCSYKLVSVEHNPLYINITVDFWFGA

SEQ ID NO: 265732 - protein, 21 aa, Artificial Sequence
  derived and/or modified sequence
MGFNLTFHLSYKFRLLLLLTL

SEQ ID NO: 265733 - protein, 136 aa, Artificial Sequence
  derived and/or modified sequence
MGFNLTFHLSYKFRLLLLLTLCLTVVGWATSNYFVGAIQEIPKAKEFMANFHKTLILGKGKTLTNEASTKKVELDNCPSVSPYLRGQSKLIFKPDLTLEEVQAENPKVSRGRYRPQECKALQRVAILVPHRNREKH

SEQ ID NO: 265734 - protein, 118 aa, Artificial Sequence
  derived and/or modified sequence
MGFNLTFHLSYKFRLLLLLTLCLTVVGWATSNYFVGAIQEIPKAKEFMANFHKTLILGKGKTLTNEASTKKVELDNCPSVSPYLRGQSKLIFKPDLTLEEVQAENPKVSRGRYRPQEC

SEQ ID NO: 265735 - protein, 42 aa, Artificial Sequence
  derived and/or modified sequence
MGFNLTFHLSYKFRLLLLLTLCLTVVGWATSNYFVGAIQEIP

SEQ ID NO: 265736 - DNA, 1035 bp, Artificial Sequence
  derived and/or modified sequence
atgggcttcaacctgaccttccacctgagctacaagttcagactgctgctgctgctgaccctgtgcctgaccgtggtgggctgggccaccagcaactacttcgtgggcgccatccaggagatccccaaggccaaggagttcatggccaacttccacaagaccctgatcctgggcaagggcaagaccctgaccaacgaggccagcaccaagaaggtggagctggacaactgccccagcgtgagcccctacctgagaggccagagcaagctgatcttcaagcccgacctgaccctggaggaggtgcaggccgagaaccccaaggtgagcagaggcagatacagaccccaggagtgcaaggccctgcagagagtggccatcctggtgccccacagaaacagagagaagcacctgatgtacctgctggagcacctgcaccccttcctgcagagacagcagctggactacggcatctacgtgatccaccaggccgagggcaagaagttcaacagagccaagctgctgaacgtgggctacctggaggccctgaaggaggagaactgggactgcttcatcttccacgacgtggacctggtgcccgagaacgacttcaacctgtacaagtgcgaggagcaccccaagcacctggtggtgggcagaaacagcaccggctacagactgagatacagcggctacttcggcggcgtgaccgccctgagcagagagcagttcttcaaggtgaacggcttcagcaacaactactggggctggggcggcgaggacgacgacctgagactgagagtggagctgcagagaatgaagatcagcagacccctgcccgaggtgggcaagtacaccatggtgttccacaccagagacaagggcaacgaggtgaacgccgagagaatgaagctgctgcaccaggtgagcagagtgtggagaaccgacggcctgagcagctgcagctacaagctggtgagcgtggagcacaaccccctgtacatcaacatcaccgtggacttctggttcggcgcctag

SEQ ID NO: 265737 - DNA, 66 bp, Artificial Sequence
  derived and/or modified sequence
atgggcttcaacctgaccttccacctgagctacaagttcagactgctgctgctgctgaccctgtag

SEQ ID NO: 265738 - DNA, 1035 bp, Artificial Sequence
  derived and/or modified sequence
atgggctttaatttgacatttcacctgtcttacaagtttcggttgcttctgctgctgactctgtgcctcaccgtggttggatgggccacgagcaactattttgtcggggccatacaggagatcccaaaagcaaaagagttcatggcaaatttccataaaaccctgatactagggaaggggaaaacccttaccaatgaggcttcaactaagaaagttgaattagacaactgtccctccgttagtccatacttaagggggcaatccaaattgatcttcaaacccgatcttacgcttgaggaagtgcaagcggagaatcccaaagtctcaagaggccggtatagaccccaagagtgtaaagccctgcagagggtggccattcttgtccctcatcggaaccgggaaaagcatctgatgtatttgcttgaacaccttcacccttttctgcagaggcaacaactagattatgggatttacgtcatccatcaggcagaagggaagaagtttaacagggcaaaactcctaaacgtgggttatcttgaagcgttgaaggaagaaaactgggactgcttcatcttccatgacgtggatctggtgccagagaatgattttaatctgtataaatgtgaggagcaccccaagcatctggtggttggaagaaatagcactggttaccggttgcggtacagcgggtatttcggcggagttaccgcgctgtcaagggaacagttctttaaagtcaacgggttttcgaataattattggggatggggtggagaggatgacgacctgagattgcgcgttgagctccaacggatgaagatttcgcgaccattacccgaagtcggaaaatacacgatggtcttccacacccgcgacaagggcaatgaagtcaacgcagagcgtatgaagctcctgcatcaagtctctcgcgtgtggcgaacggatggcctgtccagctgctcctataagctggtttcagtggagcataatcctttgtacatcaacatcactgtggacttctggttcggcgcctag

SEQ ID NO: 265739 - DNA, 1035 bp, Artificial Sequence
  derived and/or modified sequence
atggggtttaaccttaccttccatctatcctataagttccgattactcttgctgctcaccctgtgtctgacagtggtaggctgggccacgtccaattattttgtcggagctatccaagagataccaaaagccaaggaatttatggccaatttccataagacgctgatccttggcaagggaaaaacactgacaaacgaagcttcaaccaaaaaggtggagttggacaactgtccctccgtgagcccctacctgcggggccagtcgaaactcattttcaagccagatctgacactggaagaggtgcaagcggaaaatcccaaggttagtaggggacggtatcggccccaagagtgcaaggcgctccaacgggttgccattttagtgcctcatcgaaacagagagaagcatctcatgtacctgctggagcatttacaccctttcctgcagaggcagcaactggactatggaatttatgtgatccaccaggctgaaggtaaaaaatttaaccgcgccaagctactcaatgtcggataccttgaggctctcaaggaggaaaattgggattgcttcattttccacgatgttgatctggtgcctgagaatgattttaacctgtacaagtgcgaggagcatcccaagcacctcgtggttggacggaacagtaccggctatcggctcagatacagcggctactttggcggggtgactgcgctgtcaagggagcagttttttaaagtaaacgggttcagtaacaactactggggctggggcggcgaggatgatgatctccgactaagggtggaactgcagagaatgaaaattagcaggcccttgcctgaggttggtaagtacacaatggtattccacacccgcgataagggtaatgaggtgaatgctgagcgcatgaagttgttgcaccaagtttcccgcgtttggcgcactgacgggctgagctcctgcagctacaagctggttagcgtggaacacaatccactgtatattaacatcaccgtggatttctggttcggcgcttag

SEQ ID NO: 265740 - DNA, 66 bp, Artificial Sequence
  derived and/or modified sequence
atgggcttcaacttgacttttcatctgagctacaagttcagacttttactccttctgacgctctag

SEQ ID NO: 265741 - DNA, 1035 bp, Artificial Sequence
  derived and/or modified sequence
atgggattcaatctgacatttcatttgagttataagtttcgcctactgctcttattaacgctgtgtctcactgtcgtgggctgggctacatctaattactttgtgggggcgatccaggagatccccaaggccaaggagtttatggctaacttccacaagactttgattctgggcaagggcaagaccctcacaaacgaagcatctactaaaaaggtcgagctcgacaactgcccaagcgtgtctccctacctgcgagggcaaagcaaattgatcttcaagcctgatcttacactggaggaagtgcaggcggaaaaccccaaagtatcaaggggccgctatcgtccccaggaatgtaaggcactgcagcgggtagctatcttggttccccaccgcaatcgagagaaacacctgatgtatttgctggagcacttacacccctttctgcagaggcagcaattggactatggtatctatgttatccatcaggccgaggggaagaagtttaacagagcaaaattactgaatgtcggataccttgaggcattaaaagaggagaactgggactgttttatctttcatgacgtggatttggtgcccgaaaatgatttcaatctgtacaaatgcgaggaacatccaaagcatctggttgtcggaaggaatagcacagggtatcgcctgcggtacagtgggtatttcggcggggtcaccgcactgtcccgcgaacagtttttcaaagtgaatggcttctcaaataattattggggctggggaggcgaagatgatgacctaagactgcgggttgaactccagcgaatgaaaatctcacggcccctccccgaggtcggaaagtatacaatggtgtttcatacccgggataaagggaacgaggttaatgctgaaagaatgaaactcttgcaccaggtttccagggtctggcggacagatggactctctagttgttcctacaagcttgtcagcgtggagcacaatcctctgtacattaacataactgtcgacttctggttcggggcttag

SEQ ID NO: 265742 - DNA, 1035 bp, Artificial Sequence
  derived and/or modified sequence
atgggcttcaacctgaccttccacctgagctacaagttccggctgctgctgctgctgaccctgtgcctgactgtggtgggctgggccaccagcaactactttgtgggcgccatccaggagatccccaaggccaaggagttcatggccaacttccacaagaccctcatcctgggcaagggcaagaccctgaccaatgaggccagcaccaagaaggtggagctggacaactgccccagcgtgagcccctacctgcggggccagagcaagctgatcttcaagccagacctgaccctggaggaggtgcaggccgagaaccccaaggtgtcccggggccgctaccggccccaggagtgcaaggccctgcagagggtggccatcctggtgccccacaggaaccgggagaagcacctgatgtacctgctggagcacctgcaccccttcctgcagaggcagcagctggactatggcatctacgtgatccaccaggccgagggcaagaagttcaacagagccaagctgctgaatgtgggctacctggaggccctgaaggaggagaactgggactgcttcatcttccatgatgtggacctggtgcctgaaaatgacttcaacctgtacaagtgtgaggagcaccccaagcacctggtggtgggcaggaacagcacaggctaccgcctgcgctacagcggctactttggaggagtgacagccctgagccgggagcagttcttcaaggtgaatggcttcagcaacaactactggggctggggcggagaagatgatgacctgcggctgcgggtggagctgcagaggatgaagatcagccggcccctgcctgaggtgggcaagtacaccatggtgttccacacccgggacaagggaaatgaggtgaatgctgagaggatgaagctgctgcaccaggtgtcccgggtgtggaggacagatggcctgagcagctgcagctacaagctggtgtctgtggagcacaaccccctgtacatcaacatcaccgtggacttctggtttggagcctag

SEQ ID NO: 265743 - DNA, 66 bp, Artificial Sequence
  derived and/or modified sequence
atgggcttcaacctgaccttccacctgagctacaagttccggctgctgctgctgctgaccctgtag

SEQ ID NO: 265744 - DNA, 1035 bp, Artificial Sequence
  derived and/or modified sequence
atgggcttcaacctgaccttccacctgagctacaagttccggctgctgctgctcctcacactctgtctgaccgtcgtcggctgggctacttcaaattactttgttggagctatccaggagattcccaaggcgaaggaattcatggccaactttcacaaaacactcatcctgggcaaggggaaaacactcacaaacgaagcctccactaagaaggtggagctggacaattgcccctccgttagcccatatctgcgaggtcagagcaagctgatttttaagcccgacctcaccctggaagaagttcaggccgaaaacccgaaggtcagtcgcggacgatatcgcccccaggaatgtaaggccctgcaacgtgtggccatactcgtgccccatcggaacagagaaaagcacttgatgtacctcctcgagcatctgcacccatttctccagaggcagcagctggactacggcatatacgtgatacaccaggcagaaggaaagaaattcaatcgagctaagctcctcaacgtggggtatctagaggcgttgaaagaggaaaactgggactgtttcatttttcatgatgtggatttggtccctgagaacgattttaacttatataaatgcgaagaacaccccaagcacctggttgtggggcgtaactctaccggctatcgtctaaggtatagtggatatttcgggggggtcacagccttgtcaagagagcaattttttaaggtgaatgggttttcaaacaactactggggctggggaggcgaggacgatgacctgcggcttagggtcgaattacagcggatgaaaatttcccgacccctcccggaggtaggaaaatacacaatggttttccatacacgtgataagggtaatgaggtgaacgcggagcgcatgaagctgctgcatcaagtctcacgggtgtggcgaacagacggactgtcttcctgttcctataaactggtcagtgtggaacataatccattatatattaacatcacagtagacttctggtttggagcgtag

SEQ ID NO: 265745 - DNA, 1035 bp, Artificial Sequence
  derived and/or modified sequence
atgggcttcaacctgaccttccacctgagctacaagttccggctgctattgctgctgacattatgtctgacagttgtgggttgggcaacttctaactactttgtgggtgcaatccaggagattcccaaagccaaggagtttatggcaaattttcataagactctgatcctgggtaaggggaagaccctcacgaacgaagcttcgactaagaaggtcgagctggacaattgtccatccgtttccccctacttgaggggtcagagcaaactcatatttaaacctgatctgacactggaggaagtccaagccgaaaaccccaaggtcagcaggggacggtatagaccacaagaatgtaaagcactccagagagtggccatcctcgtgccccacaggaaccgggagaaacaccttatgtacctgctggagcacctgcatccctttctgcagaggcagcaactggattacgggatctacgtgatacaccaagccgaggggaaaaaattcaacagagctaaacttctaaatgtgggctacctggaggcccttaaagaggagaattgggattgttttattttccacgacgtggacctagtccccgaaaacgacttcaatttatacaagtgcgaggaacatcccaagcacctggttgttggccggaatagcaccggttaccgactaaggtactcggggtacttcggaggcgtgaccgcgctctcgcgggaacagtttttcaaagttaacggcttctcaaacaactattggggttggggaggggaggacgacgacctgaggctgagagtcgagctgcagaggatgaagatcagtcggcctctaccagaggtcggcaagtacactatggtttttcatacacgcgacaaaggaaatgaggttaacgcggagcggatgaagctgctgcatcaggtgagtagagtctggcggaccgacgggcttagttcatgtagctacaaactggtatcagttgagcacaatccactttatattaatattacagtggatttctggtttggtgcctag

SEQ ID NO: 265746 - DNA, 66 bp, Artificial Sequence
  derived and/or modified sequence
atgggcttcaacctgaccttccacctgagctacaagttccggctgcttcttctccttacactctag

SEQ ID NO: 265747 - DNA, 1035 bp, Artificial Sequence
  derived and/or modified sequence
atgggcttcaacctgaccttccacctgagctacaagttccggctgctacttttgctcacactgtgcttgacagttgttggttgggccacatctaactatttcgtgggagccatccaggaaattccgaaggcaaaggaattcatggctaacttccacaaaaccttaattcttgggaaagggaagaccctaacgaacgaagcgtctactaagaaagtggaactagataattgcccttctgtaagtccatatctgcgcggacagtcaaagttgatctttaaacccgacctgaccctggaggaggtgcaggctgagaaccctaaggtctcacgggggcgataccgcccacaggaatgtaaggctcttcaacgagtggcaatcttggtcccccataggaatcgagagaaacatttgatgtacctcttagagcacctgcacccgttccttcagcgccaacaactagactacgggatttacgttattcatcaggcagagggtaaaaagttcaaccgcgcgaaacttctgaacgtgggctatttagaggccctaaaggaggaaaactgggactgttttatctttcacgatgtcgacctagtccctgagaacgatttcaacctgtataaatgtgaagagcacccaaagcacctggtcgtcggccgaaattccacaggctataggctgcgctacagcggatacttcgggggcgtcacagctctgtctagggaacagttcttcaaagtgaatggcttttccaacaactattggggctggggaggcgaggatgatgacctgcgtctccgggttgagctgcagaggatgaaaatttcccggccactgccagaggtgggcaaatacactatggtctttcatactcgggacaagggtaatgaggtaaatgccgagagaatgaagttactgcatcaggtgagcagggtgtggagaaccgacggcctctcttcttgtagctacaagttggtgtcagtggaacacaaccctctgtacattaacatcaccgtcgatttttggttcggagcttag

SEQ ID NO: 265748 - DNA, 1035 bp, Artificial Sequence
  derived and/or modified sequence
atgggcttcaatcttaccttccacctcagttataagtttaggctactgttgttgttaactctttgcctgaccgtggttgggtgggcaacttctaactactttgtgggagccatccaagagatcccaaaggccaaggagtttatggccaactttcataagactctcatactcggtaaaggaaagacgctgaccaatgaggccagcaccaagaaggtggagctcgacaattgcccaagtgtgagtccatacttgcggggtcagagcaaattgatcttcaaaccggacctcaccttggaggaagttcaggccgaaaatcccaaagtctctcgcggtcggtataggccccaggagtgtaaggctctccagagggttgcaattctcgttccccaccgaaatagggaaaaacacttaatgtacctgctcgagcacttacacccttttctccagcgacagcagctggattacggaatttatgtcatccaccaggcagaagggaaaaagtttaatagagcaaaactcctgaatgttggctacctggaagcgctcaaagaagaaaactgggattgctttatttttcacgatgttgatctggtccccgagaacgattttaacctctacaaatgcgaagagcatcctaaacatttggtcgtcggtcggaacagcacggggtaccggcttcggtatagcggatatttcggcggtgttaccgctttgtctcgcgagcagttctttaaggttaatggcttcagcaataattattggggatgggggggtgaggacgatgatctgcgcctgagggtggagctgcagagaatgaaaattagcaggccgctccccgaggtgggaaagtacacgatggtattccacacccgcgataagggaaacgaagtgaatgccgagcgaatgaagcttctacaccaagtgtctcgagtctggcgcaccgacggactttcttcatgcagttacaaactcgtatcagtagaacacaatcctttgtacattaacattacagtggatttctggtttggcgcttag

SEQ ID NO: 265749 - DNA, 1035 bp, Artificial Sequence
  derived and/or modified sequence
atgggatttaacttgacatttcacctgtcttataagttcaggcttctgctactactgaccctgtgcctgacagtggtcggctgggcaacctccaactactttgtgggggcaatccaggaaatacctaaagccaaggagtttatggccaactttcacaagacgctcatactgggtaagggcaaaacactaacgaatgaggcctccaccaagaaagtggaactggacaactgcccctccgtttccccctaccttcgcggacagtcaaaacttatatttaaaccggatctgaccctggaggaggtgcaggcagagaaccctaaagtaagtagggggagatatcggccacaggaatgtaaagcactgcaaagggtcgcaatccttgtccctcatcggaatagagaaaagcacctgatgtacctccttgagcatctgcacccctttctgcagagacagcagttggattacggaatctatgtgattcaccaggcagagggcaagaagttcaatagagccaaactcctcaacgtcggatacctagaagcactgaaagaggagaactgggattgctttatttttcacgatgtggacctcgtccccgagaatgattttaatctctataaatgtgaagagcatcccaagcacctggtcgtgggaagaaactccactgggtacagactcaggtatagcggttacttcggcggtgtcacagctctgtccagggaacaatttttcaaggtcaacggatttagcaacaactattggggctgggggggtgaagacgacgatctccggctgcgtgtggagctgcagcggatgaagataagccgcccactaccagaggtaggcaaatatacgatggtctttcataccagagacaagggcaatgaagtgaacgccgagaggatgaaactcttacaccaagtgtcacgggtgtggcggaccgatgggctttcttcttgcagttacaagctcgttagcgttgagcataaccctctgtacataaatatcacggtcgatttttggttcggggcttag

SEQ ID NO: 265750 - DNA, 66 bp, Artificial Sequence
  derived and/or modified sequence
atgggatttaacttgacctttcacctatcgtacaaatttagactgttactgctgctgacactatag

SEQ ID NO: 265751 - DNA, 1035 bp, Artificial Sequence
  derived and/or modified sequence
atgggttttaatctcacatttcacttgagctataagttccggctgcttctcctcctcaccttatgcttgacagttgtggggtgggcgacaagcaactattttgttggagccattcaggagatccccaaagccaaggagtttatggcaaacttccacaaaaccttaatactgggaaagggtaagacccttacgaatgaggcctccactaagaaggttgaactggacaactgcccgtcagtgagtccgtatctacgcggtcagtccaaactgatttttaagcccgacctgaccctcgaggaagtgcaggccgaaaatccaaaggtttctagaggcaggtatcgacctcaggagtgcaaggctctgcagagggttgccatactggtcccacacaggaatagggaaaagcatctgatgtacttgctggagcacctgcatccgttcctacagaggcaacagttagactacggcatctatgtaatccaccaggccgaaggaaagaagtttaatcgtgctaaacttttaaacgtgggttacctggaagctctcaaggaagagaactgggactgttttatctttcatgacgttgatctagtacctgagaacgacttcaatctgtacaaatgcgaagaacacccaaagcatctggtggttggccgaaactccaccggctaccggctgcgctatagcggatactttggcggagttaccgctttatcaagggagcagttctttaaagtaaatggattctccaataattactggggctggggaggcgaagacgacgacttaagactgcgcgtggaactgcagcgcatgaaaataagtcgccctcttcctgaagtgggtaaatacacaatggtctttcacacaagggataaaggaaatgaggtgaacgcagaacgaatgaagctattgcaccaggttagcagagtttggcgaaccgacggcctgtcttcctgctcttacaagctggtgtccgtggagcacaaccccctgtatatcaacataactgtcgatttttggttcggcgcttag

SEQ ID NO: 265752 - DNA, 2385 bp, Artificial Sequence
  derived and/or modified sequence
aagagccgcctcccgggcggctggggcggtccccgagctgctttccgcgttctcccctctccgcgggcagtgctagctcgccgcggccgcctccggggaccacctggcttcatgtgtggatttccacggctcttgcccagaggcgggtacactgtgttccaatgtgccacggaactcacgcagtggcactttgtggcttcatgaaggaagaggcaggccacgcaacacttcctccccaagccaaggagaagtatcacttttagaggcagaggagcggaaggcagtgggtgtgaccaaaagtgccatttgttaaagcttatcttccttgccagattttaaaaactattatggaaaatctcaagcattcacaaaagtagagagaaagaaaggactctcagactgttggagcagaactactgagaaaaaccaggcattgtatcttcagttgtcatcaagttcgcaatcagattggaaaagctcaacttgaagctttcttgcctgcagtgaagcagagagatagatattattcacgtaataaaaaacatgggcttcaacctgactttccacctttcctacaaattccgattactgttgctgttgactttgtgcctgacagtggttgggtgggccaccagtaactacttcgtgggtgccattcaagagattcctaaagcaaaggagttcatggctaatttccataagaccctcattttggggaagggaaaaactctgactaatgaagcatccacgaagaaggtagaacttgacaactgcccttctgtgtctccttacctcagaggccagagcaagctcattttcaaaccagatctcactttggaagaggtacaggcagaaaatcccaaagtgtccagaggccggtatcgccctcaggaatgtaaagctttacagagggtcgccatcctcgttccccaccggaacagagagaaacacctgatgtacctgctggaacatctgcatcccttcctgcagaggcagcagctggattatggcatctacgtcatccaccaggctgaaggtaaaaagtttaatcgagccaaactcttgaatgtgggctatctagaagccctcaaggaagaaaattgggactgctttatattccacgatgtggacctggtacccgagaatgactttaacctttacaagtgtgaggagcatcccaagcatctggtggttggcaggaacagcactgggtacaggttacgttacagtggatattttgggggtgttactgccctaagcagagagcagtttttcaaggtgaatggattctctaacaactactggggatggggaggcgaagacgatgacctcagactcagggttgagctccaaagaatgaaaatttcccggcccctgcctgaagtgggtaaatatacaatggtcttccacactagagacaaaggcaatgaggtgaacgcagaacggatgaagctcttacaccaagtgtcacgagtctggagaacagatgggttgagtagttgttcttataaattagtatctgtggaacacaatcctttatatatcaacatcacagtggatttctggtttggtgcatgaccctgggtcttttggtgatgtttggaagaactgattctttgtttgcaataattttggcctagagacttcaaatagtagcacacattaagaacctgttacagctcattgttgagctgaatttttcctttttgtattttcttagcagagctcctggtgatgtagagtataaaacagttgtaacaagacagctttcttagtcattttgatcatgagggttaaatattgtaatatggatacttgaaggactttatataaaaggatgactcaaaggataaaatgaacgctatttgaggactctggttgaaggagatttatttaaatttgaagtaatatattatgggataaaaggccacaggaaataagactgctgaatgtctgagagaaccagagttgttctcgtccaaggtagaaaggtacgaagatacaatactgttattcatttatcctgtacaatcatctgtgaagtggtggtgtcaggtgagaaggcgtccacaaaagaggggagaaaaggcgacgaatcaggacacagtgaacttgggaatgaagaggtagcaggagggtggagtgtcggctgcaaaggcagcagtagctgagctggttgcagctgctgatagccttcaggggaggacctgcccaggtatgccttccagtgatgcccaccagagaatacattctctattagtttttaaagagtttttgtaaaatgattttgtacaagtaggatatgaattagcagtttacaagtttacatattaactaataataaatatgtctatcaaatacctctgtagtaaaatgtgaaaaagc

SEQ ID NO: 265753 - DNA, 2459 bp, Artificial Sequence
  derived and/or modified sequence
aaagccacccagaggccgaggcgtcaaccctccgtttccctcccggtgctccttccagcgcccggtgtggtcgatttggcgggggtggagcgccaggcgcgtgcagagccgggcggaccagcctctccggccaaggcgggaggcggagctcgtactcaagagccgcctcccgggcggctggggcggtccccgagctgctttccgcgttctcccctctccgcgggcagtgctagctcgccgcggccgcctccggggaccacctggcttcatgtgtggatttccacggctcttgcccagaggcgggtacactgtgttccaatgtgccacggaactcacgcagtggcactttgtggcttcatgaaggaagaggcaggccacgcaacacttcctccccaagccaaggagaagtatcacttttagaggcagaggagcggaaggcagtgggtgtgaccaaaagtgccatttgttaaagactgttggagcagaactactgagaaaaaccaggcattgtatcttcagttgtcatcaagttcgcaatcagattggaaaagctcaacttgaagctttcttgcctgcagtgaagcagagagatagatattattcacgtaataaaaaacatgggcttcaacctgactttccacctttcctacaaattccgattactgttgctgttgactttgtgcctgacagtggttgggtgggccaccagtaactacttcgtgggtgccattcaagagattcctaaagcaaaggagttcatggctaatttccataagaccctcattttggggaagggaaaaactctgactaatgaagcatccacgaagaaggtagaacttgacaactgcccttctgtgtctccttacctcagaggccagagcaagctcattttcaaaccagatctcactttggaagaggtacaggcagaaaatcccaaagtgtccagaggccggtatcgccctcaggaatgtaaagctttacagagggtcgccatcctcgttccccaccggaacagagagaaacacctgatgtacctgctggaacatctgcatcccttcctgcagaggcagcagctggattatggcatctacgtcatccaccaggctgaaggtaaaaagtttaatcgagccaaactcttgaatgtgggctatctagaagccctcaaggaagaaaattgggactgctttatattccacgatgtggacctggtacccgagaatgactttaacctttacaagtgtgaggagcatcccaagcatctggtggttggcaggaacagcactgggtacaggttacgttacagtggatattttgggggtgttactgccctaagcagagagcagtttttcaaggtgaatggattctctaacaactactggggatggggaggcgaagacgatgacctcagactcagggttgagctccaaagaatgaaaatttcccggcccctgcctgaagtgggtaaatatacaatggtcttccacactagagacaaaggcaatgaggtgaacgcagaacggatgaagctcttacaccaagtgtcacgagtctggagaacagatgggttgagtagttgttcttataaattagtatctgtggaacacaatcctttatatatcaacatcacagtggatttctggtttggtgcatgaccctgggtcttttggtgatgtttggaagaactgattctttgtttgcaataattttggcctagagacttcaaatagtagcacacattaagaacctgttacagctcattgttgagctgaatttttcctttttgtattttcttagcagagctcctggtgatgtagagtataaaacagttgtaacaagacagctttcttagtcattttgatcatgagggttaaatattgtaatatggatacttgaaggactttatataaaaggatgactcaaaggataaaatgaacgctatttgaggactctggttgaaggagatttatttaaatttgaagtaatatattatgggataaaaggccacaggaaataagactgctgaatgtctgagagaaccagagttgttctcgtccaaggtagaaaggtacgaagatacaatactgttattcatttatcctgtacaatcatctgtgaagtggtggtgtcaggtgagaaggcgtccacaaaagaggggagaaaaggcgacgaatcaggacacagtgaacttgggaatgaagaggtagcaggagggtggagtgtcggctgcaaaggcagcagtagctgagctggttgcagctgctgatagccttcaggggaggacctgcccaggtatgccttccagtgatgcccaccagagaatacattctctattagtttttaaagagtttttgtaaaatgattttgtacaagtaggatatgaattagcagtttacaagtttacatattaactaataataaatatgtctatcaaatacctctgtagtaaaatgtgaaaaagc

SEQ ID NO: 265754 - DNA, 2494 bp, Artificial Sequence
  derived and/or modified sequence
accggctcaggtgctggcgttccgcgcggcgccgcctctgctgcgggccgggggagccagacgaggtgctgccgggtaggaaaaaatccagggctcattcataccccaggtcacgattccggggtcgcccccagcacttctccgccgggtgcatcaacctgaaaaagccccttcttcctggaaaccctccttctccagcgtttcaacggggaaactgatcagctgacaccagccccagtcctgcgaggggccggcgacctttgacctttctccaaaggggaccacctggcttcatgtgtggatttccacggctcttgcccagaggcgggtacactgtgttccaatgtgccacggaactcacgcagtggcactttgtggcttcatgaaggaagaggcaggccacgcaacacttcctccccaagccaaggagaagtatcacttttagaggcagaggagcggaaggcagtgggtgtgaccaaaagtgccatttgttaaagactgttggagcagaactactgagaaaaaccaggcattgtatcttcagttgtcatcaagttcgcaatcagattggaaaagctcaacttgaagctttcttgcctgcagtgaagcagagagatagatattattcacgtaataaaaaacatgggcttcaacctgactttccacctttcctacaaattccgattactgttgctgttgactttgtgcctgacagtggttgggtgggccaccagtaactacttcgtgggtgccattcaagagattcctaaagcaaaggagttcatggctaatttccataagaccctcattttggggaagggaaaaactctgactaatgaagcatccacgaagaaggtagaacttgacaactgcccttctgtgtctccttacctcagaggccagagcaagctcattttcaaaccagatctcactttggaagaggtacaggcagaaaatcccaaagtgtccagaggccggtatcgccctcaggaatgtaaagctttacagagggtcgccatcctcgttccccaccggaacagagagaaacacctgatgtacctgctggaacatctgcatcccttcctgcagaggcagcagctggattatggcatctacgtcatccaccaggctgaaggtaaaaagtttaatcgagccaaactcttgaatgtgggctatctagaagccctcaaggaagaaaattgggactgctttatattccacgatgtggacctggtacccgagaatgactttaacctttacaagtgtgaggagcatcccaagcatctggtggttggcaggaacagcactgggtacaggttacgttacagtggatattttgggggtgttactgccctaagcagagagcagtttttcaaggtgaatggattctctaacaactactggggatggggaggcgaagacgatgacctcagactcagggttgagctccaaagaatgaaaatttcccggcccctgcctgaagtgggtaaatatacaatggtcttccacactagagacaaaggcaatgaggtgaacgcagaacggatgaagctcttacaccaagtgtcacgagtctggagaacagatgggttgagtagttgttcttataaattagtatctgtggaacacaatcctttatatatcaacatcacagtggatttctggtttggtgcatgaccctgggtcttttggtgatgtttggaagaactgattctttgtttgcaataattttggcctagagacttcaaatagtagcacacattaagaacctgttacagctcattgttgagctgaatttttcctttttgtattttcttagcagagctcctggtgatgtagagtataaaacagttgtaacaagacagctttcttagtcattttgatcatgagggttaaatattgtaatatggatacttgaaggactttatataaaaggatgactcaaaggataaaatgaacgctatttgaggactctggttgaaggagatttatttaaatttgaagtaatatattatgggataaaaggccacaggaaataagactgctgaatgtctgagagaaccagagttgttctcgtccaaggtagaaaggtacgaagatacaatactgttattcatttatcctgtacaatcatctgtgaagtggtggtgtcaggtgagaaggcgtccacaaaagaggggagaaaaggcgacgaatcaggacacagtgaacttgggaatgaagaggtagcaggagggtggagtgtcggctgcaaaggcagcagtagctgagctggttgcagctgctgatagccttcaggggaggacctgcccaggtatgccttccagtgatgcccaccagagaatacattctctattagtttttaaagagtttttgtaaaatgattttgtacaagtaggatatgaattagcagtttacaagtttacatattaactaataataaatatgtctatcaaatacctctgtagtaaaatgtgaaaaagctttgagtgtt

SEQ ID NO: 265755 - protein, 202 aa, Artificial Sequence
  derived and/or modified sequence
MASQGRRRRPLRRPETVVPGEATETDSERSASSSEEEELYLGPSGPTRGRPTGLRVAGEAAETDSEPEPEPEPTAAPRDLPPLVVQRESAEEAWGTEEAPAPAPARSLLQLRLAESQARLDHDVAAAVSGVYRRAGRDVAALASRLAAAQAAGLAAAHSVRLARGDLCALAERLDIVAGCRLLPDIRGVPGTEPEKDPGPRA

SEQ ID NO: 265756 - DNA, 609 bp, Artificial Sequence
  derived and/or modified sequence
atggcttctcaaggtcgccgacgtcggcctcttaggcgtcctgaaacggtcgtgcccggtgaagcaaccgaaacagatagtgagcggtctgcaagtagctctgaggaagaagaactgtacctgggaccttctggtcctacaaggggacgaccgactgggctgcgagtggctggagaggccgcagaaactgattccgaaccagaacccgagcccgagccgaccgcggcaccgcgcgaccttcctcctcttgtagtgcagagagagtccgctgaggaggcctggggaacagaggaggcccccgctcccgcccccgcccgaagcctgttacagctgagactggcagagagtcaggctaggttagaccatgacgtggctgctgcagtgagcggggtatatagacgcgccggaagagacgtcgccgccctggcgtcccgcctcgctgctgcccaagccgcgggtctcgctgccgctcactcggtgcgcctggcccgcggcgatctgtgtgcactggctgaacgcctagacatagtagccggctgcaggttgctcccagatattcggggagttccgggcacagagccagaaaaagacccagggccaagggcctag

SEQ ID NO: 265757 - DNA, 609 bp, Artificial Sequence
  derived and/or modified sequence
atggccagccagggcagaagaagaagacccctgcggcggcctgagaccgtggtgcctggagaggccacagaaacagattctgagaggtctgccagcagcagcgaggaggaggagctgtacctgggccccagcggccccacccggggccggcccaccggcctgcgggtggccggggaggccgctgagacagattctgagcctgagcctgagcctgagcccacagctgccccccgggacctgccccccctggtggtgcagcgggagagcgctgaggaggcctggggcacagaggaggccccagccccagccccagcccggagcctgctgcagctgcggctggccgagagccaggcccggctggaccatgatgtggccgctgctgtgtctggagtgtacagaagagctggaagagatgtggccgccctggccagccggctggccgccgcccaggccgccggcctggccgccgcccacagcgtgcggctggcccggggggacctgtgtgccctggccgagcggctggacatcgtggccggctgccgcctgctgcctgacatccggggcgtgcccggcacagagcctgagaaggaccccggcccccgggcctag

SEQ ID NO: 265758 - DNA, 609 bp, Artificial Sequence
  derived and/or modified sequence
atggccagccagggccggcggcggcggcccctgcggcggcccgagaccgtcgtgcccggtgaagctaccgagaccgacagcgaacgttccgcctcaagcagtgaggaagaggaactgtatcttggcccttccggaccaactaggggccgccccacaggcctcagagttgcaggggaggcggcggagacagactccgaaccagagcccgaacccgagcctactgccgccccacgggatctcccgccacttgtggttcaacgcgaatctgctgaagaggcatgggggacagaggaagcgccagcccctgcacccgcacggtctcttctgcagctccggcttgctgaaagccaggcaaggcttgaccacgatgtggctgccgctgtcagcggcgtttatcggcgggcgggacgcgatgtagcagcacttgccagcagacttgcggccgcacaggcagcggggctggcggcagcacactccgtgcgtctggccaggggggacctgtgcgcgttggccgaacggttagacatagttgctggttgtcggttactgcctgatatccggggcgtccccggtaccgagccggaaaaagatccaggcccccgcgcctag

SEQ ID NO: 265759 - DNA, 609 bp, Artificial Sequence
  derived and/or modified sequence
atggcaagtcagggccgacggaggcggcctcttaggcgcccagaaactgtcgtgcctggcgaggccaccgaaaccgactctgagaggtcagcctcatcgtcagaggaagaggagctgtatctgggccctagcgggcctactcgcggtcgacctacggggctcagggtggccggtgaggccgctgagactgacagcgagccagagccggaacctgagccaacagcagctccacgggatctgcctcccctggtcgttcagagggaatccgcggaagaagcttgggggactgaagaggccccagcgcctgctcctgcaaggagcctgcttcaacttcggctggcagagtcccaagccaggctcgatcacgacgtggcagcggctgtttccggagtctaccgacgcgcaggcagagatgtcgccgctctggcgagccgccttgccgcagctcaagccgctgggcttgcggctgctcacagtgtgcgcctcgcgagaggtgatctctgtgccctcgctgagagactcgacatcgtagccggttgccgcttgctccctgatatccgcggagtaccagggacagagcccgagaaggatcctggacctcgagcctag

SEQ ID NO: 265760 - DNA, 2599 bp, Artificial Sequence
  derived and/or modified sequence
gaaatcacagcccttcagctgccacggtgagaacgcagcactcgggttaggaagcggatctcgcaagctccgagcgtcagctgccggttcggtgccatggcgtcccagggtcgtcggcggaggcccctgcggaggccggagacggtggtgccgggggaggcgaccgagacggattccgagcgctctgcgtcctcgtcggaggaggaggagctgtacctgggtccttcgggcccgacgcgcggccgccccacggggctgcgggtggctggggaagccgcggagaccgactcggagccggagccggagccggaaccgacggccgcgccgagggacctgcctccactcgtggtgcagcgggaatcggcggaggaggcctggggcacggaggaggccccggcgcccgcccccgcgcgctcgctcctgcaacttcggctggcggagagccaggcgcggctggaccacgacgtggcggccgccgtgagcggtgtctaccgccgtgcaggccgcgacgtggccgccctggctagtaggctggcggcagcccaggcggcggggctggcggcggcccacagcgtgcgcctggcgcgcggggacctttgtgcgctggccgagcgtctggacatcgtggctggctgccgcctgctgccggacatccgcggcgtgccagggaccgagcctgagaaagacccggggccgcgggcctagccatgattctacttcccaacctgactgcaatttgggggtaggccttgctgcctctgggacctgactctgtctcctgtgtctcttatcaccccccacccccgctcccatcttggtgtcacccatgggggctaatccggtccccttggataatgctttatattggatatagttcaacccctactgcggagaccagggccccactatccttagatctggttcctctcccgatcctgaccctgccgcctggttctgagccttcccctggggcttggctccagcctttgttacatagttgctccttaatctgtttccaccctgggggctcaccaattttttttttttttttttttttttggagacagggtgtttatctgtcacccaggctagagtgcagtggcgggattactgctcactgcaacctcgacctcctgggctcaagtgatcctcccagctcagccttcaagagtagctgggactgcagacctgcaccaccacgtccagctgcccggttaatttttttctgtcggtttgaagaggggagaaggtctcactatgttgcccaggcttgtctcaaactcccgggctcaagcaatcctcccactgtggcgtcccaaagtgctggggttacaggtgtgagccaccacacactgggctctgctctgcctttctgagtttggtttctgcttatggtggggagcttgttcccgttcttcccacaagaacccaggatgtggcacagcttccctgccgtcttccttcactcagttggctacgcctcccatcctagctccacttccagaactgccttcaccctaggctgggtccttgttttgtttttagagacagggtctcactgtgtctcccaggctggagtacagtggcgtgatctcggctcactgccacctccacctcccgagttcaagcgattctcctgcctcagcctcccgagtagctaggattacaggcatgcaccaccacgcctggctactttttatatttttagtagagatgaggtttcaccttgttggccaggctggtctcgaactcctggcctcaggtgatccacccgcctcacctcctaaaatgctgggattacaggcgtgggccactgcgcctagccagctgggtccttgttctgctgcccaagcttggccctggttccgtgtgctggttctactttttgttctcccatctgcctcctgcctcctcccctttgagcttagccccgccctctcagcctgatttctgtttcccaagtccagcagtgtcgtgggataggttttgctttcttttactgtctccatcctacttacacctccctgatcctggggtctggggactccccatggtttccttccttctgcaggcccaaaatgatggcccctcttaacccaaggcaggggatcttcctcccaactccctggaccaaggtggcatttcctgcacacccctccaggccaagatgatgctcgctctcaactctgtaggccaaggtggcgtctcctcttgactctccagacctaaagtgacacccttcaggcacttcgggcccaattcagcccagtcctggtgctttcagcgccagatgacagcactttgcagataagaacgatatgatgtgtggatttcactacatttggctcctggatgctataaaaggacttggatttctgacttggctcagggactggggttagcagtctctttctgctccttttcacctgtgttttcttccgatcccagctctggtccctcagccgcattcatatttactctcctctcccagcctgatatccctgtccctcatctcaacccgaagccaagatctgagcccccaagatggagaatggggaggagctttttatggcggactgattaaaactcttaagcattt

SEQ ID NO: 265761 - DNA, 609 bp, Artificial Sequence
  derived and/or modified sequence
atggccagccagggcagaagaagaagacccctgagaagacccgagaccgtggtgcccggcgaggccaccgagaccgacagcgagagaagcgccagcagcagcgaggaggaggagctgtacctgggccccagcggccccaccagaggcagacccaccggcctgagagtggccggcgaggccgccgagaccgacagcgagcccgagcccgagcccgagcccaccgccgcccccagagacctgccccccctggtggtgcagagagagagcgccgaggaggcctggggcaccgaggaggcccccgcccccgcccccgccagaagcctgctgcagctgagactggccgagagccaggccagactggaccacgacgtggccgccgccgtgagcggcgtgtacagaagagccggcagagacgtggccgccctggccagcagactggccgccgcccaggccgccggcctggccgccgcccacagcgtgagactggccagaggcgacctgtgcgccctggccgagagactggacatcgtggccggctgcagactgctgcccgacatcagaggcgtgcccggcaccgagcccgagaaggaccccggccccagagcctag

SEQ ID NO: 265762 - protein, 107 aa, Artificial Sequence
  derived and/or modified sequence
MAAWSPAAAAPLLRGIRGLPLHHRMFATQTEGELRVTQILKEKFPRATAIKVTDISGGCGAMYEIKIESEEFKEKRTVQQHQMVNQALKEEIKEMHGLRIFTSVPKR

SEQ ID NO: 265763 - DNA, 324 bp, Artificial Sequence
  derived and/or modified sequence
atggccgcctggagtcctgctgccgcggcccctctgctccgcggcattaggggccttccgcttcaccaccgaatgtttgccacccagactgaaggggaacttagggttactcagattctgaaagagaagtttccgcgtgcaaccgccattaaggtcacagacatctccggcggatgtggggcgatgtacgaaattaagattgagtctgaagagtttaaagagaagcgcactgttcaacaacaccagatggttaatcaggccctgaaggaggaaattaaggaaatgcatgggttgagaatctttacgtcagtgcctaagcggtag

SEQ ID NO: 265764 - DNA, 324 bp, Artificial Sequence
  derived and/or modified sequence
atggccgcctggagccctgctgctgctgcccccctgctgcggggcatccggggcctgcccctgcaccacaggatgtttgccacccagacagaaggagagctgcgggtgacccagatcctgaaggagaagttcccccgggccacagccatcaaggtgacagacatcagcggcggctgtggggccatgtatgagatcaagattgaaagtgaggagttcaaggagaagaggacagtgcagcagcaccagatggtgaaccaggccctgaaggaggagatcaaggagatgcacggcctgcgcatcttcacctctgtgcccaagaggtag

SEQ ID NO: 265765 - DNA, 324 bp, Artificial Sequence
  derived and/or modified sequence
atggccgcctggagccccgccgccgccgcccccctgctgcggggcattagggggctccctctccaccacaggatgttcgccacgcagactgaaggggaactccgggttacacagattctgaaggaaaaatttcctcgcgctaccgctataaaagtgaccgacataagcggaggctgcggcgccatgtatgagatcaagattgaatctgaagagttcaaggaaaaaagaacagtgcagcagcatcaaatggtgaatcaggcacttaaggaggagatcaaagagatgcatggcctgaggatattcacctccgtaccgaaaagatag

SEQ ID NO: 265766 - DNA, 324 bp, Artificial Sequence
  derived and/or modified sequence
atggcggcatggagtcctgcagccgctgcaccactcctgagagggatccggggtctgccgttgcatcaccgcatgttcgcgacccaaacagagggcgaacttagagtgacccagattttgaaagaaaaattcccacgggctacggctataaaggttactgatattagcggtggatgtggcgctatgtacgagatcaaaatcgagtccgaggagttcaaagagaaaagaacggtccaacaacaccagatggtgaatcaagcactcaaggaggagatcaaggagatgcatggccttcgcatatttacttctgtcccaaagagatag

SEQ ID NO: 265767 - DNA, 639 bp, Artificial Sequence
  derived and/or modified sequence
ggaggctgacggcctccgggcggcagggggcggcctctcccacggcggcggctctcggtcccccgctccgcgtctttcgggcatacagtgacctcgggcggcgggtcacgtcggccgggcatggctgcatggagcccggccgcggcagcgcctctcctccgcgggatccgcgggcttccacttcaccatcggatgtttgccactcagactgagggggagctcagagtgacccaaattctcaaagaaaagtttccacgagctacagctataaaagtcactgacatttcaggaggttgtggggcgatgtatgaaattaaaattgaatcagaagaatttaaggagaagagaactgtccagcagcaccagatggttaatcaggcactaaaagaagaaatcaaagagatgcatggattgcggatatttacctctgtccccaaacgctgaccacgccctggctgcatagatgctgctgcttaagaccttggatgaacttcactgacatcattcttccctaagcagtcaccaaaaaatttatatattttgctcatatacatttccatattataattatagaagatgtataatctatttagatgttaattaaaggaaacaaacaactgaagcttttgaagggtcatt

SEQ ID NO: 265768 - DNA, 324 bp, Artificial Sequence
  derived and/or modified sequence
atggccgcctggagccccgccgccgccgcccccctgctgagaggcatcagaggcctgcccctgcaccacagaatgttcgccacccagaccgagggcgagctgagagtgacccagatcctgaaggagaagttccccagagccaccgccatcaaggtgaccgacatcagcggcggctgcggcgccatgtacgagatcaagatcgagagcgaggagttcaaggagaagagaaccgtgcagcagcaccagatggtgaaccaggccctgaaggaggagatcaaggagatgcacggcctgagaatcttcaccagcgtgcccaagagatag

SEQ ID NO: 265769 - protein, 437 aa, Artificial Sequence
  derived and/or modified sequence
MERQPGPVRGKLQIFQKTEKDPQARAGSPVQEYHTALVAGDLDHLKPLMDQFFQDANVVFEINKDEMEWQVKSPATFGLSGLWTLEYKRELTTPLCIAAAHGHTACVRHLLGRGADPDASPGGRGALHEACLGGHTACVRLLLQHRADPDLLSAEGLAPLHLCRTAASLGCAQALLEHGASVQRVGGTGRDTPLHVAAQRGLDEHARLYLGRGAHVDARNGRGETALSAACGAARRPDEHGRCLRLCALLLRRGAEADARDEDERSPLHKACGHASHSLARLLLRHGADAGALDYGGASPLGRVLQTASCALQASPQRTVQALLNHGSPTVWPDAFPKVLKTCASVPAVIEVLFNSYPQLCLSESWKEVIPEEVFQMHKPFYQSLFALALTPRCLQHLCRCALRRLFGKRCFDLIPLLPLPKPLQNYLLLEPQGVLH

SEQ ID NO: 265770 - protein, 466 aa, Artificial Sequence
  derived and/or modified sequence
MSNSDYLPDYPLNSDLVKRLKSALDAKDEERVRDLICTEITPVDAVIELANDDWMKDPSAQLPTGMLLGDLDHLKPLMDQFFQDANVVFEINKDEMEWQVKSPATFGLSGLWTLEYKRELTTPLCIAAAHGHTACVRHLLGRGADPDASPGGRGALHEACLGGHTACVRLLLQHRADPDLLSAEGLAPLHLCRTAASLGCAQALLEHGASVQRVGGTGRDTPLHVAAQRGLDEHARLYLGRGAHVDARNGRGETALSAACGAARRPDEHGRCLRLCALLLRRGAEADARDEDERSPLHKACGHASHSLARLLLRHGADAGALDYGGASPLGRVLQTASCALQASPQRTVQALLNHGSPTVWPDAFPKVLKTCASVPAVIEVLFNSYPQLCLSESWKEVIPEEVFQMHKPFYQSLFALALTPRCLQHLCRCALRRLFGKRCFDLIPLLPLPKPLQNYLLLEPQGVLH

SEQ ID NO: 265771 - DNA, 1314 bp, Artificial Sequence
  derived and/or modified sequence
atggagagacagcccggccccgtgagaggcaagctgcagatcttccagaagaccgagaaggacccccaggccagagccggcagccccgtgcaggagtaccacaccgccctggtggccggcgacctggaccacctgaagcccctgatggaccagttcttccaggacgccaacgtggtgttcgagatcaacaaggacgagatggagtggcaggtgaagagccccgccaccttcggcctgagcggcctgtggaccctggagtacaagagagagctgaccacccccctgtgcatcgccgccgcccacggccacaccgcctgcgtgagacacctgctgggcagaggcgccgaccccgacgccagccccggcggcagaggcgccctgcacgaggcctgcctgggcggccacaccgcctgcgtgagactgctgctgcagcacagagccgaccccgacctgctgagcgccgagggcctggcccccctgcacctgtgcagaaccgccgccagcctgggctgcgcccaggccctgctggagcacggcgccagcgtgcagagagtgggcggcaccggcagagacacccccctgcacgtggccgcccagagaggcctggacgagcacgccagactgtacctgggcagaggcgcccacgtggacgccagaaacggcagaggcgagaccgccctgagcgccgcctgcggcgccgccagaagacccgacgagcacggcagatgcctgagactgtgcgccctgctgctgagaagaggcgccgaggccgacgccagagacgaggacgagagaagccccctgcacaaggcctgcggccacgccagccacagcctggccagactgctgctgagacacggcgccgacgccggcgccctggactacggcggcgccagccccctgggcagagtgctgcagaccgccagctgcgccctgcaggccagcccccagagaaccgtgcaggccctgctgaaccacggcagccccaccgtgtggcccgacgccttccccaaggtgctgaagacctgcgccagcgtgcccgccgtgatcgaggtgctgttcaacagctacccccagctgtgcctgagcgagagctggaaggaggtgatccccgaggaggtgttccagatgcacaagcccttctaccagagcctgttcgccctggccctgacccccagatgcctgcagcacctgtgcagatgcgccctgagaagactgttcggcaagagatgcttcgacctgatccccctgctgcccctgcccaagcccctgcagaactacctgctgctggagccccagggcgtgctgcactag

SEQ ID NO: 265772 - DNA, 1401 bp, Artificial Sequence
  derived and/or modified sequence
atgagcaacagcgactacctgcccgactaccccctgaacagcgacctggtgaagagactgaagagcgccctggacgccaaggacgaggagagagtgagagacctgatctgcaccgagatcacccccgtggacgccgtgatcgagctggccaacgacgactggatgaaggaccccagcgcccagctgcccaccggcatgctgctgggcgacctggaccacctgaagcccctgatggaccagttcttccaggacgccaacgtggtgttcgagatcaacaaggacgagatggagtggcaggtgaagagccccgccaccttcggcctgagcggcctgtggaccctggagtacaagagagagctgaccacccccctgtgcatcgccgccgcccacggccacaccgcctgcgtgagacacctgctgggcagaggcgccgaccccgacgccagccccggcggcagaggcgccctgcacgaggcctgcctgggcggccacaccgcctgcgtgagactgctgctgcagcacagagccgaccccgacctgctgagcgccgagggcctggcccccctgcacctgtgcagaaccgccgccagcctgggctgcgcccaggccctgctggagcacggcgccagcgtgcagagagtgggcggcaccggcagagacacccccctgcacgtggccgcccagagaggcctggacgagcacgccagactgtacctgggcagaggcgcccacgtggacgccagaaacggcagaggcgagaccgccctgagcgccgcctgcggcgccgccagaagacccgacgagcacggcagatgcctgagactgtgcgccctgctgctgagaagaggcgccgaggccgacgccagagacgaggacgagagaagccccctgcacaaggcctgcggccacgccagccacagcctggccagactgctgctgagacacggcgccgacgccggcgccctggactacggcggcgccagccccctgggcagagtgctgcagaccgccagctgcgccctgcaggccagcccccagagaaccgtgcaggccctgctgaaccacggcagccccaccgtgtggcccgacgccttccccaaggtgctgaagacctgcgccagcgtgcccgccgtgatcgaggtgctgttcaacagctacccccagctgtgcctgagcgagagctggaaggaggtgatccccgaggaggtgttccagatgcacaagcccttctaccagagcctgttcgccctggccctgacccccagatgcctgcagcacctgtgcagatgcgccctgagaagactgttcggcaagagatgcttcgacctgatccccctgctgcccctgcccaagcccctgcagaactacctgctgctggagccccagggcgtgctgcactag

SEQ ID NO: 265773 - DNA, 1314 bp, Artificial Sequence
  derived and/or modified sequence
atggaacgccagcctggcccagtgcgaggcaagttacaaatcttccagaagacagagaaggatccacaagctagggcgggatcccctgttcaggaataccacaccgctttggtggcaggagacctggaccacttgaaaccattgatggatcagttttttcaagacgccaacgtggtttttgagatcaacaaagatgagatggagtggcaggtcaaatccccggcgacatttgggctctctggactttggacactcgaatataaaagagagcttacgacccccttgtgcattgcagctgcccacgggcataccgcatgcgtgaggcacctgctcggtcgaggcgcagaccccgacgcctcccccgggggccgcggcgctcttcacgaggcgtgtcttggggggcacactgcttgtgtgcgcttactcttgcaacacagggccgaccccgacctcctatcagccgagggtttggccccgctacacctgtgcaggaccgccgcatccctgggctgtgcccaggccttgctcgagcatggcgccagcgtgcagcgtgtgggcggaacaggcagggatacccctctccacgttgccgcgcagcggggcctggatgaacacgcgaggctttatctgggtcgtggagcccatgtcgacgccaggaacgggcggggagagacagcactgtctgccgcctgtggagccgctcgtcggccagatgagcacggaaggtgcttgaggttgtgtgcactcctgcttcggaggggggctgaagccgatgcgagggacgaggacgaacggagccccctccataaagcttgtggacatgcgtcacattctttggcccgacttctcctgagacacggtgcggacgcaggcgctctggattatggaggtgcaagccctctgggcagggtgctgcaaacggcctcgtgtgccctccaagcctccccccagagaacggtacaggccttgctcaatcatgggtctcccacggtgtggcccgacgctttccccaaggtgctcaaaacgtgcgcctccgtgccagctgtgattgaggttctcttcaactcgtaccctcagctctgcctctctgagagctggaaagaggtgattcccgaggaagtcttccagatgcacaagccattctatcagtcactattcgccctggccctgacacctagatgccttcagcatttgtgcagatgcgcacttcgccgcttgttcgggaagcgctgctttgatctcatcccactgctgcccctccccaagccactgcaaaattaccttctcctagaaccccagggggtactgcattag

SEQ ID NO: 265774 - DNA, 1401 bp, Artificial Sequence
  derived and/or modified sequence
atgtcgaacagtgattatcttccggactacccactgaactccgatttggtgaaacggctcaagtccgcgctcgacgccaaagatgaagaacgcgtcagagacctcatttgcaccgaaattacgcctgtcgacgctgtcatcgagcttgccaatgacgactggatgaaagatccaagcgcgcagctgcctacgggtatgctcttaggcgatctggaccatctaaaaccgctgatggaccagttctttcaagacgcaaacgtagtgttcgagattaacaaagacgaaatggagtggcaagttaagtccccagcgacattcggactgtcaggattgtggacacttgaatataagcgggaactgaccacccctctctgtatcgccgcagcccatggccacactgcttgcgttcggcacctgctgggtaggggcgccgacccagacgcatctcccgggggccggggcgcactgcacgaagcctgcttgggtgggcacacagcgtgcgtaagattgctgttgcagcatcgagccgatcccgacctgctgagcgctgaagggctggccccattacatttgtgccgcacagccgcttcactcgggtgtgcgcaggctctgttagaacacggggcaagtgttcagagggttggggggacggggcgtgatacaccgcttcacgttgctgcccaaagagggttggacgagcatgcacgtttgtacttgggccgaggtgctcacgtcgatgctagaaacggcaggggtgaaaccgcgctcagcgcggcttgcggagctgcaagaagaccagacgaacacggcaggtgcctgagactgtgcgcactgctgctgaggcggggagccgaggctgatgctcgcgacgaagacgaacgatctccactgcacaaagcttgcgggcacgcctcccactctcttgcgcggctcctactgcgccacggcgcggacgccggagccctggattacggaggggcctcccccctcggacgagtgctgcagacagcatcgtgcgcactacaggcaagccctcagagaactgtgcaagctctgttaaatcacggcagtccaaccgtgtggcccgatgcattccccaaggttttaaaaacttgtgctagcgtgcctgccgtcatagaagtgctgtttaactcttatccacaactttgtctgagcgagtcatggaaggaggtgatacctgaggaggtgttccagatgcataaaccattctatcagagccttttcgctctggccctcacccctaggtgcctccaacacctgtgccgctgcgcactcaggagattgttcggcaaacggtgttttgatctcattcctcttcttcccctacctaaacctctccagaattacttgctattggaacctcagggagttctacattag

SEQ ID NO: 265775 - DNA, 1314 bp, Artificial Sequence
  derived and/or modified sequence
atggagcggcagcccggccctgtgcggggcaagctgcagatcttccagaagacagagaaggacccccaggcccgggccggcagccctgtgcaggagtaccacacagccctggtggccggggacctggaccacctgaagcccctgatggaccagttcttccaggatgccaacgtggtgtttgagatcaacaaggatgagatggagtggcaggtgaagagccctgccaccttcggcctgagcggcctgtggaccctggagtacaagcgggagctgaccacccccctgtgcatcgctgctgcccacggccacacagcctgtgtgcgccacctgctgggcagaggagctgaccctgatgccagccctgggggccgcggggccctgcacgaggcctgcctgggcggccacacagcctgtgtgcggctgctgctgcagcacagagctgaccctgacctgctgtctgctgagggcctggcccccctgcacctgtgcaggacagctgccagcctgggctgtgcccaggccctgctggagcacggggcctctgtgcagagggtgggcggcaccggccgggacacccccctgcacgtggccgcccagaggggcctggatgaacatgcccggctgtacctgggccgcggggcccacgtggatgccagaaatggccgcggggagacagccctgtctgctgcctgtggggccgcccggcggccagatgagcacggccgctgcctgcggctgtgtgccctgctgctgcggagaggagctgaggctgatgccagagatgaagatgagaggagccccctgcacaaggcctgtggccacgccagccacagcctggcccggctgctgctgcggcacggggctgatgctggggccctggactatggaggagccagccccctgggccgggtgctgcagacagccagctgtgccctgcaggccagcccccagaggacagtgcaggccctgctgaaccacggcagccccaccgtgtggccagatgccttccccaaggtgctgaagacctgtgcctctgtgcctgctgtgattgaggtgctcttcaacagctacccccagctgtgcctgtctgagagctggaaggaggtgattcctgaggaggtgttccagatgcacaagcccttctaccagagcctgtttgccctggccctgaccccccgctgcctgcagcacctgtgccgctgtgccctgcggcggctgtttgggaagcgctgctttgacctgatccccctgctgcccctgcccaagcccctgcagaactacctgctgctggagccccagggcgtgctgcactag

SEQ ID NO: 265776 - DNA, 1401 bp, Artificial Sequence
  derived and/or modified sequence
atgagcaacagcgactacctgcctgactaccccctgaacagcgacctggtgaagaggctgaagagcgccctggatgccaaggatgaggagcgggtgcgggacctgatctgcacagagatcacccctgtggatgctgtgattgagctggccaatgatgactggatgaaggaccccagcgcccagctgcccaccggcatgctgctgggggacctggaccacctgaagcccctgatggaccagttcttccaggatgccaacgtggtgtttgagatcaacaaggatgagatggagtggcaggtgaagagccctgccaccttcggcctgagcggcctgtggaccctggagtacaagcgggagctgaccacccccctgtgcatcgccgccgcccacggccacacagcctgtgtgcgccacctgctgggccgcggggctgaccctgatgccagccctgggggccgcggggccctgcacgaggcctgcctgggcggccacacagcctgtgtgcggctgctgctgcagcacagagctgaccctgacctgctgtctgctgagggcctggcccccctgcacctgtgcaggacagctgccagcctgggctgtgcccaggccctgctggagcacggggcctctgtgcagagggtgggcggcaccggccgggacacccccctgcacgtggccgcccagaggggcctggatgagcacgcccggctgtacctgggccgcggggcccacgtggatgccagaaatggccgcggggagacagccctgtctgctgcctgtggggccgcccggcggccagatgaacatggccgctgcctgcggctgtgtgccctgctgctgcggagaggagctgaggctgatgccagagatgaagatgagaggagccccctgcacaaggcctgtggccacgccagccacagcctggcccggctgctgctgcggcatggagcagatgctggggccctggactatggaggagccagccccctgggccgggtgctgcagacagccagctgtgccctgcaggccagcccccagaggacagtgcaggccctgctgaaccacggcagccccaccgtgtggccagatgccttccccaaggtgctgaagacctgtgcctctgtgcctgctgtgattgaggtgctcttcaacagctacccccagctgtgcctgtctgagagctggaaggaggtgattcctgaggaggtgttccagatgcacaagcccttctaccagagcctgtttgccctggccctgaccccccgctgcctgcagcacctgtgccgctgtgccctgcggcggctgtttgggaagcgctgctttgacctgatccccctgctgcccctgcccaagcccctgcagaactacctgctgctggagccccagggcgtgctgcactag

SEQ ID NO: 265777 - DNA, 2829 bp, Artificial Sequence
  derived and/or modified sequence
gatgacaattgagtaatgacaatagaaatagctcacactccataagaccatctttcccgttcctgaagaactcttctgaaatcgacggcatctcaatggagagacagccagggccagtgagaggaaaacttcaaatatttcaaaagacagagaaggatcctcaagctagagcagggtccccggtgcaggagtaccacactgccctggtcgcaggggacctcgaccatctgaagcccctcatggaccagttcttccaggatgccaacgtggtgtttgagatcaataaggatgagatggaatggcaggtgaaatctccagccacgtttggactatcaggcctctggaccctggagtacaagcgtgagctcaccacgcccctgtgcatcgccgcggcccacggccacaccgcctgcgtgcgacacctgctcggccgcggcgcagacccagacgccagccccggcggccgcggcgccctgcacgaggcctgcctcgggggccacaccgcctgcgtccgcctgctgctgcagcaccgcgccgaccccgacctgctcagcgccgagggcctggcgcctctgcacctctgccgcacggccgcctcgctcgggtgcgcgcaggcgctgctggagcacggggcctcggtgcagcgcgtgggcggcacgggccgggacacgccgctgcacgtggcggcgcagcgcggcctggacgagcacgcgcgcctgtacctgggccgcggggcgcacgtggacgcgaggaacggccgcggagagacggctctgagcgcggcctgcggtgcggcgcggaggcccgacgagcacgggcgctgcctgcgcctgtgcgcgctgctgctgcggcgcggggcggaggcggacgcgcgcgacgaggacgagcgcagcccgctgcacaaagcctgcggccacgcgagccacagcctggcgcgcctcctactgcggcacggcgccgacgcgggcgcgctcgactatggcggggcctcgccgctgggccgcgtgctccagaccgcatcctgcgctctccaggcctcaccgcagcgcacggtgcaggcgctgctcaaccacggctctcccaccgtgtggcccgacgccttccccaaggtgctgaagacctgtgcatctgtccccgcagtcatcgaggtgcttttcaactcctaccctcagctctgcttgtcagagtcctggaaggaagtgattcctgaggaagtattccagatgcacaagccgttctaccagtccctctttgccttggccctcaccccacgctgcctgcagcatctttgccgctgtgctcttcgcagactgtttggcaaaaggtgctttgacctcatccccctgttacccttgccaaagcccctgcagaattacctacttttggagccacagggtgttttgcactgaaacgcagaacgctgcaaccaatactgttgttctcctcgctgaccttccatggaggccgtgtgttggagagtgccctgatgcagatggaggtgatgggagttcccttcccacttgctctccgtgggaccgggtgaagcacagaccttgccaagcttcaggttcacctcgaaatggaattggcaacaaaagccctttctgcctctcagggtcgcttgtgaaaatccagtgaaatcgtgactatcacagcacttggtctgggaaagtacctttcaacaacagttaagccaaaaggtacagtgagtcctcacttaaggtcttcgataggttctagggaaccagctttaagctaaatgaggtataacaatgccagttttcccaaggttaattgatataaacaagaatgatgttcctacagcatatttctggtcacaaaaagatcaccacacttctaaataaagaccaatacaattctaatagtaaagattgaaataaaggcaagctacacatacctttaaaagagattaataacaagtaagataattatttacccaatttttggtgaatcagtatgtgatggtggttgtcctgctggtgggttagatcaaggaataaatgtttgcaaaacgaaccttgtcaggagcacctcctaccaccacgaagttcagaacagtcaccaatgtggcaggcttgctaggccctctcataccgcatcatttattgtcatgcatttggatgattattgtatgccttatgaatttttactttacaataatttgtattcattcattcattcattcattcatattctaatgtgcttattctagttcagggtcgtgcgtggccagagtccaccccagcaactcagtgtgcagggcaggaaccaggcctggacggggtgctattccatcgcagggtgctcacacacccccacacccacccacccacacacaacactgggacaattcagacacgacagctcacctcacttgctcagctttgggatgtgggtgggaactggagcacccagagaaaacccatacagacagtggccttgcccaggaatcagtcttgtttcttttttgtttttttgtttgtttgtttgtttgttttgagactggcgcaatcttggctcaccgcaacctccgcctcccaggttcaagcaattctcctgcttcagccttcctggtagctgggataacaggcatgtgccagcacgcccggctaattttttatttttagtagagacggggtttctccatgttcgtcaggctggtctcaaactcccgatctcaggtgatctgcccgcctcggcctcccaaagtgctgggattacaggcatgagtcaccatgccctgccgaatcagttttgtttcttatcggtgttataataaaatgacattaaacaaaacattatttaagg

SEQ ID NO: 265778 - DNA, 1401 bp, Artificial Sequence
  derived and/or modified sequence
atgtccaactcggattaccttcccgactacccactcaactcagatttagtgaagagattaaagtctgccctggatgccaaagatgaggagagagtgagggatttaatctgcactgaaatcacgcctgtggacgctgtgatagaactggccaatgacgactggatgaaagacccctcggctcagctgcccaccggcatgctgctaggggacctcgaccatctgaagcccctcatggaccagttcttccaggatgccaacgtggtgtttgagatcaataaggatgagatggaatggcaggtgaaatctccagccacgtttggactatcaggcctctggaccctggagtacaagcgtgagctcaccacgcccctgtgcatcgccgcggcccacggccacaccgcctgcgtgcgacacctgctcggccgcggcgcagacccagacgccagccccggcggccgcggcgccctgcacgaggcctgcctcgggggccacaccgcctgcgtccgcctgctgctgcagcaccgcgccgaccccgacctgctcagcgccgagggcctggcgcctctgcacctctgccgcacggccgcctcgctcgggtgcgcgcaggcgctgctggagcacggggcctcggtgcagcgcgtgggcggcacgggccgggacacgccgctgcacgtggcggcgcagcgcggcctggacgagcacgcgcgcctgtacctgggccgcggggcgcacgtggacgcgaggaacggccgcggagagacggctctgagcgcggcctgcggtgcggcgcggaggcccgacgagcacgggcgctgcctgcgcctgtgcgcgctgctgctgcggcgcggggcggaggcggacgcgcgcgacgaggacgagcgcagcccgctgcacaaagcctgcggccacgcgagccacagcctggcgcgcctcctactgcggcacggcgccgacgcgggcgcgctcgactatggcggggcctcgccgctgggccgcgtgctccagaccgcatcctgcgctctccaggcctcaccgcagcgcacggtgcaggcgctgctcaaccacggctctcccaccgtgtggcccgacgccttccccaaggtgctgaagacctgtgcatctgtccccgcagtcatcgaggtgcttttcaactcctaccctcagctctgcttgtcagagtcctggaaggaagtgattcctgaggaagtattccagatgcacaagccgttctaccagtccctctttgccttggccctcaccccacgctgcctgcagcatctttgccgctgtgctcttcgcagactgtttggcaaaaggtgctttgacctcatccccctgttacccttgccaaagcccctgcagaattacctacttttggagccacagggtgttttgcactga

SEQ ID NO: 265779 - DNA, 1314 bp, Artificial Sequence
  derived and/or modified sequence
atggagcggcagcccggccccgtgcggggcaagctgcagatcttccagaagaccgagaaagatccacaggctagggcgggctcgccagttcaagagtatcataccgccctggttgctggggacttagatcatctcaagccgcttatggaccaatttttccaggacgctaatgtggtctttgagattaacaaagacgaaatggaatggcaggtaaagagcccggctaccttcggcctgtctggattatggacactcgagtataagagagagctcaccacgcctctgtgcatcgcagcagcacatggccacacagcttgtgtgagacatctgctgggcagaggtgcggatcctgacgcaagtccgggagggagaggggctttacatgaggcatgtctgggagggcacaccgcttgcgtccgtctgttgcttcagcatcgagccgatcccgatctactgtctgccgaagggttggcaccgctacacctttgtcgaaccgccgcttcccttgggtgtgctcaagccctgcttgaacacggggccagcgtacagcgagtgggggggactggccgcgatacccccctgcatgtcgccgctcaacgtggcctggacgaacatgcccgcctctacctgggacggggcgcacatgtcgatgctcgaaatggacggggcgaaaccgccctgtccgctgcatgcggagcagccaggaggcccgatgagcacggtcgatgtctacgcctgtgcgccctcctcctaagacgaggcgctgaggctgacgcacgagatgaggatgaacgttccccattgcacaaagcctgcgggcacgctagccactctctcgcccgcctgcttcttcgacatggggctgacgcaggggcccttgattacggcggggcatccccgcttgggagagtgctccaaacagctagttgcgctctccaagcctctccccaacggacggtccaggccctgctgaaccacgggagccccacagtatggcctgacgcattccccaaggtacttaagacatgtgcttctgtgcccgccgtgatcgaggtcttattcaatagttatccccagctctgtcttagtgagagctggaaggaggtgatcccagaggaggtgtttcagatgcacaaacccttctatcagagtctgtttgctcttgctctcacgccccgttgcctgcagcatctatgccgctgcgcactgcgcagactgtttgggaagagatgttttgatctgatccctctgctgcccttgccgaaacccctccagaattacctgttactcgagccccagggcgtcctccactag

SEQ ID NO: 265780 - DNA, 1401 bp, Artificial Sequence
  derived and/or modified sequence
atgagcaacagcgactacctgcccgactaccccctgaacagcgaccttgtgaagcggctgaagagcgcactggacgccaaggatgaagaacgggttcgcgatttgatctgcaccgaaatcacaccagtcgacgctgtcatcgagctggccaatgacgactggatgaaggatccaagtgcccagctccccactggaatgctgctcggagatctcgaccacctgaaacctttgatggaccagttctttcaggatgccaacgtggtgttcgaaatcaataaggatgagatggagtggcaagtgaaatccccagcgaccttcggtttaagtggtctttggacactggagtataaacgggagctcaccacaccactctgcatcgcggccgcccatggacacactgcatgtgtgcgtcacctgctgggacgcggggccgaccccgacgcgtctcccggcggtcggggggctctccacgaggcatgcctgggcggacacaccgcgtgtgtccgactgctgctgcagcaccgcgccgacccagacctcctctcagcagaagggctggcgccactgcacttgtgtcggactgccgcgtccctgggttgtgcccaagcactcttagaacatggagcatcagtgcagagggtgggcggtacgggccgggatactccgctccacgttgcagcccagcggggactggacgagcacgcacgactgtatttaggccgcggggcccacgtggatgcccgaaacgggcgtggggagacagctcttagcgccgcctgcggtgctgcccgccggcccgacgagcatggccgttgcctgcgactgtgtgcattactgcttaggagaggcgcagaggcggacgctagagacgaggacgagagaagccccttgcataaggcttgtggccacgcttcacactccctggcgcgactcctgcttcgccacggggcagacgctggcgctctcgattacggtggtgctagccccctgggcagagttcttcagaccgcctcctgtgccctccaggctagtccccagaggacagtccaggccctgctcaatcacggaagcccaactgtttggcctgacgccttccccaaagtgctcaagacatgcgccagtgttccggccgtgatagaggtgctgtttaattcctaccctcagctttgcctctcagagagctggaaggaggttatcccagaggaggtctttcagatgcacaaaccattttaccaatccttattcgcactggccctcactcccagatgtcttcaacacctttgcagatgcgcgctccgacgcctttttgggaaacggtgtttcgacctgatccctctccttccactgcctaagcccttacagaactatttgctactggagcctcaaggcgtcttgcattag

SEQ ID NO: 265781 - DNA, 1314 bp, Artificial Sequence
  derived and/or modified sequence
atggaacgtcagccgggaccagtacgcggaaaactgcaaatcttccagaagacagagaaagacccgcaagcaagggctggatcacctgtgcaagaataccacaccgccttggttgcgggagaccttgatcatctcaaacctcttatggatcagttctttcaggatgccaacgttgtttttgagattaataaagacgaaatggagtggcaggtgaagtcgcccgcaactttcggactgtctggtctttggaccctcgagtataagagagaactgactaccccattatgtatagccgctgctcatgggcacacggcctgcgtgcgacatctgctcgggagaggcgctgatccagatgccagccccggaggtagaggcgctctacacgaggcctgcttaggaggtcatactgcatgcgttcgcctattactgcagcatcgagccgatccagatctgttgagcgccgagggcctggcccctctccatctgtgcaggaccgccgctagcctggggtgcgctcaggccttactggagcatggggcttccgtacaacgggtcggtggaaccggacgtgacacccctctgcacgtggctgcgcagaggggcctcgatgaacatgctaggttgtacttgggtaggggagcgcacgttgacgccagaaacggtcggggtgagaccgccctctctgcagcgtgtggcgcagctcggagacctgacgaacatggtaggtgccttcgcctttgcgccctcctgctgcggaggggcgcagaagccgatgctagagatgaggacgagagaagcccacttcacaaagcttgcgggcatgcctctcatagcctggcaaggttgcttctgagacacggcgctgatgccggtgccctggactatggcggagcgagccccttgggccgtgtactgcagactgcttcctgtgccctgcaggcaagcccccagcgaacagtgcaagccttactgaaccacggcagcccaaccgtttggcccgacgcctttccgaaggtgttgaaaacctgcgcaagtgtacctgcggtaatcgaggtgctattcaacagttacccacaactgtgtctctccgagagttggaaggaagtgattccggaggaagtcttccaaatgcacaaaccattttatcagagtctgttcgctttagcactgacacctcggtgcctccagcatctctgtcgatgcgccctcaggagactttttggtaagagatgctttgatctgatccccctgctccctctcccaaagcctctccaaaattatcttctgcttgaacctcaaggggtgctgcattag

SEQ ID NO: 265782 - DNA, 1401 bp, Artificial Sequence
  derived and/or modified sequence
atgtcaaacagcgactaccttcctgactaccctctcaatagcgatttggtaaaacggctgaagagtgctttggacgcaaaagacgaagaacgggtgcgcgacctgatatgtaccgaaatcacaccggtggacgccgtgattgaactcgcaaatgatgattggatgaaggatcctagtgctcagctgccgaccggcatgctgctgggtgacctggatcacttaaaacctttgatggatcagttctttcaggatgccaacgtggtttttgagattaataaagatgaaatggaatggcaggtaaagagtcctgctacattcggccttagcgggctgtggacacttgagtataagcgcgaacttacaacccccctttgcatcgccgctgcccacggtcataccgcctgtgtccggcatctactgggcaggggagccgacccagatgcgtcacctggtggcagaggcgcacttcacgaggcatgtctggggggacataccgcctgtgtgcggctcctgctgcagcacagagccgatcccgatcttctgtcagccgagggcctcgccccactgcatctgtgtcggacagcagccagcttgggctgtgctcaggccctgttggaacatggggcttccgtgcagagggtcggtggaactggaagagacacccccctacacgtcgctgcccagcggggtctggatgaacacgctcggctgtacctaggcaggggcgctcacgtggacgcccgaaatggtagaggtgaaactgctcttagcgctgcttgtggggctgcccgacggcctgacgagcacgggcgttgcctccggttgtgtgcattactgttaagacggggtgcagaggcagacgccagggacgaggacgagcggagtccactgcacaaggcctgcggtcacgcaagccattctctggccaggctcctactgagacatggggcagatgcaggcgctctcgattacggcggtgcaagccccctggggcgagtgctgcagaccgcctcatgcgcactccaggcttcaccacaaagaactgttcaggccctgctgaatcacggctcacctacagtctggcctgacgcttttcctaaggtgcttaaaacctgtgcctcagtgcctgccgtaattgaggtgttatttaactcgtacccacagctctgccttagcgagagctggaaggaggtgatccccgaagaagtcttccagatgcacaagccattctatcagtcgctgtttgccctggccctgactccccgatgcctacaacatctgtgcaggtgcgcacttcggcgtctgtttgggaaaaggtgcttcgacttgatcccactcctgccactgcctaaacccctccagaactatttgctgctcgagcctcagggggtgctgcactag

SEQ ID NO: 265783 - protein, 235 aa, Artificial Sequence
  derived and/or modified sequence
MRPDDINPRTGLVVALVSVFLVFGFMFTVSGMKGETLGNIPLLAIGPAICLPGIAAIALARKTEGCTKWPENELLWVRKLPCFRKPKDKEVVELLRTPSDLESGKGSSDELAKKAGLRGKPPPQSQGEVSVASSINSPTPTEEGECQSLVQNGHQEETSRYLDGYCPSGSSLTYSALDVKCSARDRSECPEPEDSIFFVPQDSIIVCSYKQNSPYDRYCCYINQIQGRWDHETIV

SEQ ID NO: 265784 - DNA, 708 bp, Artificial Sequence
  derived and/or modified sequence
atgagacccgacgacatcaaccccagaaccggcctggtggtggccctggtgagcgtgttcctggtgttcggcttcatgttcaccgtgagcggcatgaagggcgagaccctgggcaacatccccctgctggccatcggccccgccatctgcctgcccggcatcgccgccatcgccctggccagaaagaccgagggctgcaccaagtggcccgagaacgagctgctgtgggtgagaaagctgccctgcttcagaaagcccaaggacaaggaggtggtggagctgctgagaacccccagcgacctggagagcggcaagggcagcagcgacgagctggccaagaaggccggcctgagaggcaagccccccccccagagccagggcgaggtgagcgtggccagcagcatcaacagccccacccccaccgaggagggcgagtgccagagcctggtgcagaacggccaccaggaggagaccagcagatacctggacggctactgccccagcggcagcagcctgacctacagcgccctggacgtgaagtgcagcgccagagacagaagcgagtgccccgagcccgaggacagcatcttcttcgtgccccaggacagcatcatcgtgtgcagctacaagcagaacagcccctacgacagatactgctgctacatcaaccagatccagggcagatgggaccacgagaccatcgtgtag

SEQ ID NO: 265785 - DNA, 708 bp, Artificial Sequence
  derived and/or modified sequence
atgagaccggatgatataaatcctcggaccgggctggttgtcgccctggtgtctgttttcctcgtgttcggattcatgttcactgtcagtggcatgaagggagaaacgctgggaaacatccccctgctcgcaatcggccctgctatatgtctgcctggaattgctgcgatagctcttgctcggaagactgagggatgcaccaaatggcccgagaacgagttgttgtgggtccgaaaactcccctgttttcgcaaacccaaagataaagaggtcgtcgaactgttgagaacacctagtgacctggaatccgggaagggatcatcagatgagctggccaaaaaggccggccttcgcgggaagccccccccccagtctcagggggaggtctccgtggcctcttcaattaattcccccaccccgacagaagagggggagtgccagagcttggtgcagaacggccatcaagaggaaactagtaggtatctcgatggatactgcccaagtggctctagcttgacctactcggcacttgacgttaaatgttccgcccgcgaccgctccgaatgtcctgagcctgaagatagcatcttctttgtccctcaggacagtataatcgtttgcagctacaaacagaattccccttatgacaggtactgttgttacatcaaccagatccagggacgttgggaccatgagaccatagtgtag

SEQ ID NO: 265786 - DNA, 708 bp, Artificial Sequence
  derived and/or modified sequence
atgaggccagatgacatcaaccccaggacaggcctggtggtggccctggtgtctgtgttcctggtgtttggcttcatgttcaccgtgtctggcatgaagggggagaccctgggcaacatccccctgctggccatcggccctgccatctgcctgcccggcattgctgccatcgccctggccaggaagacagagggctgcaccaagtggccagaaaatgagctgctgtgggtgaggaagctgccctgcttcaggaagcccaaggacaaggaggtggtggagctgctgcggacccccagcgacctggagagcggcaagggcagcagtgatgagctggccaagaaggccggcctgcggggcaagcccccaccccagagccagggcgaggtgtctgtggccagcagcatcaacagccccacccccacagaggagggggagtgccagagcctggtgcagaatggccaccaggaggagaccagccgctacctggatggctactgccccagcggcagcagcctgacctacagcgccctggatgtgaagtgcagcgcccgggacagaagtgagtgcccagagccagaagattccatcttctttgtgccccaggacagcatcatcgtgtgcagctacaagcagaacagcccctatgaccgctactgctgctacatcaaccagatccagggccgctgggaccacgagaccatcgtgtag

SEQ ID NO: 265787 - DNA, 708 bp, Artificial Sequence
  derived and/or modified sequence
atgcggcccgacgacatcaacccccggaccggcctggtggtggccctggtttctgtattcctggtcttcggattcatgttcactgtgtcaggcatgaaaggggaaactctggggaacatcccactcttagccattggtcccgcaatttgcctcccaggcattgcagcgattgctcttgccaggaagaccgagggatgcaccaagtggcctgaaaatgagctgttatgggttcggaagctgccgtgctttaggaagcccaaggacaaagaagtagtggaacttctgcgaactccgagtgatctagaatctgggaaggggtcctcagatgagctggccaaaaaggcggggctgaggggcaaaccaccccctcagagccagggggaggtttctgtagccagcagtattaatagcccaacccctacggaggagggtgaatgccaaagcttggttcagaacggccaccaggaggaaacttctagatatctcgatgggtactgccccagtggctcgagtctgacctacagtgcactggatgtcaaatgttccgctagagaccgcagcgaatgtcccgagccagaagactcaatcttttttgtccctcaggactcaatcatcgtctgttcatataagcagaatagcccatacgataggtattgctgctacatcaatcagatccagggtcgatgggaccacgaaacgatcgtttag

SEQ ID NO: 265788 - DNA, 708 bp, Artificial Sequence
  derived and/or modified sequence
atgaggccagatgatattaatccacgtaccgggctggttgtggctttggtgtccgtgtttctggtgtttgggtttatgttcaccgtgtcaggaatgaagggcgaaactctgggcaatatcccactgctcgccataggtccagccatttgtttgcctggtatcgctgccatagctctcgccagaaaaacggagggatgtacaaaatggccggagaacgaacttctctgggtccgaaaactcccctgcttccgaaagcctaaggataaagaggtggtagaactccttagaaccccaagcgatcttgagtccggaaaggggagttccgatgaactggccaagaaggcaggcctgcggggaaagcctccccctcagtcacagggtgaggtgagtgtggccagcagcataaattcgccaactcccaccgaggagggagaatgccagtccttggtacagaatgggcatcaagaagagactagtcgataccttgatgggtactgtccatctggaagctcactcacatatagcgccctggacgtgaagtgtagcgcgcgtgaccgctccgaatgtcctgaaccagaagatagcattttttttgtcccacaggattccattatcgtttgcagttacaaacaaaattccccgtatgaccggtattgctgctacattaaccaaatccagggtagatgggatcacgagactatcgtttag

SEQ ID NO: 265789 - DNA, 3581 bp, Artificial Sequence
  derived and/or modified sequence
gatgtaacaaggccaggctcgcgccgcgtcccctctttcccagactcagtgctccctcctcctcccgcgccccgcgctctgcgcgctgagctggcgccgggctccgcttgcacagcaccgggaccgacgggcactgctgggagagccgctctcccaggttccacctccccgatgcagagtccgtgggggaaaccaggctttcctcccagaaccaagggagcgagccgagggggcagctgctgtgggggcttctgaggagacagcctggcttctttccctacttcctggagagggcaggaaacctcagaatagaggaacgctgctccctggtcagcaagcagcccccaacctggatggagtgaaacatgcggcctgatgacattaacccgaggactgggctggtggtggccctggtcagtgtcttcctcgtctttggtttcatgttcaccgtctctgggatgaaaggggagactttgggaaacatccccctcctggccatcgggccagccatctgcctaccaggcatcgcagccattgccctggccaggaaaaccgagggatgcaccaagtggccagagaacgagctgctgtgggtccgcaaattgccctgcttccggaaacccaaagacaaggaggtggtagagctgctgaggaccccttcagacctagaatccggcaaggggagctcagatgagctggctaagaaggcgggcctcagggggaagcctcccccacaaagccagggtgaggtgtccgtggccagctccatcaacagccccacacccacggaggaaggagaatgccagagcctcgtccagaatgggcatcaggaggagacgtccagatacctggacggctactgcccctcgggcagttccctcacctacagtgccttggacgtcaagtgctcagcaagggacagatctgagtgccctgagcctgaggatagcatcttctttgtgccccaggacagtatcatcgtttgctcctacaagcagaacagcccgtatgacagatactgttgttatatcaatcagatacaaggcaggtgggaccacgagaccatcgtctaatctctgcctacaaaggtggctggattgatagaatatgactaagcccagctccccgtggaagcaaattgctctgcttggagagccttcacactgttagaaattgacctggtatgtgatgggtgtgataacctctggtacccgagagtcatgtaaataggcatgttggggacacattttagggaagggcgatgagggttaaggacactggaagaggcagtgggtaggaaaggaagctactccagttgcttcttaacaatttacacaatgttaaatgttttgtaaaataacccaaaaagtgctatccagaaccagctgagagcaagataaatctagagtgggctgcagatgtgaggcatcaaatgatgcatgagctgaccacagggaaactgagctgctttatgtttgaataagttgaaaataaaattaatgatccgttatataaagtaatttttgcctggttaaaagcttatcacacttggtatttgctgaaagaaaaaaaaatcaagatacaagagttaaaccctccttagatgggatggtttttgggaaaagggtagttaaagagagttggattatgtaactgagtcttgtggcattattgtctgacaagatcatggtctctaataaagtaaaataagtgtgagcagctatgtgaaaagttaacatttttagatggctatgttacttcttaaactcttcgtttaaatccatttattgcatctttatctgaaatgggttttttctaaacatttactatcattcatgtattatttccttaccaggtgcaacattatttgaaatgatactttcatagattggaatttgttttcatcaagacaaaatgaattttacatatatatccaagtctttaacattggcagacatgtactgataattaccattcctacataccttttaaaatctgaaaactataaagtctacacattagccttgaacattgcacataatttgtatgaaatgcaatggttaaacctttggaagtgtcattatttgtacatttgttcaactcctctcacagactgtaaatgccagtgaaacaagaactcatctactaaatttaactgaagcctagattttattaagctcacctgatcagtgaacattacatgataaaagtctctttatttcatacatttttgctgctgaggaaaacaacaaatcacaatgatatcctaaaatgtgctttctatttcacttgctcaactgcaatagataagaaggctatcaagcagaatgccatttgatccccggtgaagaaaaatatgaattatatataggaatggtgatagagttcatcttgaagatcagaagtattttgtatccttcaaagaatgatcattttaagtgatcatatagtcttagtcactttctcccaaaaggggaattgaggacaaaaatttgggcatatatgttttgtgtatttcaattccaactctgcaattctttcttaagtatagcaattgttctgtcttaagaatcatggtatttttaaaaaatcataattttcaagtcaagttcaagatcaaaaatatgtaattattttagtagggcttaaatatcagaaatgagatgcatgatcttgggcaaattttatcttcttacacctgagtttcctactctgtgaagggagggggaactgatttacacttgattatttctatcattcattttcagtgtaaatattctatggtgttatgtcaaaggcattttatatattgccaggaaatgagttacagcaaaatgcatgccaaagttatgaaatttatgataattatgtgacatacattgcacagctactactcaaaaaagaattttgtagatgtatgaaagcagattattcaacacaatgcattcctgagaataaaatgaacataatcagagtaaaatatttttgaggagaaaacttaaaatgttggtataactcaaagtaatctaatacacaaccttgcactaaatgtgattgacatttggatttgggatggggagagatagtttcctaaaatcacagtaacttttaataattgtaatgcattttgaaaacagagaatcatatttttataatggtgagaactatgcaataactctttaggaatgaaaacttcctttaagaagtttgccaccgttagagatgaggagatagtgagacagagagatgttcacagagactcagcaaatcttagacaataatgctgcaattttctgaaagaagatgcttgcagtgtcaggtatggtttgggggttggaaaagttacttttctgatttcttggaaccatttaaaactcctttatatcattctgtctctttccaaattgagggtcaactactagtttagagatataaggtattttatcttgttttcaagttctacttcagaagaaaacctatttcatgtttcttctcccattacctacttaagatacttaaggtatttaagtatgcatttgaggaaatattttcctgtgctaaaataaaggtttgcaaatgtt

SEQ ID NO: 265790 - protein, 948 aa, Artificial Sequence
  derived and/or modified sequence
MAEANNPSEQELESEPRSWSLLEQLGLAGADLAAPGVQQQLELERERLRREIRKELKLKEGAENLRRATTDLGRSLGPVELLLRGSSRRLDLLHQQLQELHAHVVLPDPAATHDGPQSPGAGGPTCSATNLSRVAGLEKQLAIELKVKQGAENMIQTYSNGSTKDRKLLLTAQQMLQDSKTKIDIIRMQLRRALQAGQLENQAAPDDTQGSPDLGAVELRIEELRHHFRVEHAVAEGAKNVLRLLSAAKAPDRKAVSEAQEKLTESNQKLGLLREALERRLGELPADHPKGRLLREELAAASSAAFSTRLAGPFPATHYSTLCKPAPLTGTLEVRVVGCRDLPETIPWNPTPSMGGPGTPDSRPPFLSRPARGLYSRSGSLSGRSSLKAEAENTSEVSTVLKLDNTVVGQTSWKPCGPNAWDQSFTLELERARELELAVFWRDQRGLCALKFLKLEDFLDNERHEVQLDMEPQGCLVAEVTFRNPVIERIPRLRRQKKIFSKQQGKAFQRARQMNIDVATWVRLLRRLIPNATGTGTFSPGASPGSEARTTGDISVEKLNLGTDSDSSPQKSSRDPPSSPSSLSSPIQESTAPELPSETQETPGPALCSPLRKSPLTLEDFKFLAVLGRGHFGKVLLSEFRPSGELFAIKALKKGDIVARDEVESLMCEKRILAAVTSAGHPFLVNLFGCFQTPEHVCFVMEYSAGGDLMLHIHSDVFSEPRAIFYSACVVLGLQFLHEHKIVYRDLKLDNLLLDTEGYVKIADFGLCKEGMGYGDRTSTFCGTPEFLAPEVLTDTSYTRAVDWWGLGVLLYEMLVGESPFPGDDEEEVFDSIVNDEVRYPRFLSAEAIGIMRRLLRRNPERRLGSSERDAEDVKKQPFFRTLGWEALLARRLPPPFVPTLSGRTDVSNFDEEFTGEAPTLSPPRDARPLTAAEQAAFLDFDFVAGGC

SEQ ID NO: 265791 - DNA, 2847 bp, Artificial Sequence
  derived and/or modified sequence
atggctgaggccaataaccctagtgaacaagagctggaatccgaacctaggtcatggagcttgctcgagcagttggggcttgctggcgctgaccttgctgccccaggagtgcaacagcaacttgagctggaaagggagagactgcgcagggaaatcagaaaagagctgaagcttaaggagggtgccgagaacctccggcgagccaccacggatctagggagatctctggggcctgtcgagctgttgctgcgcggatccagtagacgcctcgacttgttacatcagcagctgcaggagttacatgcacatgtggtacttcccgacccagcagcgacgcacgatggacctcagtcacctggcgctgggggccctacctgctccgctaccaacttatccagggtagccggactcgaaaagcagctggccatagaactaaaggttaagcagggagcggagaatatgattcaaacctattccaatggatcgactaaggatcgaaaactccttcttaccgcccagcagatgctgcaggacagcaagacaaaaatcgatatcatccgaatgcagcttcgccgagctctgcaagcaggccagctggaaaaccaggccgcaccagatgacacgcaaggctctcctgacctgggggccgtcgaactgaggattgaagagctgcgccaccatttcagagtagagcatgcagttgctgagggagccaaaaatgtgctcaggctgttatcagctgccaaggcccccgatagaaaggcggtgagtgaagcccaggagaagcttacagagtcgaatcaaaagctcggactgttgagagaggccctcgaaaggagactaggagagctgcccgctgaccatccaaagggcagactgctgcgggaagaattagctgctgcctcatctgcagctttctcaactaggctggccggccctttccccgctacccattattcaactctgtgtaagcccgctcctttaactgggaccttggaggtcagagtggtgggttgtcgggatctgccagaaacaattccatggaatccaacaccatcaatggggggcccagggactcccgactctaggcccccgttcctcagtaggcccgcaaggggcctttatagccggtctggttccctgtccggtaggtcttcgctgaaggcggaagccgagaatacgtcggaagtgtccacagtgcttaagctggataacaccgtggtgggacagaccagttggaagccgtgtgggcctaacgcctgggatcagagttttaccctggagctggagagagcaagagagcttgagctcgcggtgttctggcgggatcaaagaggactgtgtgcactaaaatttctgaagctggaggattttctggataatgaacgccatgaagtgcagctggatatggaaccgcaagggtgcttagtcgcggaagtcaccttcaggaatccagtgattgaaagaatcccgcgcctccgccggcagaaaaagatcttctctaagcagcaaggcaaggcattccaaagggctagacagatgaatatcgatgtggcaacatgggtccgtttgctgcgccggctgatcccaaatgccactggaacaggcacctttagtccaggcgcctctcccgggtcagaggcacggactactggagatatctccgttgagaagctcaatctggggactgatagtgacagtagtccgcagaaatctagccgtgatccacccagctctccgtcgtctctgagctcaccgattcaagagtcgactgctcctgagctaccgtccgagactcaggagacccccggaccagcattgtgttcacctctgaggaaaagcccccttacattagaggatttcaagttcctggccgtactggggcgtggacacttcgggaaggtcctactgtctgaatttcgcccttcaggggagctcttcgccatcaaagctctaaaaaaaggcgatattgtcgctagagatgaagtggagagcctgatgtgtgaaaagcgcatcctcgccgctgtgacaagcgctgggcatccgtttctcgtcaacctgtttggttgttttcagactccagaacatgtctgcttcgtgatggaatattcggcaggtggcgatctgatgctccacattcatagtgacgttttctcagagcctcgggccatcttttactcagcctgcgtggtgctcggactccagttcttgcacgaacacaagatcgtttatcgggatttaaagttggataatctgctgctcgacacagaggggtatgtcaaaatcgcggactttggcctatgcaaggagggaatgggctacggagaccggacgagcaccttctgcggcactcctgagttcctggcccctgaagttttgacagacacaagttacacccgtgctgtcgattggtggggccttggggtcctgctgtacgaaatgctggtgggtgagtccccctttcccggcgatgacgaagaagaagtgttcgatagcatagtcaatgacgaggttaggtacccacgctttctttcggccgaggccatcggaatcatgcgaaggctactcagaaggaaccctgagcgcagacttggatctagcgaaagggatgccgaggacgtcaaaaaacagcctttttttagaacccttggctgggaggcccttttggcccgcaggttgccacctcccttcgtccccaccctgagcggcaggaccgacgtgtcaaacttcgacgaggaatttaccggagaagcccccacattgtccccgccgcgagacgctcgccctctgaccgctgccgagcaggccgcattcctggatttcgactttgtggccgggggttgctag

SEQ ID NO: 265792 - DNA, 2847 bp, Artificial Sequence
  derived and/or modified sequence
atggccgaggccaacaaccccagcgagcaggagctggagagcgagcccaggtcctggagcctgctggagcagctgggcctggccggggctgacctggccgcccctggggtgcagcagcagctggagctggagcgggagcggctgcggcgggagatcaggaaggagctgaagctgaaggagggcgctgagaacctgcggcgggccaccacagacctgggccgcagcctgggccctgtggagctgctgctgcggggcagcagccggcggctggacctgctgcaccagcagctgcaggagctgcacgcccacgtggtgctgcctgaccctgctgccacccatgatggcccccagagccctggagctgggggccccacctgcagcgccaccaacctgagccgggtggccggcctggagaagcagctggccatcgagctgaaggtgaagcagggcgctgagaacatgatccagacctacagcaatggcagcaccaaggacaggaagctgctgctgacagcccagcagatgctgcaggacagcaagaccaagattgacatcatccgcatgcagctgcggcgggccctgcaggccggccagctggagaaccaggccgccccagatgacacccagggcagcccagacctgggcgctgtggagctgagaattgaggagctgcggcaccacttccgggtggagcacgctgtggccgagggcgccaagaatgtgctgcggctgctgtctgctgccaaggccccagacaggaaggctgtgtctgaggcccaggagaagctgacagagagcaaccagaagctgggcctgctgcgggaggccctggagcggcggctgggggagctgcctgctgaccaccccaagggccgcctgctgcgggaggagctggccgccgccagcagcgctgccttcagcacccggctggccggccccttccctgccacccactacagcaccctgtgcaagccagcccccctgaccggcaccctggaggtgcgggtggtgggctgccgggacctgcctgagaccatcccctggaaccccacccccagcatgggcggccctggcaccccagacagccggccccccttcctgagcaggcctgcccggggcctgtacagccgcagcggcagcctgagcggccgcagcagcctgaaggccgaggccgagaacaccagcgaggtgtccacagtgctgaagctggacaacacagtggtgggccagacctcctggaagccctgtggccccaatgcctgggaccagagcttcaccctggagctggagcgggcccgggagctggagctggccgtgttctggagggaccagaggggcctgtgtgccctgaagttcctgaagctggaggacttcctggacaatgaaagacatgaggtgcagctggacatggagccccagggctgcctggtggccgaggtgaccttcagaaatcctgtgattgagcgcatcccccggctgcggcggcagaagaagatcttcagcaagcagcagggcaaggccttccagagggcccggcagatgaacattgatgtggccacctgggtgcggctgctgcggcggctcatccccaatgccactggaacaggcaccttcagccctggggccagccctggcagcgaggcccggaccactggagacatctctgtggagaagctgaacctgggcacagacagcgacagcagcccccagaagagcagccgggacccccccagcagccccagcagcctgagcagccccatccaggagagcacagcccctgagctgcccagcgagacccaggagaccccaggccctgccctgtgcagccccctgaggaagagccccctgaccctggaggacttcaagttcctggccgtgctgggccggggccactttgggaaggtgctgctgtctgagttccggcccagcggggagctgtttgccatcaaggccctgaagaagggggacatcgtggccagagatgaggtggagagcctgatgtgtgagaagaggatcctggccgctgtgaccagcgctggccaccccttcctggtgaacctgtttggctgcttccagaccccagagcacgtgtgctttgtgatggagtacagcgctggaggagacctgatgctgcacatccacagtgatgtgttttctgagccccgggccatcttctacagcgcctgtgtggtgctgggcctgcagttcctgcacgagcacaagatcgtgtacagagacctgaagctggacaacctgctgctggacacagagggctacgtgaagattgctgactttggcctgtgcaaggagggcatgggctacggggacaggaccagcaccttctgtggcaccccagagttcctggcccctgaggtgctgacagacaccagctacaccagggctgtggactggtggggcctgggcgtgctgctgtatgagatgctggtgggggagagccccttccctggagatgatgaggaggaggtgtttgacagcatcgtgaatgatgaggtgcgctacccccgcttcctgtctgctgaggccatcggcatcatgaggcggctgctgcggaggaaccctgagcggcggctgggcagcagcgagagagatgctgaagatgtgaagaagcagcccttcttccgcaccctgggctgggaggccctgctggcccggcggctgcccccaccatttgtgcccaccctgagcggccgcacagatgtgagcaactttgatgaggagttcaccggggaggcccccaccctgagccccccaagagatgcccggcccctgacagctgctgagcaggccgccttcctggactttgattttgtggccggcggctgctag

SEQ ID NO: 265793 - DNA, 2847 bp, Artificial Sequence
  derived and/or modified sequence
atggccgaggccaacaaccccagcgagcaggagctggagagcgagccgcggagctggagtctgctcgagcagctggggctggccggggccgatctcgcagcccctggcgtgcagcagcagcttgagttggagcgagagagactgcgaagagagattcgaaaagaacttaagttaaaggagggagctgagaatctgagaagagccaccacagacctcggccggtccctgggaccagtcgaactgttgctgcgtggttccagccgccgactggatctgttgcatcaacagctccaagagctgcacgcccatgtagtgctgcccgacccagccgctacacacgacgggcctcagtctccaggggcggggggcccaacgtgcagcgccaccaacctcagcagagtcgcaggcttggaaaagcaactggccatcgagctcaaagtcaagcagggagccgagaatatgatacagacttacagtaatggttccactaaggaccggaagttgctccttaccgcacagcaaatgctgcaggactcgaagaccaaaatcgatataatcaggatgcagctccgcagggccctccaggccgggcagttggaaaaccaagccgcccctgacgacactcagggtagcccggatctgggcgcagttgagttgcgaatcgaggaattgcgccaccatttcagggtcgagcacgccgtggcagagggtgccaaaaatgtgcttaggctgctgagtgccgccaaagcacctgatagaaaggctgtttccgaggcgcaggaaaagttaaccgagtctaatcagaagctcggcctgctccgtgaggcccttgaaaggaggttgggggaactgcccgctgatcaccctaagggcagactgctcagagaggagttagctgctgcctcttccgctgcgttctcgacgagattagcaggtcctttccctgccactcattatagcactctttgcaaaccagcaccgctgacagggacattggaagtccgcgtcgtcggatgcagggatttgcctgagaccatcccctggaaccctacaccctccatgggtgggccaggcacgcccgactcacgccctcctttcctgagtaggcctgccagggggttgtatagcagatcgggctccttgtcaggccgaagttctctcaaggccgaagcagaaaatactagcgaagtctctacagtgctgaagctggacaatacggttgttgggcaaacatcttggaagccatgcggacccaacgcatgggatcagagctttaccttggaactggaacgcgctagggagctggagctggccgtgttttggagagaccaacgggggttatgcgccttaaagttcctcaagctggaggattttcttgataacgaaagacacgaggtgcaactggacatggagccccagggctgcctcgtagcagaggtaacattcagaaatcctgtgattgagcgcataccaaggctccggaggcagaagaaaattttctccaagcagcagggcaaggcgttccagagggcccggcaaatgaatatcgacgtcgccacttgggtgcggctcttaaggcgtctaatccccaatgctaccgggaccggcaccttctcaccaggagcttctcccgggtcagaggcacgcaccacaggtgatatctccgtggaaaagcttaatctcgggaccgattccgattcctcacctcagaagtccagtagggaccctccaagttcaccttcatctctgagttcaccaatacaggaatctaccgcccctgagctaccttccgaaacgcaagagacccctggaccagctctctgctcaccgctacggaagtcacctctcacactcgaagacttcaaatttctcgctgtcctgggaagagggcatttcggcaaagtgcttctcagtgagttccggccttcaggagaactgttcgctatcaaggcacttaaaaaaggcgatattgtagcccgagatgaggtggagtctctgatgtgtgaaaagagaattctcgccgcagtgacaagtgctggccacccctttctggtgaacctattcggctgctttcagactccggaacacgtctgcttcgtaatggagtatagcgcaggcggagatctgatgctccacattcattcagacgtcttctccgagcccagagcaatattctactcagcctgcgtggtactgggcctccagttcctgcacgaacacaaaatagtttacagggaccttaagttggataacctgttacttgacacagaaggctatgtgaagatagccgacttcgggctgtgcaaggaagggatgggttatggggatcgaacttctaccttttgtggcacacccgaattcctagcacccgaggtgctgaccgacaccagttatacccgcgccgtagactggtggggtctcggggtcctactgtatgagatgctggtcggagagagcccttttcccggcgatgacgaggaagaggtattcgatagcatcgtgaacgacgaagtgaggtaccccagattcctgagcgccgaggcaattggcataatgaggcgtttgttacggcgaaatcctgaacggaggctgggttcgtccgagcgcgatgctgaggacgtgaagaaacaacccttcttccgcacactgggatgggaagctctgctggctcggcgcctgccccctcccttcgtgcccacgttatctggtcgtactgacgtaagcaactttgatgaagaattcacaggcgaggcgcccaccctgtctccacctagggatgctagacctctgactgctgctgaacaagctgcttttttagatttcgacttcgtcgccggtggttgttag

SEQ ID NO: 265794 - DNA, 2847 bp, Artificial Sequence
  derived and/or modified sequence
atggctgaggctaacaacccttccgaacaagaactcgaaagtgaaccgagaagttggtctttgttggaacaactcggtctcgccggagcagacttagctgctcccggtgtgcagcagcagttagagctcgaacgggagaggctgcgacgtgagataaggaaagagctcaagttgaaggagggtgccgaaaacctgagaagggccacaacagacctcggacggagcttggggcctgtagagcttcttctacggggttcatcgaggcgcttagacctgcttcaccagcagctacaggaactgcatgcgcacgtggtgctgcctgatccagcggcaacacatgatgggcctcaaagccctggcgctgggggtcccacttgtagcgccaccaacctttccagagtggccggactcgaaaaacagcttgcaatcgagttgaaagtaaaacaaggggcagaaaacatgattcagacatactctaatggcagcacaaaagaccggaagctgctgctgactgcccagcagatgttacaggatagtaagaccaagatagatatcatccgcatgcagcttcgcagagccttgcaggcaggtcagctagaaaatcaggccgctcctgatgatacacaagggtcaccagatcttggggcagtcgaactgcgaatcgaggagctcaggcaccacttccgcgttgagcacgcagtggcagaaggggctaagaacgtcctgcgactgctgtctgctgctaaggccccagacaggaaggccgtctccgaagcacaggaaaagctcaccgagagcaaccagaagttgggcctgttgagggaggcactggagcggaggcttggtgagctgcccgcagaccatcccaagggacgccttcttcgggaggagcttgccgctgcctctagtgcggcatttagtacacggctggcaggcccattccccgcaacgcactactccacactgtgcaagccagctcccttgacaggcacccttgaggtgagggtagtaggctgtcgcgatctccctgagaccattccctggaatcccaccccctccatggggggtcccggaacccccgatagtcgccctccctttctctccaggcctgccagggggctttacagtagatcaggatctctgagcgggagaagttctctaaaggctgaggctgagaacacttccgaggtctccaccgtgctcaagctcgacaacaccgtagtggggcagacttcctggaagccctgcggcccaaatgcctgggaccagagcttcacgcttgagttggaacgtgctcgagaattggagctggctgtgttctggagggaccagcgaggtctctgcgctctgaagttcttgaaactggaagacttcttggacaacgagaggcacgaagtgcagcttgacatggaaccacagggttgtctggtcgccgaggtgacctttcgcaaccccgtcatcgagcgaattcctcggttacgaagacagaaaaagatcttcagcaaacagcagggcaaggccttccaaagagcccgtcaaatgaacattgacgtcgcgacttgggtgcgactgctgaggcggctgatccctaacgccactgggacagggacattctcacccggtgcctctccaggaagcgaagctcgcaccaccggagatatttccgtggaaaaattgaaccttggtactgactccgacagctcacctcagaagtcctcaagggatccaccaagcagtccaagctccctctcctcaccgattcaagaaagtacggctcctgagctgccaagcgagacacaagagaccccaggaccggctctgtgcagcccgctgaggaagtctccattaacccttgaagatttcaaattcctggcagtgttaggacgaggtcattttggcaaggttctgttatcagagtttagaccgagcggtgaactgtttgcgattaaagcgctcaagaagggagacattgtggcgagagacgaagttgagtcactgatgtgtgagaaacgcatcctggccgctgtgacaagtgctggccatccttttctggtgaacctgttcggttgctttcaaacacctgagcacgtgtgttttgtaatggaatatagcgcgggaggtgatctcatgctccatatccacagtgacgtgttctctgaaccacgcgcaatcttctattccgcctgcgttgtgctggggcttcagttcctgcacgaacataaaatcgtgtacagggatctaaaactggacaacttgctcctcgacaccgaggggtacgtgaagatcgccgacttcggcctctgcaaggaaggaatgggttacggcgatagaacttccacattctgcggcacccccgaattccttgctcctgaggtcctcacggataccagttacactagagccgtggactggtggggcctgggcgtcctgctgtacgaaatgcttgtgggcgagtcccctttccctggagatgatgaggaagaggtgtttgactccatcgtcaacgacgaagtcaggtatcctcgctttctgtccgccgaggccattggaatcatgcggcgattactgcgccgaaatcccgagaggcggctggggagcagcgagagggatgcggaggacgtgaagaagcagccatttttcagaactcttggctgggaggcgctgctggcacgtcgcttgcccccaccttttgtccctactctgagcggcagaacagatgtgagtaactttgacgaggagttcaccggtgaggccccaactctgagccctcctagagatgcgcgtcccctcaccgccgcagagcaggcagcctttctcgactttgactttgtggccggaggctgttag

SEQ ID NO: 265795 - DNA, 2960 bp, Artificial Sequence
  derived and/or modified sequence
aagagggcggggccctcagcccggacccaggatggcggaggccaataacccctcggagcaggagctggagagtgagcctcgcagctggtccctgctagagcagctgggcctggccggggcagacctggcggcccccggggtacagcagcagctggagctggagcgggagcggctgcggcgggaaatccgcaaggagctgaagctgaaggagggtgctgagaacctgcggcgggccaccactgacctgggccgcagcctgggccccgtagagctgctgctgcggggctcctcgcgccgcctcgacctgctgcaccagcagctgcaggagctgcacgcccacgtggtgcttcccgacccggcggccacccacgatggcccccagtcccctggtgcgggtggccccacctgctcggccaccaacctgagccgcgtggcgggcctggagaagcagttggccattgagctgaaggtgaagcagggggcggagaacatgatccagacctacagcaatggcagcaccaaggaccggaagctgctgctgacagcccagcagatgttgcaggacagtaagaccaagattgacatcatccgcatgcaactccgccgggcgctgcaggccggccagctggagaaccaggcagccccggatgacacccaagggagtcctgacctgggggctgtggagctgcgcatcgaagagctgcggcaccacttccgagtggagcacgcggtggccgagggtgccaagaacgtactgcgcctgctcagcgctgccaaggccccggaccgcaaggcagtcagcgaggcccaggagaaattaacagaatccaaccagaagctggggctgctgcgggaggctctggagcggagacttggggagctgcccgccgaccaccccaaggggcggctgctgcgagaagagctcgctgcggcctcctccgctgccttcagcacccgcctggccgggccctttcccgccacgcactacagcaccctgtgcaagcccgcgccgctcacagggaccctggaggtacgagtggtgggctgcagagacctcccagagaccatcccgtggaaccctaccccctcaatggggggacctgggaccccagacagccgcccccccttcctgagccgcccagcccggggcctttacagccgaagcggaagcctcagtggccggagcagcctcaaagcagaagccgagaacaccagtgaagtcagcactgtgcttaagctggataacacagtggtggggcagacgtcttggaagccatgtggccccaatgcctgggaccagagcttcactctggagctggaaagggcacgggaactggagttggctgtgttctggcgggaccagcggggcctgtgtgccctcaaattcctgaagttggaggatttcttggacaatgagaggcatgaggtgcagctggacatggaaccccagggctgcctggtggctgaggtcaccttccgcaaccctgtcattgagaggattcctcggctccgacggcagaagaaaattttctccaagcagcaagggaaggcgttccagcgtgctaggcagatgaacatcgatgtcgccacgtgggtgcggctgctccggaggctcatccccaatgccacgggcacaggcacctttagccctggggcttctccaggatccgaggcccggaccacgggtgacatatcggtggagaagctgaacctcggcactgactcggacagctcacctcagaagagctcgcgggatcctccttccagcccatcgagcctgagctcccccatccaggaatccactgctcccgagctgccttcggagacccaggagaccccaggccccgccctgtgcagccctctgaggaagtcacctctgaccctcgaagatttcaagttcctggcggtgctgggccggggtcattttgggaaggtgctcctctccgaattccggcccagtggggagctgttcgccatcaaggctctgaagaaaggggacattgtggcccgagacgaggtggagagcctgatgtgtgagaagcggatattggcggcagtgaccagtgcgggacaccccttcctggtgaacctcttcggctgtttccagacaccggagcacgtgtgcttcgtgatggagtactcggccggtggggacctgatgctgcacatccacagcgacgtgttctctgagccccgtgccatcttttattccgcctgcgtggtgctgggcctacagtttcttcacgaacacaagatcgtctacagggacctgaagttggacaatttgctcctggacaccgagggctacgtcaagatcgcagactttggcctctgcaaggaggggatgggctatggggaccggaccagcacattctgtgggaccccggagttcctggcccctgaggtgctgacggacacgtcgtacacgcgagctgtggactggtggggactgggtgtgctgctctacgagatgctggttggcgagtccccattcccaggggatgatgaggaggaggtcttcgacagcatcgtcaacgacgaggttcgctacccccgcttcctgtcggccgaagccatcggcatcatgagaaggctgcttcggaggaacccagagcggaggctgggatctagcgagagagatgcagaagatgtgaagaaacagcccttcttcaggactctgggctgggaagccctgttggcccggcgcctgccaccgccctttgtgcccacgctgtccggccgcaccgacgtcagcaacttcgacgaggagttcaccggggaggcccccacactgagcccgccccgcgacgcgcggcccctcacagccgcggagcaggcagccttcctggacttcgacttcgtggccgggggctgctagccccctcccctgcccctgcccctgcccctgcccgagagctcttagtttttaaaaaggcctttgggatttgccggatccttgc

SEQ ID NO: 265796 - DNA, 2847 bp, Artificial Sequence
  derived and/or modified sequence
atggccgaggccaacaaccccagcgagcaggagctggagagcgagcccagaagctggagcctgctggagcagctgggcctggccggcgccgacctggccgcccccggcgtgcagcagcagctggagctggagagagagagactgagaagagagatcagaaaggagctgaagctgaaggagggcgccgagaacctgagaagagccaccaccgacctgggcagaagcctgggccccgtggagctgctgctgagaggcagcagcagaagactggacctgctgcaccagcagctgcaggagctgcacgcccacgtggtgctgcccgaccccgccgccacccacgacggcccccagagccccggcgccggcggccccacctgcagcgccaccaacctgagcagagtggccggcctggagaagcagctggccatcgagctgaaggtgaagcagggcgccgagaacatgatccagacctacagcaacggcagcaccaaggacagaaagctgctgctgaccgcccagcagatgctgcaggacagcaagaccaagatcgacatcatcagaatgcagctgagaagagccctgcaggccggccagctggagaaccaggccgcccccgacgacacccagggcagccccgacctgggcgccgtggagctgagaatcgaggagctgagacaccacttcagagtggagcacgccgtggccgagggcgccaagaacgtgctgagactgctgagcgccgccaaggcccccgacagaaaggccgtgagcgaggcccaggagaagctgaccgagagcaaccagaagctgggcctgctgagagaggccctggagagaagactgggcgagctgcccgccgaccaccccaagggcagactgctgagagaggagctggccgccgccagcagcgccgccttcagcaccagactggccggccccttccccgccacccactacagcaccctgtgcaagcccgcccccctgaccggcaccctggaggtgagagtggtgggctgcagagacctgcccgagaccatcccctggaaccccacccccagcatgggcggccccggcacccccgacagcagaccccccttcctgagcagacccgccagaggcctgtacagcagaagcggcagcctgagcggcagaagcagcctgaaggccgaggccgagaacaccagcgaggtgagcaccgtgctgaagctggacaacaccgtggtgggccagaccagctggaagccctgcggccccaacgcctgggaccagagcttcaccctggagctggagagagccagagagctggagctggccgtgttctggagagaccagagaggcctgtgcgccctgaagttcctgaagctggaggacttcctggacaacgagagacacgaggtgcagctggacatggagccccagggctgcctggtggccgaggtgaccttcagaaaccccgtgatcgagagaatccccagactgagaagacagaagaagatcttcagcaagcagcagggcaaggccttccagagagccagacagatgaacatcgacgtggccacctgggtgagactgctgagaagactgatccccaacgccaccggcaccggcaccttcagccccggcgccagccccggcagcgaggccagaaccaccggcgacatcagcgtggagaagctgaacctgggcaccgacagcgacagcagcccccagaagagcagcagagacccccccagcagccccagcagcctgagcagccccatccaggagagcaccgcccccgagctgcccagcgagacccaggagacccccggccccgccctgtgcagccccctgagaaagagccccctgaccctggaggacttcaagttcctggccgtgctgggcagaggccacttcggcaaggtgctgctgagcgagttcagacccagcggcgagctgttcgccatcaaggccctgaagaagggcgacatcgtggccagagacgaggtggagagcctgatgtgcgagaagagaatcctggccgccgtgaccagcgccggccaccccttcctggtgaacctgttcggctgcttccagacccccgagcacgtgtgcttcgtgatggagtacagcgccggcggcgacctgatgctgcacatccacagcgacgtgttcagcgagcccagagccatcttctacagcgcctgcgtggtgctgggcctgcagttcctgcacgagcacaagatcgtgtacagagacctgaagctggacaacctgctgctggacaccgagggctacgtgaagatcgccgacttcggcctgtgcaaggagggcatgggctacggcgacagaaccagcaccttctgcggcacccccgagttcctggcccccgaggtgctgaccgacaccagctacaccagagccgtggactggtggggcctgggcgtgctgctgtacgagatgctggtgggcgagagccccttccccggcgacgacgaggaggaggtgttcgacagcatcgtgaacgacgaggtgagataccccagattcctgagcgccgaggccatcggcatcatgagaagactgctgagaagaaaccccgagagaagactgggcagcagcgagagagacgccgaggacgtgaagaagcagcccttcttcagaaccctgggctgggaggccctgctggccagaagactgcccccccccttcgtgcccaccctgagcggcagaaccgacgtgagcaacttcgacgaggagttcaccggcgaggcccccaccctgagcccccccagagacgccagacccctgaccgccgccgagcaggccgccttcctggacttcgacttcgtggccggcggctgctag

SEQ ID NO: 265797 - protein, 105 aa, Artificial Sequence
  derived and/or modified sequence
MVKLLVAKILCMVGVFFFMLLGSLLPVKIIETDFEKAHRSKKILSLCNTFGGGVFLATCFNALLPAVREKVRAPWALAAALGTLWPRDSDAFSTLMPSSVKALML

SEQ ID NO: 265798 - DNA, 318 bp, Artificial Sequence
  derived and/or modified sequence
atggtcaagctcttagtggcaaagattttgtgcatggtgggagtatttttcttcatgctcctagggtccctgttgccggtgaagattatcgagaccgacttcgaaaaggcccacagatcgaagaaaatcctaagtctgtgcaatacgtttggtggcggcgtcttcctagccacctgttttaacgcactgctgcctgccgttcgagagaaagtgagagctccctgggcgctcgccgctgcattgggaactctttggccgagggactcggacgcttttagcaccttaatgccatccagcgtaaaggccctaatgctgtag

SEQ ID NO: 265799 - DNA, 318 bp, Artificial Sequence
  derived and/or modified sequence
atggtgaagctgctggtggccaagatcctgtgcatggtgggcgtcttcttcttcatgctgctgggcagcctgctgcctgtgaagatcatcgagacagactttgagaaggcccacaggagcaagaagatcctgagcctgtgcaacaccttcggcggcggcgtcttcctggccacctgcttcaatgccctgctgcctgctgtgcgggagaaggtgcgggccccctgggccctggccgccgccctgggcaccctgtggccccgggacagtgatgccttcagcaccctgatgcccagctctgtgaaggccctgatgctgtag

SEQ ID NO: 265800 - DNA, 318 bp, Artificial Sequence
  derived and/or modified sequence
atggtgaagctgctggtggccaagatcctgtgcatggtgggcgtgttcttcttcatgctgctgggaagtctgcttcccgtgaaaattatcgaaacagactttgaaaaggcgcatagatcaaagaagatcctgagtctttgtaatacctttggtgggggcgtgtttcttgccacatgttttaacgctcttctccccgcggttcgcgaaaaagtgagggctccttgggctctggcggccgcattgggtaccctgtggccacgggattccgatgccttttccacgctgatgcctagtagtgtgaaggctttaatgctttag

SEQ ID NO: 265801 - DNA, 318 bp, Artificial Sequence
  derived and/or modified sequence
atggtgaagctgctcgtggcgaaaatcctgtgcatggttggagtgttctttttcatgttgctgggctcgctgctgcctgtgaagattatcgagacagatttcgagaaagcacatcggtctaagaagatcctgtccctctgtaatacttttgggggaggggtgtttctggccacttgttttaatgcgcttcttccagcagtccgggagaaagtccgcgcaccgtgggctctcgccgctgctttggggacgctgtggccgagagattccgacgctttctcaactctaatgccctcaagcgtgaaagctctgatgttgtag

SEQ ID NO: 265802 - DNA, 2983 bp, Artificial Sequence
  derived and/or modified sequence
gggcaggggcgtgggcggggcgtggaccagccgcgccgagcggggcctctccgggccgcgtctgtggggtcgagactgcgcggccgttgggcgtgcagcggcgccagtcggcggacgaggggcccccgggagttgctggactgagacatgagcctccaactgtgtggttgggctcggtagcacatcgtgggacttgggtgtgcgcccacagatggtttggccctgcagtgaccagagcagcccaagccgccaccatggtgaaattgctagtggccaaaatcctgtgcatggtgggcgtgttcttcttcatgctgctcggctccctgctccccgtgaagatcatcgagacagattttgagaaggcccatcgctcgaaaaagatcctctctctctgcaacacctttggaggaggggtgtttctggccacgtgcttcaacgctctgctgcccgctgtgagggaaaaggtaagggctccctgggcactagcagcagcccttggcaccttatggccaagggactctgatgcattttcaacactgatgccaagttcagtgaaggccttgatgctgtaagggtgacggaaagtaggaagtgaatttgctgtgtgattgtgaactggttactttctgtctctgtgctctaccggccaaacaaggggtttggaccagacctgggattcccaacaggtggacttgtcggttgtcacctgataatcagaccagactacccacctaggtagggcacactctgtcctgaagctggaaagcatggcctctcttcggttcctatatcagtcagctactgttgcgtaacaaattatagcaaactgagcaccttaggactacagacgtttatcatctcacagtttctgtgagtcaggggtctgggcactgcttcaggagctcacaaggcagcagtcacagtgtctcctgggctgtggtctcatctcaacgttcaaccggggatgggtcggcctctaagctcatgtggttgtaagccaggttcagttcctcattggttgtcagaccgaaggtgtctgtttgtcagtgtctgttggctggggcagccctcagagcctggccacgtggacctccccagcatgatcagttccttcatcagcaaatggagaagatggccatgactctgtgtaagacagagggcacagtcccatgtcatgcagaggtgacagggtatcccttcccctctgccccagtgtcctgctggttagaagcaagttcaagtccttcccatactcaagtggccaggacctcacagggtatggctgtcaagaggcaggggcttctggggccatcttggagtctgtccaccccaactcctgacagcatcatcctctgctgacctgttccttgagctcccccatatcagcagcccagagtgtgggtcccctgtcaggccacagtgtgaccagccctggccatgcttgctgggtgaccctgggtgagtggcttcctctctctgggccagtgccagatgtgacattgaatttgtgttggttacatacttggtggagatatgaggaccccctgttcttcctcccaacgaaagcatggaagccctaagcttatcccccaacccctggccctgcttttcctcgtgcctagtgtccagaaaggaggagaagggctgttgtctgggattaaatcatctgagcctgttagtgtggcagagtagagttccagggtggctccctgagcttccagcccctgctccgcacgccccatgctcttccctcccctcgagtgtgggtagggctgggactgccgtgcgtgtcactcctgccattatgtcagaatcccagcagaggggatgttgcagctgtgatgaccgccccagatcggttagcgctgagttcatcaaaagggagggggtgggcctggcctaatcaggtgagccactcaccctcctgctggccttggagaagcaaaaagccagggtgtgccaggagaagggcatgaagcgaggacccgagggcagcctctcggtgccaagagccatccccgccaacagccagccaggacacggggcctcagtccacagccaccaggaggtggactcttccgacctccagtgagcttggaagaggaccctgggtgtcagtgagatctcagccctgatgacaccctgcgagacctggagcgtagggcccagctagcccgcacctggatttccaccgttcagagccgagacaccgcattcctgctgttccgcgtggctgagtctgcattcgttcgttacgcggtgtgtgaagactgacatctgcactgcgaggatggagatcttggtcatctctgacatctcctgcatcgcagaggccactgccagccccccttttcccccatggtcatggtgtcacccccgtcaccctctgactgcaggcctgggcgactgcggggagcttgctcttccctccccctcatcacagtggccttctcatggcacccaaacctttcccgccgttctcctgtcctcgggctggtcaggcggatgaggtccctactcccgagcccccagcctcacccactgcagggccaggctctcagtcacccctggaaaatggtgcctggttcacagctcccgtgcatctgcctcatctctcctgatcaacgtctgtctcttgggagtagctagagttcctcatgagcttgtcctcaagcgaggcatgcatgaggcctccagccggtggtcagtgagggagttaagtggcttctccgtggaaacacagccttctgctgcagcagaggctcacccagcgtgaactgcccccagggaacactgggcgatgcctggggacattgtggttgtcacgatggggggtgctcctggcctggagtgggtggaggccagagacactgctcagcagcaccctgcagtgcccaggacggccccgtcccagagaacaatccagccccgaatgtcagcaccttccccctacccgagttgtgaaaataaaaaatgtttccag

SEQ ID NO: 265803 - DNA, 318 bp, Artificial Sequence
  derived and/or modified sequence
atggtgaagctgctggtggccaagatcctgtgcatggtgggcgtgttcttcttcatgctgctgggcagcctgctgcccgtgaagatcatcgagaccgacttcgagaaggcccacagaagcaagaagatcctgagcctgtgcaacaccttcggcggcggcgtgttcctggccacctgcttcaacgccctgctgcccgccgtgagagagaaggtgagagccccctgggccctggccgccgccctgggcaccctgtggcccagagacagcgacgccttcagcaccctgatgcccagcagcgtgaaggccctgatgctgtag

SEQ ID NO: 265804 - protein, 236 aa, Artificial Sequence
  derived and/or modified sequence
MLHFYYEWLHSGSRGAVPKPLHYPKQSFTTVADTPENLRLKQQSELQSQVKYKRDFEESKGRGFSIVTDTPELQRLKRTQEQISNVKYHEDFEKTKGRGFTPVVDDPVTERVRKNTQVVSDAAYKGVHPHIVEMDRRPGIIVAPVLPGAYQQSHSQGYGYMHQTSVSSMRSMQHSPNLRTYRAMYDYSAQDEDEVSFRDGDYIVNVQPIDDGWMYGTVQRTGRTGMLPANYIEFVN

SEQ ID NO: 265805 - protein, 270 aa, Artificial Sequence
  derived and/or modified sequence
MNPQCARCGKVVYPTEKVNCLDKYWHKGCFHCEVCKMALNMNNYKGYEKKPYCNAHYPKQSFTTVADTPENLRLKQQSELQSQVKYKRDFEESKGRGFSIVTDTPELQRLKRTQEQISNVKYHEDFEKTKGRGFTPVVDDPVTERVRKNTQVVSDAAYKGVHPHIVEMDRRPGIIVAPVLPGAYQQSHSQGYGYMHQTSVSSMRSMQHSPNLRTYRAMYDYSAQDEDEVSFRDGDYIVNVQPIDDGWMYGTVQRTGRTGMLPANYIEFVN

SEQ ID NO: 265806 - DNA, 711 bp, Artificial Sequence
  derived and/or modified sequence
atgctgcatttttactacgaatggttacattctggcagccgcggtgcagtccctaaaccactgcactaccccaaacaaagttttacaactgtcgctgatacccctgaaaatcttagactgaagcagcagtccgaactccagagccaagtgaagtataaaagggattttgaggagagtaaggggagggggttctcaatcgttactgataccccagaattgcagagactgaaaaggactcaggaacaaatttctaatgtgaagtatcatgaggattttgagaaaaccaagggacgtgggttcacgccagtggttgatgatcctgtgactgaaagagtcagaaagaacacccaagtggtgagtgacgcagcctacaagggggtgcatcctcatatagtcgaaatggatagaaggccgggaatcatcgtggcaccggtgctcccaggcgcttaccagcaaagtcactcccagggttatgggtatatgcaccagacgagcgtgtcttcaatgcgatccatgcagcactcaccgaacctacgtacctacagagcgatgtacgactactccgcccaggacgaggatgaggtatcctttcgggatggcgattacattgtcaatgtgcagcccatcgacgatggatggatgtacgggaccgttcagcggacaggtcgcacaggcatgctccccgccaattacattgaatttgtgaactag

SEQ ID NO: 265807 - DNA, 813 bp, Artificial Sequence
  derived and/or modified sequence
atgaatccacagtgcgctcggtgtggcaaggtggtgtatccgacagagaaggtcaattgcctggacaaatactggcacaagggatgttttcactgtgaagtatgcaaaatggccttaaatatgaacaactacaagggctatgaaaagaagccgtactgcaacgcccactatccgaaacagtctttcaccaccgtggcagacactcccgagaatctcagactcaaacagcagagtgagctgcaaagccaagttaaatataaaagagacttcgaagaatccaaaggccgcgggttttctattgtcactgacacccctgaacttcagcgcctgaagagaacccaagagcaaatttcaaatgtcaaataccatgaagacttcgagaaaaccaaaggacgtgggtttacccctgtggtagacgaccccgttactgaaagagttaggaaaaatactcaagtcgtgtccgacgccgcatacaaaggtgtccacccccatattgttgaaatggaccggcgcccaggcatcatcgtggctcctgtcctgcccggcgcctatcagcaatctcacagtcaaggatacgggtatatgcaccagactagcgtttcaagcatgcggtctatgcagcacagccccaatctgcgaacgtatcgggcgatgtatgactattccgctcaggatgaggatgaggtgagctttcgcgacggcgactacatagtgaatgtgcaacccattgatgatggatggatgtatggaactgtgcagcggaccggtcgcacaggtatgcttcctgcaaactatatcgagtttgtaaactag

SEQ ID NO: 265808 - DNA, 711 bp, Artificial Sequence
  derived and/or modified sequence
atgctgcacttctactatgagtggctgcacagcggcagcagaggagctgtgcccaagcccctgcactaccccaagcagagcttcaccaccgtggccgacaccccagagaacctgcggctgaagcagcagagcgagctgcagagccaggtgaagtacaagagggactttgaggagagcaagggccggggcttcagcatcgtgacagacaccccagagctgcagaggctgaagaggacccaggagcagatcagcaatgtgaagtaccacgaggactttgagaagaccaagggccggggcttcacccctgtggtggatgatcctgtgacagagcgggtgaggaagaacacccaggtggtgtctgatgctgcctacaagggcgtgcacccccacatcgtggagatggaccggcggcccggcatcatcgtggcccctgtgctgcccggggcctaccagcagagccacagccagggctacggctacatgcaccagacctctgtgtcctccatgaggtccatgcagcacagccccaacctgcggacctaccgggccatgtatgactacagcgcccaggatgaagatgaggtgtccttcagagatggagactacatcgtgaatgtgcagcccattgatgatggctggatgtatggaacagtgcagaggactggaagaacaggcatgctgcctgccaactacatcgagtttgtgaactag

SEQ ID NO: 265809 - DNA, 813 bp, Artificial Sequence
  derived and/or modified sequence
atgaacccccagtgtgcccgctgtgggaaggtggtgtaccccacagagaaggtgaactgcctggacaagtactggcacaagggctgcttccactgtgaggtgtgcaagatggccctgaacatgaacaactacaagggctatgagaagaagccctactgcaatgcccactaccccaagcagagcttcaccaccgtggccgacaccccagagaacctgcggctgaagcagcagagcgagctgcagagccaggtgaagtacaagagggactttgaggagagcaagggccggggcttcagcatcgtgacagacaccccagagctgcagaggctgaagaggacccaggagcagatcagcaatgtgaagtaccacgaggactttgagaagaccaagggccggggcttcacccctgtggtggatgatcctgtgacagagcgggtgaggaagaacacccaggtggtgtctgatgctgcctacaagggcgtgcacccccacatcgtggagatggaccggcggcccggcatcatcgtggcccctgtgctgcccggggcctaccagcagagccacagccagggctacggctacatgcaccagacctctgtgtcctccatgaggtccatgcagcacagccccaacctgcggacctaccgggccatgtatgactacagcgcccaggatgaagatgaggtgtccttcagagatggagactacatcgtgaatgtgcagcccattgatgatggctggatgtatggaacagtgcagaggactggaagaacaggcatgctgcctgccaactacatcgagtttgtgaactag

SEQ ID NO: 265810 - DNA, 711 bp, Artificial Sequence
  derived and/or modified sequence
atgctgcacttctactacgagtggctgcacagcggcagccggggcgctgtgcccaaacccttgcactaccccaaacagtcattcaccaccgttgcagacacccccgaaaaccttagactgaagcaacagtctgagttacaaagccaggtgaaatataaacgcgacttcgaggagtccaaggggcgtggattctccatcgttactgacacacccgagctgcagcgactgaagcgcactcaggaacagattagtaatgtgaaataccacgaagattttgaaaaaactaagggccgcggttttaccccggtcgtcgatgatcctgttaccgaacgggtgagaaaaaacactcaggtcgtcagtgatgctgcctacaagggcgttcatccccacatcgtcgaaatggaccgccggcctggtatcattgtggcgcccgtgctgcctggtgcttaccagcagtcccactcccaaggctacggttacatgcatcagactagtgtgtcttccatgaggtcaatgcagcattccccaaatttgagaacctacagagctatgtacgattactccgctcaagatgaggatgaagtgagcttcagggacggagactacatcgtgaatgtccagcccattgacgacggttggatgtatggtacagtacaaaggaccggccgcaccggcatgctgccagctaattacatcgagtttgttaattag

SEQ ID NO: 265811 - DNA, 813 bp, Artificial Sequence
  derived and/or modified sequence
atgaacccccagtgcgcccggtgcggcaaggtggtgtaccccaccgagaaggttaactgcctggacaagtattggcacaagggctgttttcattgtgaggtgtgtaagatggcgctcaatatgaataattataagggctatgagaaaaagccatactgtaacgcccactacccaaagcagagttttacgacggttgcggacactcccgagaacttacgtctgaaacagcagagcgagttacagagccaggtgaaatataagagagatttcgaagagtccaaaggaagaggcttttcaatcgtcacagacacaccagaactgcagcgcctgaagcggactcaagaacagatctctaatgtgaagtatcacgaagattttgagaaaaccaagggacgaggcttcaccccggtggtagacgacccggttacggaaagagtgcgcaagaacactcaagtcgtgagtgatgcagcgtacaagggggttcacccgcacatcgtggaaatggaccgccgtcctggaataattgtggctcctgtccttccgggcgcttaccagcaaagccattctcagggatatggttacatgcaccaaacctcggtgagcagcatgcgctccatgcagcatagtccaaacttgaggacatacagggccatgtacgattacagcgcacaggatgaagacgaggtgagtttcagagacggcgattacatcgtgaacgtgcagccaatcgatgacgggtggatgtatggaacagtccaacgcacaggtcggactggaatgcttcctgccaattatatcgagtttgttaattag

SEQ ID NO: 265812 - DNA, 989 bp, Artificial Sequence
  derived and/or modified sequence
agatgcttcatttctattatgagtggctgcattctggctccaggggcgcagtccctaagccgctacactacccgaagcagtccttcaccacggtggcagatacacctgaaaatcttcgcctgaagcagcaaagtgaattgcagagtcaggtcaagtacaaaagagattttgaagaaagcaaagggaggggcttcagcatcgtcacggacactcctgagctacagagactgaagaggactcaggagcaaatcagtaatgtaaaataccatgaagattttgaaaaaacaaaggggagaggctttactcccgtcgtggacgatcctgtgacagagagagtgaggaagaacacccaggtggtcagcgatgctgcctataaaggggtccaccctcacatcgtggagatggacaggagacctggaatcattgttgcacctgttcttcccggagcctatcagcaaagccattcccaaggctatggctacatgcaccagaccagtgtgtcatccatgagatcaatgcagcattcaccaaatctaaggacctaccgagccatgtacgattacagtgcccaggatgaagacgaggtctcctttagagacggcgactacatcgtcaacgtgcagcctattgacgatggctggatgtacggcacagtgcagagaacagggagaacaggaatgctcccagcgaattacattgagtttgttaattaattatttctccctgccctttgagctttattctaatgtatcccaaacctaatctttttaaaagatagaagatacttttaagacaacttggccattattttacaatgatgtatccttcctttgacaattagacacacaggtaccaggaagaaggaatgacctctgggctgaaaacagcagcattttcagtaattcctacaaacaaaaatctttgtgtctggacacctggtgctgctaattgtgttcatggtttcctttgattggctattgaacccttct

SEQ ID NO: 265813 - DNA, 3008 bp, Artificial Sequence
  derived and/or modified sequence
cctgcgcggcggcggcggcgaggcgggggagcgagtgagcgcgaggggcgggcgcgagtgactgtgtgagtcacccgtacctggagtgcgagcgacgcagagccagcggcgcggagccggagccggagccgagacccagcgcctgcgagcccgagagcgcggccggccccaggcgccaggccccgtcgccctccccgtgcactcacccgtggcccggcgccgactccctacccggcgcccgccgcccgcagccctcccgcctgccaggaggcggtgcggggctcgccgggggatgtcacagcggctcctgggagccagcagccgccgccgccgccgcccccgggaaccgcgatcatgaacccccagtgcgcccgttgcggaaaagtcgtgtatcccaccgagaaagtcaactgcctggataagtattggcataaaggatgtttccattgtgaggtctgcaagatggcactcaacatgaacaactacaaaggctatgaaaagaagccctattgtaatgcacactacccgaagcagtccttcaccacggtggcagatacacctgaaaatcttcgcctgaagcagcaaagtgaattgcagagtcaggtcaagtacaaaagagattttgaagaaagcaaagggaggggcttcagcatcgtcacggacactcctgagctacagagactgaagaggactcaggagcaaatcagtaatgtaaaataccatgaagattttgaaaaaacaaaggggagaggctttactcccgtcgtggacgatcctgtgacagagagagtgaggaagaacacccaggtggtcagcgatgctgcctataaaggggtccaccctcacatcgtggagatggacaggagacctggaatcattgttgcacctgttcttcccggagcctatcagcaaagccattcccaaggctatggctacatgcaccagaccagtgtgtcatccatgagatcaatgcagcattcaccaaatctaaggacctaccgagccatgtacgattacagtgcccaggatgaagacgaggtctcctttagagacggcgactacatcgtcaacgtgcagcctattgacgatggctggatgtacggcacagtgcagagaacagggagaacaggaatgctcccagcgaattacattgagtttgttaattaattatttctccctgccctttgagctttattctaatgtatcccaaacctaatctttttaaaagatagaagatacttttaagacaacttggccattattttacaatgatgtatccttcctttgacaattagacacacaggtaccaggaagaaggaatgacctctgggctgaaaacagcagcattttcagtaattcctacaaacaaaaatctttgtgtctggacacctggtgctgctaattgtgttcatggtttcctttgattggctattgaacccttctgggaaatgtatttttgtagactttaatagagaagttgattgtcccttaaatgtagtgtgtgtttgaaacttcttagctgtcactttggaatcaccccaagccaattctcttaactctgtaatgcagccaataatttcaaacccgttttgcttttgagtcatgaggcaatttccaatattagtgaaaattgcccaatataataagtgtaaacagtggcagaaggacagtctggttaaaattatattgactggtggccttagggatctagaaacttctactaaacagagaaatttccttgttccctaggctgactggtatctatttatttctcatttgtaccaaggcatctcctactctccatttatattctatggacccaagtctatgctcagttccacagaatgtcaggaccaaataacttcacagctactctgcaaagggcaaattataatgtcattgatataatttccctagtagcatttaccctgttgcatgtcatgtagattcaagcttctgtaacataggcagctgcactgcgcgttcctattattgaagcaaaaagggtgactgatacctaaaagccctttcttcctctagtcgccagctcatcagaaaaacatactttgaaaagatgcttgagattttcctgctgcatcgcactctagttttgaaggatttacatcttaggaaataacatgtatactctagtaaataagcgatttaggtgttccattgaacagctttgattaacttaatgccaccattgatttcaaagtgaagaaaatgtaacagaagccagtgaagcaatggaagctggagtgtgactggaaaaatactcagcaaacaaagttaccaattccatacagagatgatctggtatcttcttttggaaaatggtattcaaattctggaatggaaatctagccaccaaaacgggttaatcaaaagacgtccttttccatttttttttgcttttattttctaaatcatttttaagggaatgaaacaggaatgtcatcagagattttttagtacaggcccaagagcctgttctctaagaaagaaattgttgccatgttttgattttcgaataagtgactttgcaggctttatgctagcccttgctggtgggtcttgaaatttcatccagagtctgcagtccaggtcaccaagccagcggcacccgtcggcaaccctgtgtttttctgattgtgccgtttactgtgacctgcaacggggtggcattcacttagggtctgacttcacagctatgacaaaaccgaaaaagcaaaactgcaaaaaagtactaagatgtacgggtcttggggatatctgccttatatgttatattcaaggaaattaacaaaacatcctgtaaaacatcgtttaaggaaacgtttactagtccaaaggccaaagctaatttatttccactttagaaaagttagcacatgcttttgaaaatctgtgatttcattttattaggctaaaagggtaaataggctttattacactgaagctgcatctatatgtcactgacataaagttgaaaaaataaatgcagg

SEQ ID NO: 265814 - DNA, 711 bp, Artificial Sequence
  derived and/or modified sequence
atgctgcacttctactacgaatggctccacagcggcagtcgtggggcagtgcccaaacccctccactaccctaaacagagtttcacaacagtagcggatacaccagaaaacttacggctgaaacagcaatccgaactacagagccaagttaagtataagagagatttcgaagagtcaaagggtcggggattttccattgttaccgacacaccagagttgcaacggttgaagcggacacaggagcaaatatccaatgtgaaatatcatgaggactttgagaagaccaaggggcgaggtttcacacccgtggtcgacgatcccgtcaccgagcgcgtgcgaaagaatactcaggtggtctcagatgctgcctacaagggtgtgcaccctcacattgtggaaatggacaggaggcccggtataatcgtcgctcccgtgctgcccggtgcctatcaacagtctcattcacaagggtacggctacatgcaccaaacttcagtctcttctatgcgatccatgcaacacagcccaaacctccgtacataccgtgccatgtacgactatagtgcgcaggatgaggacgaggtttccttccgcgatggagactatatcgtaaatgtccaaccaattgatgacggatggatgtacggaactgttcagcggactggtcgaactggcatgctgccagctaactatatagagttcgtaaactag

SEQ ID NO: 265815 - DNA, 813 bp, Artificial Sequence
  derived and/or modified sequence
atgaaccctcagtgtgcacgctgtggtaaggtcgtctatccgacggagaaagtcaattgcctggataagtattggcacaagggatgcttccattgtgaggtgtgcaaaatggctctgaatatgaacaattacaaaggatacgaaaagaagccctattgtaacgctcactaccccaagcagtcctttactaccgtggccgacacacccgagaacttaagattaaagcagcaatccgagttacagagccaggttaagtataagcgcgactttgaggaatccaaagggcgaggattcagcatcgtgacagacacccctgaactccagcggctgaagcgcacccaggagcagatatccaatgtcaagtaccacgaggattttgaaaagacaaagggcagggggttcacaccagtcgttgatgacccggttacagagagggttcggaagaatacccaggtggtatcagacgcggcatacaagggcgtccaccctcacattgtggagatggaccggaggccgggaattatagttgccccagtattaccaggcgcttatcagcagtctcattcacaaggatacggctatatgcaccaaactagcgtaagttcaatgcgatctatgcagcactcccccaatctaagaacatatagggccatgtatgattatagcgcacaggacgaggatgaagtgtccttccgcgacggggattatatcgtcaatgtccagcccattgacgacggctggatgtacggcacagttcagaggactgggcgtacaggtatgcttcctgccaattatattgaattcgtgaattag

SEQ ID NO: 265816 - DNA, 711 bp, Artificial Sequence
  derived and/or modified sequence
atgctgcacttctactacgagtggctgcacagcggcagcagaggcgccgtgcccaagcccctgcactaccccaagcagagcttcaccaccgtggccgacacccccgagaacctgagactgaagcagcagagcgagctgcagagccaggtgaagtacaagagagacttcgaggagagcaagggcagaggcttcagcatcgtgaccgacacccccgagctgcagagactgaagagaacccaggagcagatcagcaacgtgaagtaccacgaggacttcgagaagaccaagggcagaggcttcacccccgtggtggacgaccccgtgaccgagagagtgagaaagaacacccaggtggtgagcgacgccgcctacaagggcgtgcacccccacatcgtggagatggacagaagacccggcatcatcgtggcccccgtgctgcccggcgcctaccagcagagccacagccagggctacggctacatgcaccagaccagcgtgagcagcatgagaagcatgcagcacagccccaacctgagaacctacagagccatgtacgactacagcgcccaggacgaggacgaggtgagcttcagagacggcgactacatcgtgaacgtgcagcccatcgacgacggctggatgtacggcaccgtgcagagaaccggcagaaccggcatgctgcccgccaactacatcgagttcgtgaactag

SEQ ID NO: 265817 - DNA, 813 bp, Artificial Sequence
  derived and/or modified sequence
atgaacccccagtgcgccagatgcggcaaggtggtgtaccccaccgagaaggtgaactgcctggacaagtactggcacaagggctgcttccactgcgaggtgtgcaagatggccctgaacatgaacaactacaagggctacgagaagaagccctactgcaacgcccactaccccaagcagagcttcaccaccgtggccgacacccccgagaacctgagactgaagcagcagagcgagctgcagagccaggtgaagtacaagagagacttcgaggagagcaagggcagaggcttcagcatcgtgaccgacacccccgagctgcagagactgaagagaacccaggagcagatcagcaacgtgaagtaccacgaggacttcgagaagaccaagggcagaggcttcacccccgtggtggacgaccccgtgaccgagagagtgagaaagaacacccaggtggtgagcgacgccgcctacaagggcgtgcacccccacatcgtggagatggacagaagacccggcatcatcgtggcccccgtgctgcccggcgcctaccagcagagccacagccagggctacggctacatgcaccagaccagcgtgagcagcatgagaagcatgcagcacagccccaacctgagaacctacagagccatgtacgactacagcgcccaggacgaggacgaggtgagcttcagagacggcgactacatcgtgaacgtgcagcccatcgacgacggctggatgtacggcaccgtgcagagaaccggcagaaccggcatgctgcccgccaactacatcgagttcgtgaactag

SEQ ID NO: 265818 - protein, 1250 aa, Artificial Sequence
  derived and/or modified sequence
MEQLSDEEIDHGAEEDSDKEDQDLDKMFGAWLGELDKLTQSLDSDKPMEPVKRSPLRQETNMANFSYRFSIYNLNEALNQGETVDLDALMADLCSIEQELSSIGSGNSKRQITETKATQKLPVSRHTLKHGTLKGLSSSSNRIAKPSHASYSLDDVTAQLEQASLSMDEAAQQSVLEDTKPLVTNQHRRTASAGTVSDAEVHSISNSSHSSITSAASSMDSLDIDKVTRPQELDLTHQGQPITEEEQAAKLKAEKIRVALEKIKEAQVKKLVIRVHMSDDSSKTMMVDERQTVRQVLDNLMDKSHCGYSLDWSLVETVSELQMERIFEDHENLVENLLNWTRDSQNKLIFMERIEKYALFKNPQNYLLGKKETAEMADRNKEVLLEECFCGSSVTVPEIEGVLWLKDDGKKSWKKRYFLLRASGIYYVPKGKAKVSRDLVCFLQLDHVNVYYGQDYRNKYKAPTDYCLVLKHPQIQKKSQYIKYLCCDDVRTLHQWVNGIRIAKYGKQLYMNYQEALKRTESAYDWTSLSSSSIKSGSSSSSIPESQSNHSNQSDSGVSDTQPAGHVRSQSIVSSVFSEAWKRGTQLEESSKARMESMNRPYTSLVPPLSPQPKIVTPYTASQPSPPLPPPPPPPPPPPPPPPPPPPPLPSQSAPSAGSAAPMFVKYSTITRLQNASQHSGALFKPPTPPVMQSQSVKPQILVPPNGVVPPPPPPPPPPTPGSAMAQLKPAPCAPSLPQFSAPPPPLKIHQVQHITQVAPPTPPPPPPIPAPLPPQAPPKPLVTIPAPTSTKTVAPVVTQAAPPTPTPPVPPAKKQPAFPASYIPPSPPTPPVPVPPPTLPKQQSFCAKPPPSPLSPVPSVVKQIASQFPPPPTPPAMESQPLKPVPANVAPQSPPAVKAKPKWQPSSIPVPSPDFPPPPPESSLVFPPPPPSPVPAPPPPPPPTASPTPDKSGSPGKKTSKTSSPGGKKPPPTPQRNSSIKSSSGAEHPEPKRPSVDSLVSKFTPPAESGSPSKETLPPPAAPPKPGKLNLSGVNLPGVLQQGCVSAKAPVLSGRGKDSVVEFPSPPSDSDFPPPPPETELPLPPIEIPAVFSGNTSPKVAVVNPQPQQWSKMSVKKAPPPTRPKRNDSTRLTQAEISEQPTMATVVPQVPTSPKSSLSVQPGFLADLNRTLQRKSITRHGSLSSRMSRAEPTATMDDMALPPPPPELLSDQQKAGYGGSHISGYATLRRGPPPAPPKRDQNTKLSRDW

SEQ ID NO: 265819 - protein, 597 aa, Artificial Sequence
  derived and/or modified sequence
MEQLSDEEIDHGAEEDSDKEDQDLDKMFGAWLGELDKLTQSLDSDKPMEPVKRSPLRQETNMANFSYRFSIYNLNEALNQGETVDLDALMADLCSIEQELSSIGSGNSKRQITETKATQKLPVSRHTLKHGTLKGLSSSSNRIAKPSHASYSLDDVTAQLEQASLSMDEAAQQSVLEDTKPLVTNQHRRTASAGTVSDAEVHSISNSSHSSITSAASSMDSLDIDKVTRPQELDLTHQGQPITEEEQAAKLKAEKIRVALEKIKEAQVKKLVIRVHMSDDSSKTMMVDERQTVRQVLDNLMDKSHCGYSLDWSLVETVSELQMERIFEDHENLVENLLNWTRDSQNKLIFMERIEKYALFKNPQNYLLGKKETAEMADRNKEVLLEECFCGSSVTVPEIEGVLWLKDDGKKSWKKRYFLLRASGIYYVPKGKAKVSRDLVCFLQLDHVNVYYGQDYRNKYKAPTDYCLVLKHPQIQKKSQYIKYLCCDDVRTLHQWVNGIRIAKYGKQLYMNYQEALKRTESAYDWTSLSSSSIKSGSSSSSIPESQSNHSNQSDSGVSDTQPAGHVRSQSIVSSVFSEAWKRGTQLEESSKVTASF

SEQ ID NO: 265820 - protein, 592 aa, Artificial Sequence
  derived and/or modified sequence
MEQLSDEEIDHGAEEDSDKEDQDLDKMFGAWLGELDKLTQSLDSDKPMEPVKRSPLRQETNMANFSYRFSIYNLNEALNQGETVDLDALMADLCSIEQELSSIGSGNSKRQITETKATQKLPVSRHTLKHGTLKGLSSSSNRIAKPSHASYSLDDVTAQLEQASLSMDEAAQQSVLEDTKPLVTNQHRRTASAGTVSDAEVHSISNSSHSSITSAASSMDSLDIDKVTRPQELDLTHQGQPITEEEQAAKLKAEKIRVALEKIKEAQVKKLVIRVHMSDDSSKTMMVDERQTVRQVLDNLMDKSHCGYSLDWSLVETVSELQMERIFEDHENLVENLLNWTRDSQNKLIFMERIEKYALFKNPQNYLLGKKETAEMADRNKEVLLEECFCGSSVTVPEIEGVLWLKDDGKKSWKKRYFLLRASGIYYVPKGKAKVSRDLVCFLQLDHVNVYYGQDYRNKYKAPTDYCLVLKHPQIQKKSQYIKYLCCDDVRTLHQWVNGIRIAKYGKQLYMNYQEALKRTESAYDWTSLSSSSIKSGSSSSSIPESQSNHSNQSDSGVSDTQPAGHVRSQSIVSSVFSEAWKRGTQLEESSK

SEQ ID NO: 265821 - protein, 172 aa, Artificial Sequence
  derived and/or modified sequence
MEQLSDEEIDHGAEEDSDKEDQDLDKMFGAWLGELDKLTQSLDSDKPMEPVKRSPLRQETNMANFSYRFSIYNLNEALNQGETVDLDALMADLCSIEQELSSIGSGNSKRQITETKATQKLPVSRHTLKHGTLKGLSSSSNRIAKPSHASYSLDDVTAQLEQASLSMDEAAQ

SEQ ID NO: 265822 - DNA, 3753 bp, Artificial Sequence
  derived and/or modified sequence
atggagcagctgagcgacgaggagatcgaccacggcgccgaggaggacagcgacaaggaggaccaggacctggacaagatgttcggcgcctggctgggcgagctggacaagctgacccagagcctggacagcgacaagcccatggagcccgtgaagagaagccccctgagacaggagaccaacatggccaacttcagctacagattcagcatctacaacctgaacgaggccctgaaccagggcgagaccgtggacctggacgccctgatggccgacctgtgcagcatcgagcaggagctgagcagcatcggcagcggcaacagcaagagacagatcaccgagaccaaggccacccagaagctgcccgtgagcagacacaccctgaagcacggcaccctgaagggcctgagcagcagcagcaacagaatcgccaagcccagccacgccagctacagcctggacgacgtgaccgcccagctggagcaggccagcctgagcatggacgaggccgcccagcagagcgtgctggaggacaccaagcccctggtgaccaaccagcacagaagaaccgccagcgccggcaccgtgagcgacgccgaggtgcacagcatcagcaacagcagccacagcagcatcaccagcgccgccagcagcatggacagcctggacatcgacaaggtgaccagaccccaggagctggacctgacccaccagggccagcccatcaccgaggaggagcaggccgccaagctgaaggccgagaagatcagagtggccctggagaagatcaaggaggcccaggtgaagaagctggtgatcagagtgcacatgagcgacgacagcagcaagaccatgatggtggacgagagacagaccgtgagacaggtgctggacaacctgatggacaagagccactgcggctacagcctggactggagcctggtggagaccgtgagcgagctgcagatggagagaatcttcgaggaccacgagaacctggtggagaacctgctgaactggaccagagacagccagaacaagctgatcttcatggagagaatcgagaagtacgccctgttcaagaacccccagaactacctgctgggcaagaaggagaccgccgagatggccgacagaaacaaggaggtgctgctggaggagtgcttctgcggcagcagcgtgaccgtgcccgagatcgagggcgtgctgtggctgaaggacgacggcaagaagagctggaagaagagatacttcctgctgagagccagcggcatctactacgtgcccaagggcaaggccaaggtgagcagagacctggtgtgcttcctgcagctggaccacgtgaacgtgtactacggccaggactacagaaacaagtacaaggcccccaccgactactgcctggtgctgaagcacccccagatccagaagaagagccagtacatcaagtacctgtgctgcgacgacgtgagaaccctgcaccagtgggtgaacggcatcagaatcgccaagtacggcaagcagctgtacatgaactaccaggaggccctgaagagaaccgagagcgcctacgactggaccagcctgagcagcagcagcatcaagagcggcagcagcagcagcagcatccccgagagccagagcaaccacagcaaccagagcgacagcggcgtgagcgacacccagcccgccggccacgtgagaagccagagcatcgtgagcagcgtgttcagcgaggcctggaagagaggcacccagctggaggagagcagcaaggccagaatggagagcatgaacagaccctacaccagcctggtgccccccctgagcccccagcccaagatcgtgaccccctacaccgccagccagcccagcccccccctgccccccccccccccccccccccccccccccccccccccccccccccccccccccccccccctgcccagccagagcgcccccagcgccggcagcgccgcccccatgttcgtgaagtacagcaccatcaccagactgcagaacgccagccagcacagcggcgccctgttcaagccccccaccccccccgtgatgcagagccagagcgtgaagccccagatcctggtgccccccaacggcgtggtgccccccccccccccccccccccccccccccacccccggcagcgccatggcccagctgaagcccgccccctgcgcccccagcctgccccagttcagcgccccccccccccccctgaagatccaccaggtgcagcacatcacccaggtggccccccccaccccccccccccccccccccatccccgcccccctgcccccccaggccccccccaagcccctggtgaccatccccgcccccaccagcaccaagaccgtggcccccgtggtgacccaggccgccccccccacccccaccccccccgtgccccccgccaagaagcagcccgccttccccgccagctacatcccccccagcccccccaccccccccgtgcccgtgcccccccccaccctgcccaagcagcagagcttctgcgccaagcccccccccagccccctgagccccgtgcccagcgtggtgaagcagatcgccagccagttcccccccccccccaccccccccgccatggagagccagcccctgaagcccgtgcccgccaacgtggccccccagagcccccccgccgtgaaggccaagcccaagtggcagcccagcagcatccccgtgcccagccccgacttccccccccccccccccgagagcagcctggtgttccccccccccccccccagccccgtgcccgcccccccccccccccccccccccaccgccagccccacccccgacaagagcggcagccccggcaagaagaccagcaagaccagcagccccggcggcaagaagcccccccccaccccccagagaaacagcagcatcaagagcagcagcggcgccgagcaccccgagcccaagagacccagcgtggacagcctggtgagcaagttcaccccccccgccgagagcggcagccccagcaaggagaccctgcccccccccgccgccccccccaagcccggcaagctgaacctgagcggcgtgaacctgcccggcgtgctgcagcagggctgcgtgagcgccaaggcccccgtgctgagcggcagaggcaaggacagcgtggtggagttccccagcccccccagcgacagcgacttccccccccccccccccgagaccgagctgcccctgccccccatcgagatccccgccgtgttcagcggcaacaccagccccaaggtggccgtggtgaacccccagccccagcagtggagcaagatgagcgtgaagaaggcccccccccccaccagacccaagagaaacgacagcaccagactgacccaggccgagatcagcgagcagcccaccatggccaccgtggtgccccaggtgcccaccagccccaagagcagcctgagcgtgcagcccggcttcctggccgacctgaacagaaccctgcagagaaagagcatcaccagacacggcagcctgagcagcagaatgagcagagccgagcccaccgccaccatggacgacatggccctgcccccccccccccccgagctgctgagcgaccagcagaaggccggctacggcggcagccacatcagcggctacgccaccctgagaagaggccccccccccgccccccccaagagagaccagaacaccaagctgagcagagactggtag

SEQ ID NO: 265823 - DNA, 1794 bp, Artificial Sequence
  derived and/or modified sequence
atggagcagctgagcgacgaggagatcgaccacggcgccgaggaggacagcgacaaggaggaccaggacctggacaagatgttcggcgcctggctgggcgagctggacaagctgacccagagcctggacagcgacaagcccatggagcccgtgaagagaagccccctgagacaggagaccaacatggccaacttcagctacagattcagcatctacaacctgaacgaggccctgaaccagggcgagaccgtggacctggacgccctgatggccgacctgtgcagcatcgagcaggagctgagcagcatcggcagcggcaacagcaagagacagatcaccgagaccaaggccacccagaagctgcccgtgagcagacacaccctgaagcacggcaccctgaagggcctgagcagcagcagcaacagaatcgccaagcccagccacgccagctacagcctggacgacgtgaccgcccagctggagcaggccagcctgagcatggacgaggccgcccagcagagcgtgctggaggacaccaagcccctggtgaccaaccagcacagaagaaccgccagcgccggcaccgtgagcgacgccgaggtgcacagcatcagcaacagcagccacagcagcatcaccagcgccgccagcagcatggacagcctggacatcgacaaggtgaccagaccccaggagctggacctgacccaccagggccagcccatcaccgaggaggagcaggccgccaagctgaaggccgagaagatcagagtggccctggagaagatcaaggaggcccaggtgaagaagctggtgatcagagtgcacatgagcgacgacagcagcaagaccatgatggtggacgagagacagaccgtgagacaggtgctggacaacctgatggacaagagccactgcggctacagcctggactggagcctggtggagaccgtgagcgagctgcagatggagagaatcttcgaggaccacgagaacctggtggagaacctgctgaactggaccagagacagccagaacaagctgatcttcatggagagaatcgagaagtacgccctgttcaagaacccccagaactacctgctgggcaagaaggagaccgccgagatggccgacagaaacaaggaggtgctgctggaggagtgcttctgcggcagcagcgtgaccgtgcccgagatcgagggcgtgctgtggctgaaggacgacggcaagaagagctggaagaagagatacttcctgctgagagccagcggcatctactacgtgcccaagggcaaggccaaggtgagcagagacctggtgtgcttcctgcagctggaccacgtgaacgtgtactacggccaggactacagaaacaagtacaaggcccccaccgactactgcctggtgctgaagcacccccagatccagaagaagagccagtacatcaagtacctgtgctgcgacgacgtgagaaccctgcaccagtgggtgaacggcatcagaatcgccaagtacggcaagcagctgtacatgaactaccaggaggccctgaagagaaccgagagcgcctacgactggaccagcctgagcagcagcagcatcaagagcggcagcagcagcagcagcatccccgagagccagagcaaccacagcaaccagagcgacagcggcgtgagcgacacccagcccgccggccacgtgagaagccagagcatcgtgagcagcgtgttcagcgaggcctggaagagaggcacccagctggaggagagcagcaaggtgaccgccagcttctag

SEQ ID NO: 265824 - DNA, 1779 bp, Artificial Sequence
  derived and/or modified sequence
atggagcagctgagcgacgaggagatcgaccacggcgccgaggaggacagcgacaaggaggaccaggacctggacaagatgttcggcgcctggctgggcgagctggacaagctgacccagagcctggacagcgacaagcccatggagcccgtgaagagaagccccctgagacaggagaccaacatggccaacttcagctacagattcagcatctacaacctgaacgaggccctgaaccagggcgagaccgtggacctggacgccctgatggccgacctgtgcagcatcgagcaggagctgagcagcatcggcagcggcaacagcaagagacagatcaccgagaccaaggccacccagaagctgcccgtgagcagacacaccctgaagcacggcaccctgaagggcctgagcagcagcagcaacagaatcgccaagcccagccacgccagctacagcctggacgacgtgaccgcccagctggagcaggccagcctgagcatggacgaggccgcccagcagagcgtgctggaggacaccaagcccctggtgaccaaccagcacagaagaaccgccagcgccggcaccgtgagcgacgccgaggtgcacagcatcagcaacagcagccacagcagcatcaccagcgccgccagcagcatggacagcctggacatcgacaaggtgaccagaccccaggagctggacctgacccaccagggccagcccatcaccgaggaggagcaggccgccaagctgaaggccgagaagatcagagtggccctggagaagatcaaggaggcccaggtgaagaagctggtgatcagagtgcacatgagcgacgacagcagcaagaccatgatggtggacgagagacagaccgtgagacaggtgctggacaacctgatggacaagagccactgcggctacagcctggactggagcctggtggagaccgtgagcgagctgcagatggagagaatcttcgaggaccacgagaacctggtggagaacctgctgaactggaccagagacagccagaacaagctgatcttcatggagagaatcgagaagtacgccctgttcaagaacccccagaactacctgctgggcaagaaggagaccgccgagatggccgacagaaacaaggaggtgctgctggaggagtgcttctgcggcagcagcgtgaccgtgcccgagatcgagggcgtgctgtggctgaaggacgacggcaagaagagctggaagaagagatacttcctgctgagagccagcggcatctactacgtgcccaagggcaaggccaaggtgagcagagacctggtgtgcttcctgcagctggaccacgtgaacgtgtactacggccaggactacagaaacaagtacaaggcccccaccgactactgcctggtgctgaagcacccccagatccagaagaagagccagtacatcaagtacctgtgctgcgacgacgtgagaaccctgcaccagtgggtgaacggcatcagaatcgccaagtacggcaagcagctgtacatgaactaccaggaggccctgaagagaaccgagagcgcctacgactggaccagcctgagcagcagcagcatcaagagcggcagcagcagcagcagcatccccgagagccagagcaaccacagcaaccagagcgacagcggcgtgagcgacacccagcccgccggccacgtgagaagccagagcatcgtgagcagcgtgttcagcgaggcctggaagagaggcacccagctggaggagagcagcaagtag

SEQ ID NO: 265825 - DNA, 3753 bp, Artificial Sequence
  derived and/or modified sequence
atggagcagctgagcgatgaggagattgaccacggggcggaggaggactcagataaggaggaccaggacctggacaaaatgtttggggcttggctcggagagctggataaattgacccagtctctcgatagcgacaagcctatggaaccagtgaagcggtctccccttaggcaggaaaccaacatggctaatttttcatatagattcagtatctacaacctaaatgaggccctcaatcagggggaaaccgtagatttggatgccctgatggctgacctgtgtagtattgaacaggaactcagcagcatcgggagtggaaactccaagcggcaaataaccgagacaaaggctactcagaaactgccggtgtcacgccacacactgaaacatggtacactcaagggacttagttccagttctaaccgcatcgcaaaaccctctcacgccagctattctctcgacgacgtcactgcccagctggaacaagcttccctcagcatggatgaggccgcgcagcagagtgtactcgaagacacaaagcctctcgtcacaaatcaacaccgtagaaccgcctctgctggcactgtgtcagatgctgaagtacactctattagtaacagtagtcacagtagcataactagcgccgcatcctctatggatagcctggacattgataaagtgactaggcctcaagagctggacctcacccatcagggccagcccattacagaggaggaacaggccgcaaagctgaaagccgaaaagattcgggttgcactggaaaagataaaagaggcccaggtgaagaaattagtgatcagggttcatatgtcagatgacagcagcaagactatgatggtcgacgaacggcagaccgttaggcaagtactggacaacctcatggataaaagtcattgcggctattcccttgactggtctctggtcgagacagtctcagaactccagatggagcggatcttcgaggatcacgagaaccttgtagagaatctcctcaattggacccgcgactctcagaacaaattaatctttatggagcggatcgaaaaatacgcacttttcaagaacccgcagaattatctgctcgggaaaaaggaaaccgctgagatggccgatagaaacaaagaagttctgctcgaggagtgcttctgcggtagcagcgtaaccgtgcccgagattgagggggtcttgtggctgaaggacgacgggaaaaaatcatggaaaaaaaggtatttcctgctgagggcgtccgggatctactatgtgcctaagggaaaggcaaaagtgtctagggatctagtttgttttctacagctggatcatgtgaacgtctactatggacaagattacagaaacaagtataaagcccccactgactactgcctggtcctcaaacacccacagattcagaagaaatctcagtacatcaagtatctgtgctgcgatgacgtgcgtactctgcaccagtgggtgaatggcattcgcatcgccaaatacggaaagcagctttatatgaactatcaagaggctctgaagcggaccgaatctgcctacgactggacaagcttgagttccagcagcatcaaatctggctcctcaagttcatctattcctgagtcccagtctaaccactccaatcagagtgactcaggcgtcagtgatacccagcctgccggccacgtccgcagccagagcattgtgagttccgttttcagcgaggcctggaaacgcgggactcagcttgaggagagctctaaagctagaatggagagcatgaacagaccctacaccagccttgtcccccctctttcaccacagccaaaaatcgtaaccccatataccgcatcccagccatcaccgcccctgccgccgccgcccccacctccaccccctcccccgccaccccccccacctccacctcctcccttgccttcacaaagcgcgcccagtgccggaagcgctgctcccatgttcgtcaagtattcaaccatcacccgcctgcaaaacgcatcccaacatagtggggcccttttcaagccgccaactccacctgtgatgcaatcccagagcgtgaaaccgcaaatcctagtgcctcctaatggagttgtcccacccccaccccccccccctccaccccctacccctggcagcgccatggcgcagcttaagccagccccttgcgctccatctttaccacagttcagcgcccctcctccgcctcttaagattcaccaggtgcagcatatcacacaggtggctcccccaactccccctccgccacccccaattccagctccccttccacctcaggctccccctaagccactggtgaccatccccgcccctacatctactaagacagtcgcccctgtggtcacacaagcggctccaccgaccccaacgccacctgttcctccggctaagaagcagccggcatttcctgcgagctacattcccccttccccccctaccccccccgtgcctgtgcctccacccacactgccgaaacaacaaagcttctgcgctaaacctccacctagcccgttgagcccagtgccgagtgtggtgaagcagattgcatctcaattccccccccctccaaccccaccagctatggagagtcagccacttaagcctgtgcctgccaacgtggccccacaatctccccctgccgtcaaagccaagcccaagtggcaaccaagctcgatacccgtgccttctcccgatttccccccaccgccaccagagtcctctctcgtgttccctccaccacccccttcccccgttccagcccctcccccacccccacccccaactgccagtccgactccagataagtctggttcgccaggaaaaaagacatcaaaaacctcctcgccgggcggaaagaaaccccccccaacaccacagaggaactcttccattaagtcaagctcaggtgctgaacatccagaaccaaagcggccctccgtagacagcttagtttccaagttcacacctcccgcagaatccggaagccctagcaaagagaccctgcccccgccagccgcaccgccaaagcctggtaagctgaatttgtccggggtcaatctccctggcgttctgcagcagggttgcgttagcgcgaaggcgcccgtcttgtccggcaggggtaaagactctgtggttgaatttccgtcacctccctccgacagtgatttccccccaccacctccggagacagaactgcctctgccacctattgaaatcccagctgtgttcagcggtaacacctcccctaaggtggccgtggtgaacccacagccacagcagtggtctaaaatgagcgtgaaaaaggctccaccaccaacccggccaaagcgaaatgattccacacggctgacacaggccgagattagtgagcagcccaccatggccaccgtcgtacctcaggtccctaccagtcccaagagttctcttagcgtgcagccgggtttcttagccgacctgaatagaaccctgcagagaaagtctatcacccgacatggctcattatcatccagaatgtctagggcagaaccgacagccacaatggatgatatggccctcccccctcccccccccgagctgctctcagaccagcaaaaagctggctacggagggagccacatctctggctacgccacgctcaggcgaggcccgcctccggctcccccaaaacgagaccagaacaccaagttgtcccgcgattggtag

SEQ ID NO: 265826 - DNA, 1794 bp, Artificial Sequence
  derived and/or modified sequence
atggagcagctttctgacgaagaaatcgatcacggcgctgaggaagattcagacaaagaggatcaggacctggataaaatgttcggcgcatggctcggggagctagacaagctgacacagtcgctggattcagataagccaatggagcccgtcaagaggagccctctccgtcaagagaccaacatggcaaacttcagttacaggtttagtatctataaccttaatgaagctctgaatcagggcgagactgtggacctggacgctttaatggcggatttatgtagtatcgaacaggagctgtctagtatcggctcagggaatagcaaaagacagatcaccgaaaccaaggctacccaaaagctcccggtcagcaggcacactctgaaacacggtacactgaaaggcctgagctcatcaagcaatcgaattgccaaacccagccatgcatcctatagtttggacgacgttacagctcagttggagcaggcatccttatctatggatgaggctgcacagcagtcggtgctcgaggatactaaacccctcgtgaccaatcagcaccggcggaccgccagtgcaggcaccgtatccgacgcagaggtccacagcatcagcaacagtagtcactcttccattacaagcgctgcatctagcatggacagtctggacatagataaagtgacccggccacaggaactggatttaacccatcagggacagccgattaccgaagaggagcaggccgcaaaactcaaggcagagaagatcagggtagcgcttgaaaagattaaggaggctcaggtgaaaaagctggtgatccgggttcacatgtctgacgattcatctaagacaatgatggtggacgagagacagaccgttcgccaagtgctggataaccttatggataaatcgcattgtggctacagcttggattggtctctcgtggagactgtgtctgagctccagatggagcgcatttttgaggatcacgagaacctggtggaaaatcttctgaactggactcgagattcacaaaataagctgatcttcatggaacgtatcgaaaagtacgccctgttcaaaaatcctcagaactacctcttagggaagaaagaaactgcagaaatggccgacaggaacaaggaggtgttgctcgaagagtgtttttgtggatcttccgtcactgtgcccgagattgaaggggtgttgtggttaaaagacgacggaaagaagagttggaagaagagatacttcctgttgagggcctcaggcatatattatgtccccaagggtaaggcgaaggttagcagggatttggtgtgcttcctacaactcgaccatgtaaatgtgtactacgggcaagattatcgaaacaaatataaggcacccactgattactgcctagtcctcaaacaccctcagatccagaagaagagccaatatattaaatacttgtgttgcgatgacgtccgtactctacaccaatgggtcaacggaattcgcatcgccaaatacggaaagcagctgtatatgaactatcaggaagcattaaagcgtacagagagcgcatacgattggacgagcttaagcagtagcagcatcaaatccggtagcagctcaagctccattccagagtcccagtccaaccatagcaatcagagcgactcaggtgtctctgacacacagcctgcggggcacgtaagaagccagtccatcgtctctagcgtgttctccgaagcctggaagaggggaacacagctggaagaatcatctaaggttaccgccagcttttag

SEQ ID NO: 265827 - DNA, 1779 bp, Artificial Sequence
  derived and/or modified sequence
atggaacaactttccgatgaagaaattgaccacggtgctgaggaggatagtgataaggaagaccaggatctggacaaaatgttcggcgcctggctgggagaactcgacaaactgacccagagcctggactcagataagccgatggaaccagtgaagcgatcacctctgagacaggagaccaacatggccaatttcagctatagattctctatctacaaccttaacgaggccctcaaccaaggcgagacggtcgatctcgatgctctgatggcagacttgtgcagtatcgagcaggagctgagcagcataggaagcggcaactcgaagagacagatcacagaaaccaaagctacccagaagctgccagtttctcggcatactctcaaacacggcaccttgaagggcctatctagcagtagcaatagaatagcaaagccgtcccacgcctcatatagcttggatgacgtgaccgcacagttggagcaggcctcattgtctatggacgaggctgcccagcagtctgtattagaggataccaaacccctggtgactaaccaacatcggcgcactgcttcagcgggtactgtttcggatgcagaggtgcatagtataagcaactcgtcacactccagcatcacctccgcagccagttccatggattctttagacatcgacaaagtaacccggccgcaagaactcgacttaacacatcagggtcagccaatcactgaggaagaacaggccgccaagctgaaggccgagaagattcgtgtagccttggagaaaataaaagaagcccaggtaaagaaactggtgatacgcgtccatatgagtgacgattctagcaagactatgatggtcgacgaacgtcagaccgtgaggcaggtgctggataatctaatggacaagtcccactgcgggtacagcttggactggtctcttgtggagacagtctccgagctgcaaatggagagaatctttgaggatcatgaaaaccttgtggaaaacctgctgaattggacccgggacagccagaataaactgatttttatggaaaggatcgaaaagtacgccctgttcaagaatcctcaaaattatttactgggcaaaaaggagacggctgagatggctgaccgaaataaggaggtgttgctggaagaatgcttttgtggttcatcggtgaccgtaccggagatagagggggtgttgtggctaaaggacgatggaaaaaaatcatggaaaaaaagatacttcctcctcagggcgtcgggaatctactatgtgccaaagggcaaggccaaggtgtccagggaccttgtatgcttcttgcagctggatcacgtgaatgtatactacgggcaggattatagaaacaaatataaagctcccactgattattgtcttgtccttaaacacccccaaattcagaagaagtcccagtatatcaagtacctttgttgcgacgatgttcgaacactccaccagtgggttaatgggatcaggatagctaagtatggcaaacagctttatatgaactaccaggaggccctgaaaaggacagaaagcgcttacgactggactagcttatcttctagcagcattaagtcagggtcctcctctagcagcattcctgagtcacagtccaaccattctaatcagtctgactctggtgttagcgatacccaacctgctggacacgtgcgatctcagtctattgtttccagcgtcttcagtgaggcatggaaaaggggtactcagctggaagaatcttcaaagtag

SEQ ID NO: 265828 - DNA, 3753 bp, Artificial Sequence
  derived and/or modified sequence
atggagcagctgagtgatgaggagattgaccatggagcagaagaagattctgacaaggaggaccaggacctggacaagatgtttggagcctggctgggggagctggacaagctgacccagagcctggacagcgacaagcccatggagcctgtgaagaggagccccctgcggcaggagaccaacatggccaacttctcctaccgcttcagcatctacaacctgaatgaggccctgaaccagggcgagaccgtggacctggatgccctgatggctgacctgtgcagcattgagcaggagctgagcagcatcggcagcggcaacagcaagaggcagatcacagagaccaaggccacccagaagctgcctgtgagccgccacaccctgaagcacggcaccctgaagggcctgagcagcagcagcaacagaattgccaagcccagccacgccagctacagcctggatgatgtgacagcccagctggagcaggccagcctgtccatggatgaggccgcccagcagagcgtgctggaggacaccaagcccctggtgaccaaccagcacagaagaacagccagcgctggcaccgtgtctgatgctgaggtgcacagcatcagcaacagcagccacagcagcatcaccagcgctgccagctccatggacagcctggacatcgacaaggtgacccggccccaggagctggacctgacccaccagggccagcccatcacagaggaggagcaggccgccaagctgaaggccgagaagatccgggtggccctggagaagatcaaggaggcccaggtgaagaagctggtgatccgggtgcacatgtctgatgacagcagcaagaccatgatggtggatgagcggcagacagtgcggcaggtgctggacaacctgatggacaagagccactgcggctacagcctggactggagcctggtggagaccgtgtctgagctgcagatggagcgcatctttgaggaccacgagaacctggtggagaacctgctgaactggacccgggacagccagaacaagctgatcttcatggagcgcatcgagaagtatgccctcttcaagaacccccagaactacctgctgggcaagaaggagacagctgagatggctgacaggaacaaggaggtgctgctggaggagtgcttctgtggcagctctgtgacagtgcctgagattgaaggagtgctgtggctgaaggatgatggcaagaagtcctggaagaagcgctacttcctgctgcgggccagcggcatctactacgtgcccaagggcaaggccaaggtgtcccgggacctggtgtgcttcctgcagctggaccacgtgaatgtgtactacggccaggactacagaaacaagtacaaggcccccacagactactgcctggtgctgaagcacccccagatccagaagaagagccagtacatcaagtacctgtgctgtgatgatgtgaggaccctgcaccagtgggtgaatggcatccgcatcgccaagtatggcaagcagctgtacatgaactaccaggaggccctgaagaggacagagagcgcctatgactggaccagcctgagcagcagcagcatcaagagcggcagcagcagcagcagcatccctgagagccagagcaaccacagcaaccagagcgacagcggcgtgtctgacacccagcctgctggccacgtgcgcagccagagcatcgtgtcctctgtgttcagcgaggcctggaagaggggcacccagctggaggagagcagcaaggccaggatggagagcatgaaccggccctacaccagcctggtgccccccctgagcccccagcccaagatcgtgaccccctacacagccagccagcccagcccccccctgcccccacctcctcctcctcctcctcctcctcctcctcctcctcctcctcctcctccacccctgcccagccagagcgcccccagcgctggcagcgctgcccccatgtttgtgaagtacagcaccatcacccggctgcagaatgccagccagcacagcggggccctcttcaagccacccaccccacctgtgatgcagagccagagcgtgaagccccagatcctggtgccccccaacggggtggtgcccccacctcctcctcctcctcctccacccaccccaggcagcgccatggcccagctgaagccagccccctgtgcccccagcctgccccagttcagcgcccctcctccacccctgaagatccaccaggtgcagcacatcacccaggtggccccacccaccccacctcctcctccacccatcccagcccccctgcccccccaggccccacccaagcccctggtgaccatcccagcccccaccagcaccaagacagtggcccctgtggtgacccaggccgccccacccacccccaccccacctgtgcccccagccaagaagcagcctgccttccctgccagctacatcccccccagcccccccaccccacctgtgcctgtgcccccacccaccctgcccaagcagcagagcttctgtgccaagcccccacccagccccctgagccctgtgcccagcgtggtgaagcagatcgccagccagttccccccaccacccaccccaccagccatggagagccagcccctgaagcctgtgcctgccaacgtggccccccagagccccccagctgtgaaggccaagcccaagtggcagcccagcagcatccctgtgcccagcccagacttccccccacctcctcctgagagcagcctggtgttccccccacctccacccagccctgtgcctgcccctcctcctcctcctccacccacagccagccccaccccagacaagagcggcagccctgggaagaagaccagcaagaccagcagccctgggggcaagaagcccccacccaccccccagaggaacagcagcatcaagagcagcagtggagctgagcaccctgagcccaagaggcccagcgtggacagcctggtgtccaagttcaccccacctgctgagagcggcagccccagcaaggagaccctgcccccacctgctgccccacccaagccaggcaagctgaacctgtctggagtgaacctgcccggggtgctgcagcagggctgtgtgtctgccaaggcccctgtgctgagcggccggggcaaggacagcgtggtggagttccccagccccccaagtgacagcgacttccccccacctcctcctgagacagagctgcccctgccccccatcgagatcccagctgtgttcagcggcaacaccagccccaaggtggccgtggtgaacccccagccccagcagtggagcaagatgtctgtgaagaaggcccccccacccacccggcccaagagaaatgacagcacccggctgacccaggccgagatcagcgagcagcccaccatggccaccgtggtgccccaggtgcccaccagccccaagagcagcctgtctgtgcagcccggcttcctggccgacctgaacagaaccctgcagaggaagagcatcaccaggcatggcagcctgagcagcaggatgagcagagctgagcccacagccaccatggatgacatggccctgcccccacctcctcctgagctgctgagtgaccagcagaaggccggctacggcggcagccacatcagcggctacgccaccctgcggcggggccccccaccagccccacccaagagggaccagaacaccaagctgagccgggactggtag

SEQ ID NO: 265829 - DNA, 1794 bp, Artificial Sequence
  derived and/or modified sequence
atggagcagctgagtgatgaggagattgaccatggagcagaagaagattctgacaaggaggaccaggacctggacaagatgtttggagcctggctgggggagctggacaagctgacccagagcctggacagcgacaagcccatggagcctgtgaagaggagccccctgcggcaggagaccaacatggccaacttctcctaccgcttcagcatctacaacctgaatgaggccctgaaccagggcgagaccgtggacctggatgccctgatggctgacctgtgcagcattgagcaggagctgagcagcatcggcagcggcaacagcaagaggcagatcacagagaccaaggccacccagaagctgcctgtgagccgccacaccctgaagcacggcaccctgaagggcctgagcagcagcagcaacagaattgccaagcccagccacgccagctacagcctggatgatgtgacagcccagctggagcaggccagcctgtccatggatgaggccgcccagcagagcgtgctggaggacaccaagcccctggtgaccaaccagcacagaagaacagccagcgctggcaccgtgtctgatgctgaggtgcacagcatcagcaacagcagccacagcagcatcaccagcgctgccagctccatggacagcctggacatcgacaaggtgacccggccccaggagctggacctgacccaccagggccagcccatcacagaggaggagcaggccgccaagctgaaggccgagaagatccgggtggccctggagaagatcaaggaggcccaggtgaagaagctggtgatccgggtgcacatgtctgatgacagcagcaagaccatgatggtggatgagcggcagacagtgcggcaggtgctggacaacctgatggacaagagccactgcggctacagcctggactggagcctggtggagaccgtgtctgagctgcagatggagcgcatctttgaggaccacgagaacctggtggagaacctgctgaactggacccgggacagccagaacaagctgatcttcatggagcgcatcgagaagtatgccctcttcaagaacccccagaactacctgctgggcaagaaggagacagctgagatggctgacaggaacaaggaggtgctgctggaggagtgcttctgtggcagctctgtgacagtgcctgagattgaaggagtgctgtggctgaaggatgatggcaagaagtcctggaagaagcgctacttcctgctgcgggccagcggcatctactacgtgcccaagggcaaggccaaggtgtcccgggacctggtgtgcttcctgcagctggaccacgtgaatgtgtactacggccaggactacagaaacaagtacaaggcccccacagactactgcctggtgctgaagcacccccagatccagaagaagagccagtacatcaagtacctgtgctgtgatgatgtgaggaccctgcaccagtgggtgaatggcatccgcatcgccaagtatggcaagcagctgtacatgaactaccaggaggccctgaagaggacagagagcgcctatgactggaccagcctgagcagcagcagcatcaagagcggcagcagcagcagcagcatccctgagagccagagcaaccacagcaaccagagcgacagcggcgtgtctgacacccagcctgctggccacgtgcgcagccagagcatcgtgtcctctgtgttcagcgaggcctggaagaggggcacccagctggaggagagcagcaaggtgacagccagcttctag

SEQ ID NO: 265830 - DNA, 1779 bp, Artificial Sequence
  derived and/or modified sequence
atggagcagctgagtgatgaggagattgaccatggagcagaagaagattctgacaaggaggaccaggacctggacaagatgtttggagcctggctgggggagctggacaagctgacccagagcctggacagcgacaagcccatggagcctgtgaagaggagccccctgcggcaggagaccaacatggccaacttctcctaccgcttcagcatctacaacctgaatgaggccctgaaccagggcgagaccgtggacctggatgccctgatggctgacctgtgcagcattgagcaggagctgagcagcatcggcagcggcaacagcaagaggcagatcacagagaccaaggccacccagaagctgcctgtgagccgccacaccctgaagcacggcaccctgaagggcctgagcagcagcagcaacagaattgccaagcccagccacgccagctacagcctggatgatgtgacagcccagctggagcaggccagcctgtccatggatgaggccgcccagcagagcgtgctggaggacaccaagcccctggtgaccaaccagcacagaagaacagccagcgctggcaccgtgtctgatgctgaggtgcacagcatcagcaacagcagccacagcagcatcaccagcgctgccagctccatggacagcctggacatcgacaaggtgacccggccccaggagctggacctgacccaccagggccagcccatcacagaggaggagcaggccgccaagctgaaggccgagaagatccgggtggccctggagaagatcaaggaggcccaggtgaagaagctggtgatccgggtgcacatgtctgatgacagcagcaagaccatgatggtggatgagcggcagacagtgcggcaggtgctggacaacctgatggacaagagccactgcggctacagcctggactggagcctggtggagaccgtgtctgagctgcagatggagcgcatctttgaggaccacgagaacctggtggagaacctgctgaactggacccgggacagccagaacaagctgatcttcatggagcgcatcgagaagtatgccctcttcaagaacccccagaactacctgctgggcaagaaggagacagctgagatggctgacaggaacaaggaggtgctgctggaggagtgcttctgtggcagctctgtgacagtgcctgagattgaaggagtgctgtggctgaaggatgatggcaagaagtcctggaagaagcgctacttcctgctgcgggccagcggcatctactacgtgcccaagggcaaggccaaggtgtcccgggacctggtgtgcttcctgcagctggaccacgtgaatgtgtactacggccaggactacagaaacaagtacaaggcccccacagactactgcctggtgctgaagcacccccagatccagaagaagagccagtacatcaagtacctgtgctgtgatgatgtgaggaccctgcaccagtgggtgaatggcatccgcatcgccaagtatggcaagcagctgtacatgaactaccaggaggccctgaagaggacagagagcgcctatgactggaccagcctgagcagcagcagcatcaagagcggcagcagcagcagcagcatccctgagagccagagcaaccacagcaaccagagcgacagcggcgtgtctgacacccagcctgctggccacgtgcgcagccagagcatcgtgtcctctgtgttcagcgaggcctggaagaggggcacccagctggaggagagcagcaagtag

SEQ ID NO: 265831 - DNA, 3753 bp, Artificial Sequence
  derived and/or modified sequence
atggagcagctgagcgacgaggagatcgaccacggcgccgaggaggactctgataaggaggatcaggatctcgacaagatgttcggcgcatggctgggcgagcttgataagctgactcaatctctcgatagcgataaaccgatggaacccgtgaaacgttcccctctccgccaagaaaccaacatggctaacttctcatatcgattcagcatctacaatctgaatgaagctctgaaccaaggcgagactgtggacttggacgccctgatggctgacctgtgttccattgagcaagaactgtcctctatcggctctggaaacagcaaacgacagattacagagactaaggccactcaaaagctacccgtttcacgtcacactcttaaacacggtaccctgaagggcctctcgagctcttccaaccggatagccaagccatctcacgccagctattccctggatgacgtgactgctcagctcgagcaggcctctttgtccatggacgaggcagcccagcagagcgttttggaagacacaaagcctttagttacgaaccagcacagacgcacagcatcagctggcactgtgtctgatgccgaagtccattccatcagcaactcatcacactcaagtatcaccagtgctgcgagttcaatggattcacttgatatcgacaaggtcacaagacctcaggagcttgacctgactcaccagggtcagccaattacggaggaggagcaggcggcaaagttaaaagctgagaagattcgcgtggctctcgagaagattaaggaagcacaagtcaagaagctggtcatccgggtgcatatgtcggatgacagttccaagaccatgatggtcgacgagcgccaaacggtgcgacaggtcttggacaaccttatggacaagtcccactgcggatactcgctcgattggtcactcgtggagaccgtttcagaactgcaaatggagagaatctttgaggatcacgagaacctcgttgaaaatctcctcaactggactcgtgacagccaaaataagctcattttcatggaaagaatagagaaatatgcattgttcaagaatccacagaactacctactggggaagaaagagaccgcagagatggcagacagaaacaaggaagttctgcttgaggaatgtttttgcgggtccagtgttacagtgcctgagattgagggggttctctggctaaaggacgacggcaagaagagctggaaaaaaagatattttctgctcagggcaagcggcatttactacgttcccaaaggcaaagccaaggtgtcccgagacctggtttgtttcctgcagctcgaccacgtgaacgtttattatggccaggactatcgtaataaatataaggctccaaccgattactgcctcgtgctgaagcatccacagatccagaaaaagtctcagtatatcaagtacctttgctgcgacgatgttcgtacgcttcaccagtgggtcaatggtatcagaatcgcgaaatacggtaaacagttatacatgaactaccaagaagctctgaaaaggaccgagtccgcttacgattggacaagcctgagctcaagctcgatcaaaagtggctcatcatcgagcagcatacctgagtcccagtcgaaccactctaaccaatccgatagcggagttagcgacacacagcccgctgggcacgtgaggtctcagtccattgttagctcggtgttttctgaggcctggaaacgaggaacccagctagaagagagtagcaaggccagaatggaatcgatgaaccgcccttatacgtcactcgtcccgcccctgtcccctcagcccaagatcgtgactccatacaccgcgtcacagccatcacctcctctgcctcccccccctccccctccaccacctccaccacctcctcctcctcctccacctcccccactgccctctcagtctgcgccaagcgccggctcagctgcacctatgtttgtaaagtacagtaccattaccaggctgcagaatgctagccagcattcaggcgcattgttcaagccccctactccacctgtcatgcagagtcagtcggtgaagccccagattttggtacccccaaacggggtggtccctcccccgccccctccaccccccccaccgactcccggctctgcaatggcacagctcaaacctgcaccttgtgcccccagcttgccgcagtttagcgccccccctcctccactgaagatacaccaggtgcaacacattacccaggtggctccgccaactccaccaccacccccgcctattccagccccactccctcctcaggctccccctaagcctctcgttaccatacccgctccaacgagtacaaagacggttgcacccgtagttactcaggcagcacccccaactcccaccccaccggttccgccagcaaagaaacaacccgcctttccggccagttacatccctccctctcccccaactccacctgtgcctgtccctcctcccacactgccaaagcagcaaagtttctgcgcgaagcctcccccatccccgctcagccccgtgccgtccgtggttaaacagattgcgagtcagtttccaccaccacctacccctccggctatggagtctcaacctctaaagccagtgccagctaatgtggccccccaaagtcccccagccgtaaaggctaaacccaaatggcaaccatcatcgatccccgtgcccagcccagattttccacctcctccgccagagagctcacttgtgtttcctcctcctcctccttctcctgttcccgctcccccaccgccaccaccccctaccgcaagcccaaccccagataagtccggctcaccaggcaaaaagactagtaaaaccagcagcccaggaggtaaaaaaccgcctcccactccacagagaaacagctctatcaagtcatccagcggggccgagcaccccgaacctaaaaggccgtctgtggactcactggtgagcaaattcactccccccgctgaaagtggaagccctagcaaggagactctcccaccccccgccgccccaccaaagccaggcaagctgaacctgagcggcgttaatctcccgggagttctgcagcagggatgcgtctctgccaaggcacccgtgctctctggtagagggaaggattcagttgtggaatttcctagtccccccagtgattctgacttccctccacccccaccagagaccgaactgcctctgccccccatcgaaattcccgcggtcttttctggcaatacatcccctaaggtagcagtggtcaatcctcaaccacagcagtggtccaagatgagcgtgaaaaaagcaccacctcctactaggccaaaacgcaatgactcaactcggttgacacaagcggaaatcagtgagcagcccacaatggcaactgtggtgcctcaggtgccaacttctccgaagtcaagtctgtcggtgcagcctgggttccttgctgatcttaaccggactctccagcggaagtctatcactcgacacggttcattgtcttcacgaatgtctagagcggaacccaccgcgaccatggacgacatggctttgcctcccccaccacccgagttgctgtctgaccaacagaaagccggctacggaggctctcatattagtggctatgcaaccctgagacgcgggccgccaccagccccgcctaaaagagaccagaacacaaagttgtcgcgggactggtag

SEQ ID NO: 265832 - DNA, 1794 bp, Artificial Sequence
  derived and/or modified sequence
atggagcagctgagcgacgaggagatcgaccacggcgccgaggaggatagcgataaagaggaccaagatctggacaaaatgttcggcgcttggctgggcgagctcgataagctgacacaaagtttagatagcgacaaacctatggaacccgtgaaaaggtctccattacgccaagaaaccaatatggccaacttcagctacaggttctcgatctataacctgaacgaggccttgaaccagggggaaactgtggatctggacgcactgatggccgatctctgcagtattgagcaggaactcagcagtatcggatcagggaattctaagcgacaaattacagaaacgaaggcaacacagaagctgcccgtttcgcggcacacgcttaagcatgggactttgaagggcctctcatctagctccaataggatcgccaaacctagccacgccagctacagtctggatgatgttaccgcacagttagaacaagccagtctctcgatggacgaggctgcacagcagtccgtcctggaagataccaagccgttagtcactaaccagcaccgcagaaccgcatcagcgggtactgtgtccgatgcggaggttcattctatatcaaactcgtcccattcctcaattactagcgcagcctcaagtatggacagcctcgacatagacaaggtgactagaccgcaagaactggacctaacccaccagggccagcctataaccgaagaggaacaagccgctaagctaaaggcagaaaaaatccgcgtcgcattggaaaagatcaaggaggcgcaggtgaaaaagcttgtcatccgggtgcacatgtccgacgactcatcgaaaactatgatggtggacgagcggcagaccgttaggcaggtgctggataacctcatggataagtcccattgcggttactctctagactggagtcttgtagagactgttagcgagctgcagatggagagaatttttgaggaccacgaaaacctggtggaaaatctgctgaactggactagggactctcaaaacaagctgatcttcatggaacgcatagaaaaatatgctctgttcaaaaacccacagaactacctgctgggcaaaaaggaaacagcagaaatggccgacaggaacaaagaggtgcttctcgaggagtgtttttgtggttcaagcgtcactgttccagaaatcgagggggttctctggctcaaggacgatggaaaaaaatcttggaaaaaacgctactttcttcttcgggcatctggcatttactacgtaccaaaaggtaaagccaaggtttccagagacttggtctgttttcttcaattggatcatgtgaatgtatattatggccaggactaccgaaacaagtacaaagctcctactgactattgtctggtcttaaagcacccacagattcagaagaaaagtcagtatataaaatatctgtgttgcgatgacgttcggactttgcaccagtgggtgaatggcatccgcattgcgaagtatggtaagcagctctacatgaactaccaagaggcgctaaagcggaccgagtccgcatatgactggactagtctgagtagtagctccattaagtcaggttcttcctcaagctcaataccggagtcacagtccaaccactcaaatcaatccgattcaggtgtgtccgacacccagcccgcaggccatgtgcgctcacagagcatcgtgagtagtgtgttttccgaggcctggaagagaggcacacagctggaggagtccagcaaggtaactgcatccttttag

SEQ ID NO: 265833 - DNA, 1779 bp, Artificial Sequence
  derived and/or modified sequence
atggagcagctgagcgacgaggagatcgaccacggcgccgaggaggattctgacaaggaagatcaggatctggacaaaatgttcggcgcctggctaggcgaactggacaaactgactcaatccctggatagcgacaagccaatggaacccgtgaagcggtctcccctccgacaggaaacaaacatggccaacttctcttaccggttctcaatctacaacctaaacgaagccttgaaccagggcgagactgttgatctggacgctctgatggctgatctctgttccattgagcaggagctctcttccatcgggagtggcaatagtaagcgtcaaataacggagacgaaagcaactcagaagctgcctgtatcccgacacaccttaaagcacggaacgctcaagggtctgagtagcagctcgaatcggatcgccaaacccagccacgcttcttactcactggacgatgtgacggcccagctggagcaagcctcgctgtctatggacgaggccgctcagcagtctgtcctggaagacactaagcctttggtgaccaaccagcacaggagaactgccagcgccggtactgtgtctgacgcggaagtgcattcgatttcgaacagcagccactcgtccattacttccgccgcttccagtatggattccctggacatcgacaaagtaactcgcccgcaagagctcgatctcactcaccaaggacagccaataacggaggaagaacaggccgctaaacttaaggccgagaaaattcgggtggccctggagaagataaaggaggctcaggtcaaaaagcttgtcataagggtgcacatgtcagacgactccagcaagacaatgatggtcgacgagcggcagaccgtgagacaggtgctagataatctgatggacaagtctcactgcgggtatagcctagattggtccctcgttgagacggtgtctgagctgcaaatggagagaatctttgaggatcacgaaaatctagtggagaatctgctgaactggactagggactcccagaacaaactgatatttatggaacggatcgagaagtatgcactcttcaagaatccccagaactacctgctcggaaagaaggaaaccgcagagatggcagaccggaacaaagaagtgttgcttgaggagtgtttctgtggcagctccgtcacagtgcccgagatagaaggcgtactctggctcaaggacgatggcaagaagagctggaaaaaaaggtacttcctactgagggccagcggaatctattatgtccctaagggaaaggctaaagtgtccagggatcttgtgtgttttctgcagttggaccatgtgaatgtttattacggccaggattacagaaataaatacaaagctccaaccgactactgcctggtactgaagcacccccaaattcagaagaagagtcagtatatcaaatatctgtgctgcgacgacgttagaactctccatcagtgggtgaacggcatccggatcgcgaaatacgggaagcagctgtatatgaactatcaggaggctctgaaacggacggagagcgcctacgattggacgtccctgtcatcttcttcaataaaatctggctcaagctcttcatccatcccggaaagccagagcaatcatagcaaccagtccgacagcggagtctctgacacccagccagcaggccacgttcggtcccagtccattgttagctctgtcttcagcgaggcatggaagcggggtacacaactggaagaatcatcgaagtag

SEQ ID NO: 265834 - DNA, 3753 bp, Artificial Sequence
  derived and/or modified sequence
atggagcagctgagtgacgaggaaatcgaccacggagcagaagaggactccgacaaggaggaccaggatctagataagatgttcggagcttggctgggtgagcttgacaaactgacccaatcactggattccgacaaacctatggagcccgttaagcgctctcctctgcgacaggaaaccaatatggcgaatttctcatatagattttctatttataacctcaatgaggccctcaatcaaggggaaactgtggacctagacgcacttatggctgatctatgttctattgagcaggagctaagcagcattggctccggtaattccaagcggcaaattactgaaactaaggccacacaaaaactcccagtgtccagacatacactcaagcatgggaccctaaagggactatcaagctcctccaaccggatcgcaaagccgtctcatgctagttacagcctggacgacgtcaccgcgcagctggagcaggccagcctctccatggacgaagcggctcagcagtcagtgctagaagatacaaagcccctcgtgactaaccaacaccgaaggacagctagcgccggtaccgtatccgatgccgaagtgcacagtatcagtaactccagtcatagctctatcacctcagctgcttcctccatggactcacttgatattgataaagtgactagaccgcaggagctggacttgacgcatcagggtcaaccgattaccgaggaggaacaggctgcaaagctcaaagcggaaaagattagggtggccctggagaaaataaaggaagcacaagtcaagaaactcgtcatccgggtccacatgagcgatgattcctcgaaaactatgatggtcgatgagcggcagaccgtgcgacaggtcctggataacctaatggacaagtctcattgcggatatagcctggactggagtttagtagaaactgtaagtgagctccagatggagcggatcttcgaagaccacgaaaatctagtggaaaacctattaaattggaccagggacagccagaataaactcatctttatggagaggatcgaaaaatacgccctgttcaagaatccccagaactacttgttagggaagaaggaaaccgccgagatggcagatcggaataaagaggtcctgcttgaagaatgcttttgcggatcaagcgtaactgtgccagaaatcgaaggcgttctgtggctcaaagatgacggtaaaaaatcatggaagaagcgctacttcctgctccgagcctctggaatttattatgtgcctaaaggtaaggcaaaggtctcccgcgacttagtttgcttcttacagctcgaccatgttaacgtgtactatggccaggattatcgaaacaagtataaggccccaacagattactgtctggtactcaagcatccccagatacagaaaaagagccagtacatcaaatatctgtgttgtgatgatgtaaggacgctgcatcagtgggtgaatggaattagaatcgctaagtatgggaaacagctctacatgaattaccaggaggcccttaaacggacggaatcggcctatgattggaccagcctgtctagttccagcatcaagtctggatcctcctcctcaagtattccggagagccagtcaaaccactcgaatcagtcggattccggcgtctcagacacacaaccggctgggcacgtgagatcccagagcattgtaagctccgtgttcagtgaggcatggaaacgcggtacacagctggaagagagctccaaagccaggatggagtccatgaatagaccgtacaccagcttggtgcctcccctctctccccagccaaagatcgtgaccccctacaccgcttctcaaccgagcccacctctgccccctccaccgccacccccacctcctcctccaccgcctcctccccctccccctcctcctttgccttcccagagcgcgccatcagctggatctgccgctcctatgtttgttaaatatagtactatcacccgcctccagaacgcaagccagcatagcggtgcactgttcaagccgccaaccccccctgtgatgcagagccagtctgtcaagccccagattctggtccctcccaacggggtagtgccgcctcctcctcctccaccacccccacccactcccggatccgctatggctcagctgaaacctgcgccttgcgccccttctttaccgcaattcagcgctcctccccctccactgaagatccaccaggtgcaacatatcacccaagtcgcacctcctactcccccacctccccctcctattcctgccccactgccaccccaagctcctccaaagccactggtcactattccagcccctacttctaccaagaccgtagccccagtcgtgacccaagcagctcccccaacccctacgcccccagttccccctgccaaaaagcagcctgcctttcctgcctcttacatcccccctagtcctccgactcccccagtccccgtgcctcccccaacactgccaaaacaacaatcattctgtgcaaagccgcctccaagtcccctctcccctgttcctagcgttgtcaagcagatagccagccaatttcctccccctccaactccccctgcaatggaatcccagccgcttaagcccgtgccggctaatgtagcccctcagtcgccaccggctgttaaagccaaaccgaagtggcaaccctcttcaattcccgtgccttcgcctgactttccccctcccccacccgagtccagtttagtgtttccccctcctcccccttccccagtccccgctccgccaccccctccccctcctaccgcctccccgaccccagacaaatccggatcaccagggaaaaaaacttctaagacaagcagtcccggaggaaagaagcctcctccaaccccccagagaaactcgtccataaagtcctcctccggggctgaacatcctgaacctaagcgtccatccgtagactccttggtaagcaaatttacacccccagccgagtcgggctccccatctaaagagacactgcctcctcccgctgctccccctaagccaggcaagctgaatctctccggagtcaacctgcccggagtgctgcagcaaggttgtgtgtccgctaaggctcctgtgctgtcaggacggggtaaagacagcgtggtcgagtttcccagcccgccatctgactccgactttcccccaccaccccctgaaacagagctgcctctccctcctatcgagattcctgccgtcttttccggcaacacttcccctaaggtcgcggtagtcaacccgcaaccccagcagtggtctaaaatgagcgtgaagaaagccccaccccctactcgcccaaagagaaatgatagcacccgcttgactcaagccgagattagcgagcagcctaccatggcaaccgttgtgccccaagtccctacgagtcccaagtcctctctctctgtccagcccggatttcttgccgacctcaatcgaaccctccagcgaaaatcaatcacccggcatggctctttgtcctcccggatgtccagggccgagcccacagctactatggatgacatggcactgcccccaccgcctcctgaactgttaagcgatcagcagaaagccggttacgggggtagccatatctctggctacgcgacattaagaagaggtccacccccagcccctcccaaacgcgatcagaacaccaagctgagcagagattggtag

SEQ ID NO: 265835 - DNA, 1794 bp, Artificial Sequence
  derived and/or modified sequence
atggagcagttgtccgacgaagagattgaccatggagcagaggaggattctgacaaggaggatcaagatcttgataagatgtttggcgcatggctgggcgagctcgacaaactgacccagtccctcgacagcgacaagccaatggagccagtaaagagaagcccactgagacaggagacgaatatggccaacttctcgtatagattctccatctacaacctgaatgaggccctgaatcaaggtgaaacagttgacctggacgccctcatggctgacctatgtagcatcgagcaggagctgtctagcatcggatcagggaacagtaaaagacaaattacagagactaaggcaacacagaaactgccggtgtctagacacaccctgaagcatggcacgctgaagggcttgtcatccagcagtaaccggatcgctaaaccaagccatgccagttattccctagacgacgtaacagctcaactggaacaggccagtttgtccatggacgaggcggctcaacagagtgtcctggaggacacgaagccactcgtgacaaatcagcaccggaggacagcttccgccggtacggtcagcgacgccgaggtccatagcatttctaattcctctcattcaagtattacctccgcggcaagctccatggactcattagacattgataaggttacgcgaccccaggaattggacctcacacatcaggggcagccaattacagaggaggagcaggccgctaaactgaaggccgaaaagatccgcgtggctctggagaaaattaaggaggcccaggttaagaaactggtaattcgggtgcatatgagtgacgacagctctaaaacaatgatggtagatgaaagacaaactgttaggcaggtactggacaacctgatggacaaaagtcactgtggttattccctggactggagtcttgtcgaaactgtctcagagctgcagatggagcgcatcttcgaggatcacgaaaatttggttgaaaatctgctgaattggacccgcgactcgcagaataaattgatttttatggagcggattgagaaatatgcgctttttaagaacccacagaactacctgctgggtaaaaaagaaacggcagagatggcggataggaataaggaggtgcttctcgaagagtgcttttgtggaagctcggtaaccgttcctgagattgagggcgtgctgtggttgaaggacgacggaaagaaatcttggaagaagcggtattttcttctccgggctagtggcatatactacgtgccaaagggaaaggcaaaagtgtccagagacctggtatgttttctccagcttgaccacgttaacgtctactatggtcaggactaccggaataaatataaggcccctacagattactgcctggtcctgaagcacccacaaatccagaagaaatctcagtatatcaaatacttgtgttgtgacgacgtccgcaccctccaccaatgggttaatggtatcagaatcgctaagtatgggaagcaattgtacatgaactaccaagaagccctgaagagaacagagagtgcatacgattggacctcattgagctccagttcaataaaatctggaagcagcagctctagcatcccagaaagccagtccaatcacagcaatcagtccgattccggcgtgtcagatacccaaccagccggacatgtgaggagccagagcatcgttagctctgtattttcggaagcttggaagaggggcacccagttggaggaatcctcaaaagtaacagctagcttctag

SEQ ID NO: 265836 - DNA, 1779 bp, Artificial Sequence
  derived and/or modified sequence
atggagcagttatccgatgaggagatcgaccacggtgccgaggaggactcagataaagaggaccaggatctcgataagatgtttggagcgtggctgggagagttggataaactcacacagtcgctagattcagacaagcctatggagccagtgaaacggtccccactccggcaggagaccaacatggccaacttcagctatagattctccatatataacctgaatgaggcccttaaccaaggagagacagtcgatctggatgccctgatggccgatctttgttcaatcgagcaggagctgagctctattggatccggcaactccaagaggcaaatcaccgagactaaggcaacgcagaagctgccagttagcagacataccttgaagcatggcactctgaagggcttgtcctcgtccagcaatcgaattgccaagccttcacacgcttcttacagtcttgacgatgtcacagcgcaactggaacaggcttctttgtctatggatgaggccgcacagcaatctgtgcttgaggataccaaaccccttgtcacaaaccaacatcggaggacagcatcagctgggacagtatcagacgctgaagtgcactctatttctaatagctcccacagtagcattacaagcgcagcctctagtatggactccctcgatatcgataaggtaacgagaccccaggagcttgatctaacccaccaaggacagcctatcaccgaggaagaacaggctgccaagctgaaagcggaaaaaatccgcgtcgctctggagaaaatcaaagaggcacaggtcaagaaattggttatccgcgtgcatatgtctgatgactcttctaagactatgatggtggacgaaagacagaccgtgagacaggtgctggacaacctgatggacaagagccactgtggatattcacttgactggtctttagtggaaaccgtgagcgagctgcagatggaaagaatctttgaagaccacgaaaatctcgttgagaacttattaaactggactcgggattctcagaataagctcatattcatggaaaggattgaaaagtacgccctctttaagaacccccagaactaccttcttgggaagaaagagaccgccgagatggccgatagaaacaaggaggtcctcctcgaagagtgcttttgtggttctagcgtcaccgtgcccgaaatcgagggagtgttatggctgaaggatgacggaaaaaagtcttggaaaaaacgctattttctcctgagagcgtctggtatctattacgtgcccaaggggaaggcgaaggtctcaagagatctagtctgcttcctgcagttggatcacgtgaatgtgtactatgggcaagactatcggaataagtataaggccccaactgactattgcctagttctgaagcacccccaaatccaaaaaaagagccaatacataaagtacctgtgctgtgacgacgtgcgtactctgcatcagtgggtcaacggtatacgcattgcaaagtatggaaagcagctgtatatgaattaccaggaagctttgaagcggacagaatccgcatacgactggacttccctatcaagctccagcattaaatctggatcatcttcttcatcaatcccggagtctcagtctaatcactccaatcagtctgacagcggagtgagtgacacacagcctgccggtcacgttaggtctcaaagcattgtctccagtgtcttctccgaggcatggaagagaggaacccagctcgaggagagcagtaagtag

SEQ ID NO: 265837 - DNA, 9808 bp, Artificial Sequence
  derived and/or modified sequence
caaccccgccttctgcgtctcggctggacgcgagcacactcggctccgccgccgccgccgccgccgcggggcgctgcggccgccccgcccccgctcccgccgccgcccgccagtcagtcagtcagtcagtcagtcagtcagtcagtcagtcactgagcgcgcggcgcgggagctgctggcagtcgctgcgtctctggcgagggagcgccgcgcctggggaggaggcggaggcagcggctggaggagcgcgagcggcggtttccttgcccggggccgcgggaaggccgaccgactgccgcgatggagcagctatcagatgaagaaattgatcatggtgctgaagaagacagtgacaaggaagatcaggacctggacaaaatgtttggagcctggcttggagaactagacaaactcactcagagtttggattctgacaagcccatggaaccagtaaaaagatctcctcttcgccaggaaacaaacatggccaacttttcttaccgcttctccatatacaacttgaatgaagctctgaatcagggagagactgtggatctggatgccttgatggctgatctttgctctatagagcaggagctcagcagcattggttcaggaaacagtaagcgtcaaatcacagaaacgaaagctactcagaaattgcctgttagccgacatacattgaaacatggcaccttgaaaggattatcttcttcatctaataggatagctaaaccttcccatgccagctactccttggacgacgtcactgcacagttagaacaggcctctttgagtatggatgaggctgctcagcaatctgtactagaagatactaaacccttagtaactaatcagcacagaagaaccgcgtcagcaggcacagtgagtgatgctgaagtacactctattagtaattcctcccattccagcatcacttccgcagcctccagcatggactctttggatattgataaagtaacacgccctcaagagctggatttgacacatcaagggcagccaattactgaggaagaacaggcagcaaaattgaaagctgagaagatcagagttgccctagagaaaattaaagaggcacaagtgaaaaagctggtgatcagagtccacatgtctgatgacagttctaaaacaatgatggtggatgagaggcagacagtaagacaagtactggataacctgatggacaaatcccactgcggttatagtttagactggtcactggtagaaaccgtttctgaattacaaatggagagaatctttgaagaccatgaaaacttggttgaaaatcttcttaattggacaagagatagccaaaacaagcttatatttatggagcgtatagaaaaatatgcacttttcaaaaacccacagaattatcttttggggaaaaaagaaacagctgagatggcagatagaaacaaagaagtcctcttggaggaatgtttttgtggaagttctgtaactgtaccagaaattgaaggagtcctttggttgaaggatgatggcaagaagtcctggaaaaagcgttattttctcttgcgagcatctggtatctactatgttcccaaaggaaaagcaaaggtctctcgggatctggtgtgctttctccagctggatcatgtcaacgtttattatggccaggactatcggaacaaatacaaagcacctacagactattgtctggtgctgaagcatccacaaatccagaagaaatctcaatatatcaaatacctttgttgtgatgatgtgaggacactgcatcagtgggtcaatgggatccgcattgcaaagtatgggaagcagctctatatgaactaccaagaagccttgaagaggacagagtcagcctatgattggacttccttatccagctccagcattaaatcgggatccagttcttccagcatcccagagtctcagtcaaaccactccaatcagtctgatagcggagtttctgacacccagccagcaggacacgtccgttcccagagcattgtgagctccgtattctctgaagcctggaaacgaggcactcagttggaagagtccagcaaggccagaatggagtctatgaatcggccctacacttcacttgtgccccctttatccccgcaacctaagatagtcaccccctacactgcttcacagccttcaccacctctacctcctccgccacccccacctcctcctccaccaccccctccaccaccccctcctcccccactccccagccagtctgcaccttctgcaggctcagcagccccaatgttcgtcaagtacagcacaataacacggctacagaatgcgtctcagcattcaggggccctgtttaagccgccaacacccccagtgatgcagtcacagtcagtgaagcctcagatcctggtaccccccaatggagttgttccaccaccccctccccctcctccacccccaaccccaggctctgccatggcccagctaaagcctgcaccgtgtgccccatcccttccacagttcagtgccccgcctcctccactgaagatccatcaagttcagcatattactcaggtggctcccccaacaccccccccacctcctcctatccctgcacccctccctccccaagctcccccaaaaccccttgtgaccatccccgcaccaaccagcaccaagactgtggcacctgttgtgactcaagctgcaccacccacacctactcctccagtgcccccagcaaaaaagcagccagctttccctgcttcttacattccaccctctccccctacccctcctgttccagtacccccgccaacattacccaagcaacagagcttctgtgcaaaaccccctccctctccactgtcaccggtgccctcggtcgtgaagcagatagccagccagtttccaccccctccaactccccctgccatggaatctcagcccttaaagcctgtcccagcaaatgtagctccacagtcccctcctgcagtaaaagcaaagcccaagtggcagcccagctccatcccagtcccttctccggacttccctcctccccctcctgaaagcagcctggtgtttcctcctccacccccatcacctgtcccagccccaccaccaccacctccacccacagcttctcctacccctgacaaaagtggatctccaggcaaaaagaccagtaagacgtccagccctgggggaaagaaaccacccccaaccccacagcgcaactccagcattaaatccagcagtggtgcagagcaccccgagcccaagagaccctcggtggacagtctagtcagcaagtttacaccgccagcagaatcagggtctcccagcaaggagaccctaccacctcctgcagcaccccccaagcctggaaaactcaatctttctggagtcaaccttcctggagttctccaacaagggtgtgtgtcagcaaaagcccctgttctgagtgggcgtggaaaggactccgtggtggaatttccttctcctccatccgattctgattttccaccccctccacctgaaacagagcttcctctgccccccattgagattccagcagttttctcgggaaacacctctccaaaagtggcagtcgttaatcctcaaccacaacaatggtctaaaatgtcagtgaagaaggcccctccacccacacgacccaaacggaatgatagcacccgcctcactcaagctgagatttctgagcagccaacaatggccacagttgtgccacaagtgcccacctctcccaaatccagccttagtgtccagcctggattcctggctgacctcaacaggacactgcaacgaaagtccatcactcggcacggctcactctcctcccgcatgtccagagcagaaccaacagccaccatggatgatatggcattgcctccaccaccccctgaactgctgtctgatcaacagaaggctggttacggaggcagtcatatatcaggctatgcaacgttgcggagaggaccccctcctgctccccccaaaagagaccagaacaccaagctctccagagactggtagccaccataggactttattttcatgatatctgtaatcactgctacaatcagctcacctgatcatctgtgaattcaggtgttcagagcctcctggtatgatgttattcaggtagtgtccagctatatgtgtatgtgtgtgtgtacacgtgcatgtacacacagctgtacagtgtgtgtatatatgtatacatatatgtatgtgtatgtgtatatagagagagagctgagagttattctatttattccttttctctcctaatctgaaaatgggtgttctgtattttgggtggaagaggcatagaaggggatgtgtgttgtctcttaagatttctatatcatgtggattggaccaaaaacttctaatcacttatttagaaggtatttataagtgtctgtccatgtgtagcctattcgtgcatgttgtgtattatataactaaggaatagatgtagaatgtgctatttctggttgagaaaaatcaccagaatgtttggtgtatctataaggcttttgtgtttgtttttccccagttggctgaagttagaattgcttgactgacacttcattgctatacatgaaggggcactttaaatcaggaaaatctctcagcttcatagaacgggtaactagtgcaggatggggaaatgttcacagacatcatctgtatgtggttgtgcatagaaagtaaatacatggcgtaattaactcagctgttctagctgcagtactgctgcagtgatccacccacatttaggatgtgctgacagataagctctttgcctacaatacatggataattagtgctataattctggatagttcctttttagtactgttttatgaagctttatcaacttggcttcatgatcctcactttgattgattttaagaggatggataacacagttatctctgtaatgttctgtcccagtatgtctttgggtcaccagttaccttcttaaaatatgtgctttaggtaggtgttattacatatctgtagacaattggtatatgaaatatacacatcctgtgccccaatatggtgcattatgaaaaacaaaatcattttctaaaatgcattttttgagcattgctctatagaagggaagggtgatgagagaacagaactggcccctgtacaggtgtcattaatctggttgtatatgggttataatatgtaatacaaaaagctcattaagtatgggactacatggagagggaagacagtttcatttatagctactggggctaccaggacccttgctgactgcagcctggttgtgattagttcaggttactaggtgttctgatggagtgggacagtccaagtccagtaactgacattacgttttatgcgtgtgcagtttggtataacgtggagtcagtgctctaacgacacactatacttctatatgcttttttctgtgaattttccttggtacatgagagaaataagtactctcatcaacttatgataaattggactattaggaataaaacaatctcagagcagctcctaaacaagagaataaaaatgggccatcccagcacttataaggggagcacatcttgtaatgaaagtctgtgcctattgttaatgattaccaatgcaaactgcagaaatcagttgacattgtcccacaaggaaaaagtgatgccagtaaagtgggggaagagatggtaaataattctagaatgagcaaaagtgcttaattagtacagtatactcaaggtcttgcataacccacactccacgaaaaccgcatcgtaaacagagagtgaacagcacctctccattgctacatctccagaatattgttcggttatgttcatgtggttatggagcaataagaatatataccattaatttttaggtctttcaaattgttcaccaagttttgtgtttgatatttatgaagtgatctttaacacatctgcattgttaatttaagcatgcacagaaatttgggtaatgtttgagtagattgccaagcgctactgtgattcatgaatgaatttctcatagtcttctgcctgcagttttatagtttgaggggcacccatatttgtgggttagagttagtaagaatatgaatccagttatcaaagtattcatccctgaggttttgagttttattgtggtggtgattttctcatgagaaggtagacaacacttcagtttttcttgagggggaaaaaatgtacccgctaaccttttttcacccatgatttgagccctaaaacaacagcctttatgttttcagtgcaggatttcttggaatttcttgcttgtatcaatcctgatgatagccatcctgaacagatgcttctggtctgttttcctggaatagcagacatccttttgaacactaatgatgccaggaagagagtaaggctagaggaggagactcattttaaccccagtccagtggcttgtccgacaacaggccatttccctttacattcctccacagacagaaatggctattaaaaatgttttaacctcatgtatgaactgaatttaaaaaaccactaaagtgatactttatacttctgttttactccctagtgggttttctttaatttggatttttgttgggatgtagcttttcctagactgtatttctgtagctctttttctctggtgtattcatggaaagcatctactgccgcacgacactagtactgtgccttctttcactgccctctgctctgcagctctcacccagcttggctgcttcaagtctgtgcagttgacttggctgtactgaaaagtgaacagcatggattaactcatcctgctgctgagggcagtgcaaacaggtgcttattagaggtagtgacttgcttaattagtgacactcctaatttctactatggataatttcaaagtagaatcactctatgcttagagttttggcaccaatgctgtagggcagcagaatctattctcagtaaaataacttatggtttattagatattctgtattggattttaccagcttgacttttactgctcagatgctttctttcccccccttagacgctgtaattctcttgggaagagtaactattcttaaggtttttacagatacccaccttagttgtaaattggatagtttatatttctgggactttttaaatgaaaatgtggaatgttaagttacaaaagacttttcatcagaaaatttcaaacaaagtaaacatggcgttttatagtcctctaaaatctaggtgctcccacccaccaaaggcatatcctgcaaagggctgtgaactatcttggtgaactgtcttgggtcccctttccatgtatgttttcttgtcactgaaaacaaacaacgctgagtttatcaagaaaatttaaattgggggatcataataattccaaccaagtgacaactctgacatcaaggttattaggagctgtacatccaattcaagttttatttgctgctattctgggagaataaacttgtatatggagaataaactaataaacttgtatcgaggaaatccataaagttataaattagcctgaaaaatatttcaggtaatggtgtggattggcctgctttgactctcagccaccaacagaaatctttgtcacctttgttcctcagctaaaagtaattttgttataaacacaaagtgactttaaacaggtaaaaaacccattcctatttttgtacattaccaaaagtttttcatatacctacagagctaactaattacaactgatttaatccactcaagtttagaccagttaaacccataggatcctgtatggttatcaatgtgatgccttgcttttcataaaataggtataattgggtcatacacttgacgagagggtgactgtttctaggggaagaaaaccctttagattgcaggtaactttcacttttttttttttaatatacactttacatttgtataaattatgcagggtactcctaaccctgtagaaatgtatgacctctcacaaagttgagatttgatccaaagagaaatgcaagtataaaagaattagatacttattatcttttaaggtttttttttttttttggtagagatgggggtctcactgtgttgcccaggctggtctcaaactcctggccacaagtgatcttcctgcctcagcctcccaaaatgctgagattacaggcatgagccactgtacccagcctttccttataaaattcaaagagaaaatttctacacctttatccctcaaataaaacaagtgctcagttcttaccgtgcccttgcaaggtctatatgtaaaagaaatctgaaatttagctgtagaataaaacttgataaataaaaagaaaaaacatacatttctccagttggtttgctctttgcttgttgaagtaataaaccgttttaaagagaaaatacttgctgtaaacccccagtgccttcaactcttttggcagaatatttttaaagaaatccagcaagcaaactttgaggtgctaatgaaagtaaaggaaggtggtatttctagttttggcagaaatgaaaagtgtctcacaagagacatcactacccacgtggggtctggctgctttctaccaaagacatttagagaagtgaattgagtcagggtgatggtgaacactacatattttatagatggttaagttgagaattaattatgtttatcatggatggctactaataccaagctcatgattgttgcagcctcaacgtcttaggcagtaaaacttgtctgcagcactaaagggggagaaacccttatattttgcaaactgtccattcgttaaatttattgtaacctaataccaaaaactgccgtttttcatattatttccccacctcctacttttttttttttttttgctacttgtaaaataaccccttctagaaaataagcattaactggaatgtttcaaacaattttgcttcattttactatcagccactagtgaactcttacagagatgtacatttaagataaaattagcttgtgctaagtgttttaaaaacattgtttactgttaaaggggaattgcacattatatttaactgggattgctccctccctcagttctttaaaaaacaagagtcaaggctcacaccaacttgtaggctgtgggagctttgccataggtagatacaatgtagaagtatacttttttaaagcatgaagaagacaaggaacttcattataatgtaccaggtagaggacattattattcaaaggattatgcacagctcagtgaagatgaagttacaatttttctcgcagctttgttgctattattttcttctgcataaatgtatgctcatttcattatgtgccttgctccctgattgtgcaaagctatatatatatatatatatatatagatagatagatagatatatgagagagatatattcagtactactgaggatgtttttctgaggatgtttttgttctgctggattaagttattttccaagttactcttgccagttatgtcagtaaactattgtaatggcttagcacactagtcgtacagtcagtgtaaatgtttttcatttacatgttttcattatatcagcttatcaaatccttaataaaaaaaattcatagatttcatttaaacatggggactttgagtgtttgtggatcggcaccattaagaatctggttttgcatttcatgtcagggtacccaaaacataggccatacacagaagaaattaagtgtggtaaataaactagtttgatatgttcaa

SEQ ID NO: 265838 - DNA, 1794 bp, Artificial Sequence
  derived and/or modified sequence
atggagcagctatcagatgaagaaattgatcatggtgctgaagaagacagtgacaaggaagatcaggacctggacaaaatgtttggagcctggcttggagaactagacaaactcactcagagtttggattctgacaagcccatggaaccagtaaaaagatctcctcttcgccaggaaacaaacatggccaacttttcttaccgcttctccatatacaacttgaatgaagctctgaatcagggagagactgtggatctggatgccttgatggctgatctttgctctatagagcaggagctcagcagcattggttcaggaaacagtaagcgtcaaatcacagaaacgaaagctactcagaaattgcctgttagccgacatacattgaaacatggcaccttgaaaggattatcttcttcatctaataggatagctaaaccttcccatgccagctactccttggacgacgtcactgcacagttagaacaggcctctttgagtatggatgaggctgctcagcaatctgtactagaagatactaaacccttagtaactaatcagcacagaagaaccgcgtcagcaggcacagtgagtgatgctgaagtacactctattagtaattcctcccattccagcatcacttccgcagcctccagcatggactctttggatattgataaagtaacacgccctcaagagctggatttgacacatcaagggcagccaattactgaggaagaacaggcagcaaaattgaaagctgagaagatcagagttgccctagagaaaattaaagaggcacaagtgaaaaagctggtgatcagagtccacatgtctgatgacagttctaaaacaatgatggtggatgagaggcagacagtaagacaagtactggataacctgatggacaaatcccactgcggttatagtttagactggtcactggtagaaaccgtttctgaattacaaatggagagaatctttgaagaccatgaaaacttggttgaaaatcttcttaattggacaagagatagccaaaacaagcttatatttatggagcgtatagaaaaatatgcacttttcaaaaacccacagaattatcttttggggaaaaaagaaacagctgagatggcagatagaaacaaagaagtcctcttggaggaatgtttttgtggaagttctgtaactgtaccagaaattgaaggagtcctttggttgaaggatgatggcaagaagtcctggaaaaagcgttattttctcttgcgagcatctggtatctactatgttcccaaaggaaaagcaaaggtctctcgggatctggtgtgctttctccagctggatcatgtcaacgtttattatggccaggactatcggaacaaatacaaagcacctacagactattgtctggtgctgaagcatccacaaatccagaagaaatctcaatatatcaaatacctttgttgtgatgatgtgaggacactgcatcagtgggtcaatgggatccgcattgcaaagtatgggaagcagctctatatgaactaccaagaagccttgaagaggacagagtcagcctatgattggacttccttatccagctccagcattaaatcgggatccagttcttccagcatcccagagtctcagtcaaaccactccaatcagtctgatagcggagtttctgacacccagccagcaggacacgtccgttcccagagcattgtgagctccgtattctctgaagcctggaaacgaggcactcagttggaagagtccagcaaggtaacagcttcgttttaa

SEQ ID NO: 265839 - DNA, 1779 bp, Artificial Sequence
  derived and/or modified sequence
atggagcagctatcagatgaagaaattgatcatggtgctgaagaagacagtgacaaggaagatcaggacctggacaaaatgtttggagcctggcttggagaactagacaaactcactcagagtttggattctgacaagcccatggaaccagtaaaaagatctcctcttcgccaggaaacaaacatggccaacttttcttaccgcttctccatatacaacttgaatgaagctctgaatcagggagagactgtggatctggatgccttgatggctgatctttgctctatagagcaggagctcagcagcattggttcaggaaacagtaagcgtcaaatcacagaaacgaaagctactcagaaattgcctgttagccgacatacattgaaacatggcaccttgaaaggattatcttcttcatctaataggatagctaaaccttcccatgccagctactccttggacgacgtcactgcacagttagaacaggcctctttgagtatggatgaggctgctcagcaatctgtactagaagatactaaacccttagtaactaatcagcacagaagaaccgcgtcagcaggcacagtgagtgatgctgaagtacactctattagtaattcctcccattccagcatcacttccgcagcctccagcatggactctttggatattgataaagtaacacgccctcaagagctggatttgacacatcaagggcagccaattactgaggaagaacaggcagcaaaattgaaagctgagaagatcagagttgccctagagaaaattaaagaggcacaagtgaaaaagctggtgatcagagtccacatgtctgatgacagttctaaaacaatgatggtggatgagaggcagacagtaagacaagtactggataacctgatggacaaatcccactgcggttatagtttagactggtcactggtagaaaccgtttctgaattacaaatggagagaatctttgaagaccatgaaaacttggttgaaaatcttcttaattggacaagagatagccaaaacaagcttatatttatggagcgtatagaaaaatatgcacttttcaaaaacccacagaattatcttttggggaaaaaagaaacagctgagatggcagatagaaacaaagaagtcctcttggaggaatgtttttgtggaagttctgtaactgtaccagaaattgaaggagtcctttggttgaaggatgatggcaagaagtcctggaaaaagcgttattttctcttgcgagcatctggtatctactatgttcccaaaggaaaagcaaaggtctctcgggatctggtgtgctttctccagctggatcatgtcaacgtttattatggccaggactatcggaacaaatacaaagcacctacagactattgtctggtgctgaagcatccacaaatccagaagaaatctcaatatatcaaatacctttgttgtgatgatgtgaggacactgcatcagtgggtcaatgggatccgcattgcaaagtatgggaagcagctctatatgaactaccaagaagccttgaagaggacagagtcagcctatgattggacttccttatccagctccagcattaaatcgggatccagttcttccagcatcccagagtctcagtcaaaccactccaatcagtctgatagcggagtttctgacacccagccagcaggacacgtccgttcccagagcattgtgagctccgtattctctgaagcctggaaacgaggcactcagttggaagagtccagcaagtaa

SEQ ID NO: 265840 - DNA, 1224 bp, Artificial Sequence
  derived and/or modified sequence
atggagctgctggaggaggacctgacctgccccatctgctgcagcctgttcgacgaccccagagtgctgccctgcagccacaacttctgcaagaagtgcctggagggcatcctggagggcagcgtgagaaacagcctgtggagacccgcccccttcaagtgccccacctgcagaaaggagaccagcgccaccggcatcaacagcctgcaggtgaactacagcctgaagggcatcgtggagaagtacaacaagatcaagatcagccccaagatgcccgtgtgcaagggccacctgggccagcccctgaacatcttctgcctgaccgacatgcagctgatctgcggcatctgcgccaccagaggcgagcacaccaagcacgtgttctgcagcatcgaggacgcctacgcccaggagagagacgccttcgagagcctgttccagagcttcgagacctggagaagaggcgacgccctgagcagactggacaccctggagaccagcaagagaaagagcctgcagctgctgaccaaggacagcgacaaggtgaaggagttcttcgagaagctgcagcacaccctggaccagaagaagaacgagatcctgagcgacttcgagaccatgaagctggccgtgatgcaggcctacgaccccgagatcaacaagctgaacaccatcctgcaggagcagagaatggccttcaacatcgccgaggccttcaaggacgtgagcgagcccatcgtgttcctgcagcagatgcaggagttcagagagaagatcaaggtgatcaaggagacccccctgccccccagcaacctgcccgccagccccctgatgaagaacttcgacaccagccagtgggaggacatcaagctggtggacgtggacaagctgagcctgccccaggacaccggcaccttcatcagcaagatcccctggagcttctacaagctgttcctgctgatcctgctgctgggcctggtgatcgtgttcggccccaccatgttcctggagtggagcctgttcgacgacctggccacctggaagggctgcctgagcaacttcagcagctacctgaccaagaccgccgacttcatcgagcagagcgtgttctactgggagcaggtgaccgacggcttcttcatcttcaacgagagattcaagaacttcaccctggtggtgctgaacaacgtggccgagttcgtgtgcaagtacaagctgctgtag

SEQ ID NO: 265841 - DNA, 801 bp, Artificial Sequence
  derived and/or modified sequence
atggagctgctggaggaggacctgacctgccccatctgctgcagcctgttcgacgaccccagagtgctgccctgcagccacaacttctgcaagaagtgcctggagggcatcctggagggcagcgtgagaaacagcctgtggagacccgcccccttcaagtgccccacctgcagaaaggagaccagcgccaccggcatcaacagcctgcaggtgaactacagcctgaagggcatcgtggagaagtacaacaagatcaagatcagccccaagatgcccgtgtgcaagggccacctgggccagcccctgaacatcttctgcctgaccgacatgcagctgatctgcggcatctgcgccaccagaggcgagcacaccaagcacgtgttctgcagcatcgaggacgcctacgcccaggagagagacgccttcgagagcctgttccagagcttcgagacctggagaagaggcgacgccctgagcagactggacaccctggagaccagcaagagaaagagcctgcagctgctgaccaaggacagcgacaaggtgaaggagttcttcgagaagctgcagcacaccctggaccagaagaagaacgagatcctgagcgacttcgagaccatgaagctggccgtgatgcaggcctacgaccccgagatcaacaagctgaacaccatcctgcaggagcagagaatggccttcaacatcgccgaggccttcaaggacgtgagcgagcccatcgtgttcctgcagcagatgcaggagttcagagagaagatcaaggtgatcaaggagaccccctag

SEQ ID NO: 265842 - DNA, 390 bp, Artificial Sequence
  derived and/or modified sequence
atggagctgctggaggaggacctgacctgccccatctgctgcagcctgttcgacgaccccagagtgctgccctgcagccacaacttctgcaagaagtgcctggagggcatcctggagggcagcgtgagaaacagcctgtggagacccgcccccttcaagtgccccacctgcagaaaggagaccagcgccaccggcatcaacagcctgcaggtgaactacagcctgaagggcatcgtggagaagtacaacaagatcaagatcagccccaagatgcccgtgtgcaagggccacctgggccagcccctgaacatcttctgcctgaccgacatgcagctgatctgcggcatctgcgccaccagaggcgagcacaccaagcacgtgttctgctag

SEQ ID NO: 265843 - DNA, 1224 bp, Artificial Sequence
  derived and/or modified sequence
atggagctcctggaggaggatctgacatgtcccatttgttgcagcctgtttgacgatcccagggtgctgccctgttcgcacaacttctgcaagaagtgtctggagggcatcctcgaaggttccgtgcggaattcactgtggcggccagccccctttaagtgccccacttgcaggaaggagacctccgccaccggcattaacagccttcaggttaactactcacttaaaggcatagtggagaaatacaataaaatcaaaatctcccccaagatgcccgtttgtaaagggcacctcggacaaccactcaatatcttctgtctgactgatatgcaattaatctgcgggatctgtgccacacgcggtgagcatactaaacacgttttttgctccatagaggacgcttacgcgcaggaaagggacgcatttgaaagcctcttccagagcttcgagacttggcgccgaggggatgcattgagccgacttgataccctagaaacttccaaacggaaaagcttgcaactcctcaccaaggattcagacaaggtgaaagagttctttgagaagctgcagcataccctcgaccagaagaagaacgagatcctttcagattttgagactatgaaattagctgtaatgcaggcttatgatcctgaaataaacaagctgaatacaatactgcaggaacagaggatggcttttaacatagctgaggctttcaaagatgtgtctgagcccatcgtcttcctccagcagatgcaggagtttcgtgagaagattaaggttattaaggaaactccgctaccaccatccaacctgccagcgtcccccttgatgaaaaactttgatacctcacagtgggaggatattaagctggtggacgtggacaagctgtctctgccacaggacaccggtacttttatatcaaagattccctggagtttctataaattgttcctcctcatactgctgctgggtctcgttatcgtgtttggacctacaatgtttctggagtggtcactgttcgacgatttggctacgtggaaaggctgtttaagcaatttctcctcttaccttactaagaccgcagactttattgagcagtcagtcttctattgggagcaggtgaccgatggatttttcatctttaatgagagatttaagaacttcaccctggtcgtcctaaacaacgttgccgaatttgtttgcaaatacaaactactgtag

SEQ ID NO: 265844 - DNA, 801 bp, Artificial Sequence
  derived and/or modified sequence
atggaactgctggaggaggatctgacctgccctatttgttgtagcctgttcgacgaccctagagtgttgccgtgttcacataatttttgtaagaaatgtctggagggtattttggagggcagtgtgaggaacagcctctggcgaccagcaccctttaagtgccccacgtgtaggaaagaaacatcagccaccggcataaactccctccaggtcaattactccctgaaaggcatcgtcgagaaatataataaaatcaagatctcccccaaaatgcccgtgtgcaagggccacttagggcagccactgaacattttctgcctgaccgacatgcagctgatctgcggcatttgcgctactcgaggtgagcacaccaagcatgtgttctgtagtattgaggatgcctacgcccaggagcgcgatgccttcgagtctttattccaatccttcgagacttggcgaaggggtgacgccttatcccgcctggatactcttgagaccagcaagcgaaaatccctgcagcttctgacgaaagatagtgacaaggtcaaggaatttttcgagaaattgcagcacacgcttgaccaaaaaaagaatgagatcctcagcgactttgagaccatgaagcttgctgtgatgcaggcttatgatccagagattaataaattaaacaccatcctgcaggagcaacgcatggctttcaacatagccgaggctttcaaggatgtttcagaacctatagtgttcttacagcaaatgcaggaatttcgcgagaaaatcaaggtgatcaaggagacaccttag

SEQ ID NO: 265845 - DNA, 1224 bp, Artificial Sequence
  derived and/or modified sequence
atggagctgctcgaagaggatctcacgtgccccatctgctgttctttgttcgacgatccaagagtgctgccttgtagtcacaacttttgtaaaaaatgccttgaagggatccttgagggtagcgtcagaaatagcttgtggaggcctgcccccttcaaatgtcctacatgccgcaaagagacctctgctaccggcattaattccctacaggtcaattattcccttaaaggcatagtggagaaatataacaaaattaagatctcaccaaaaatgccagtgtgtaaggggcacctaggacagcctttaaacatattctgtctgacagacatgcagttaatctgtggaatttgcgccacccgtggcgagcataccaagcacgtattctgttctatcgaagatgcatatgcccaggaaagagacgcattcgaatcactgtttcagtctttcgagacttggaggcgcggtgacgcacttagtcgccttgacactttggagacatctaagagaaaatctctgcagctccttaccaaggatagtgacaaagtcaaagaatttttcgagaagctccaacacactctcgaccaaaagaaaaacgagattttatcggatttcgagaccatgaagctcgccgtgatgcaggcttacgaccctgagatcaacaagttgaacacaatactgcaagagcagagaatggctttcaacattgctgaggcgttcaaagacgtgagcgaacctatcgtgttcttgcaacagatgcaggagtttcgcgaaaagatcaaggtaattaaggagacaccactgccaccctctaatctgcccgccagccccctgatgaaaaactttgacacatctcagtgggaggatatcaaactcgtagacgtggataagctgtccctacctcaggacactggcacttttatttctaagattccctggtctttttacaagctgtttttgcttatattgttgctggggcttgtgatcgtcttcggacctaccatgttcctcgagtggagcctctttgacgacctggccacatggaaaggctgtctatcaaacttttcttcgtatctcacaaaaaccgctgattttatcgagcagtccgtcttctattgggagcaggtcactgatgggttttttatttttaacgagaggtttaagaactttaccctggtagtgctcaacaacgtcgctgaatttgtttgcaaatacaagttgctgtag

SEQ ID NO: 265846 - DNA, 390 bp, Artificial Sequence
  derived and/or modified sequence
atggaacttctagaagaagatttaacttgtccgatctgctgttccctgttcgatgatccaagggtactgccttgttcacataacttctgcaagaaatgcctcgaaggaatcttggagggaagcgtgcggaatagtctctggcggcccgcccctttcaagtgccccacctgtaggaaagagacctccgcaactggtattaactccttgcaagtaaactattcgctgaagggaattgtagagaaatacaataagataaaaatcagtcccaagatgccagtctgtaagggccacctgggccagccccttaacattttctgcctaacagacatgcagctgatttgcggcatctgtgccacacggggtgagcacacgaagcacgtcttctgctag

SEQ ID NO: 265847 - DNA, 1224 bp, Artificial Sequence
  derived and/or modified sequence
atggagctattggaggaagaccttacttgccctatctgctgctcgttattcgacgatccacgggttctgccctgctctcacaatttttgcaagaaatgtcttgaaggaattctagagggatccgtgcggaacagcttgtggagacctgcaccatttaaatgccccacctgtcgcaaggagacatctgcaaccggaattaattctctgcaggtgaactactcacttaagggaatcgtggaaaagtacaataagatcaagatctcacctaagatgccggtatgcaaggggcacttaggccaacccctgaacatcttctgcctgacggacatgcagctgatctgtggcatctgcgctaccagaggagaacacactaagcatgtgttttgtagtatagaagacgcctacgcgcaagagcgggatgcctttgaatcgctttttcaatcattcgagacctggcgccggggcgatgcactaagccgcttagatacgttggagacctcaaagaggaaaagcctccagttactgaccaaggactcagacaaagtaaaggagttcttcgaaaagctccagcacaccctggaccagaaaaagaacgaaatcctctccgattttgaaaccatgaagctggctgtcatgcaagcctatgatcccgaaattaataagctgaacactatcctgcaggaacagagaatggccttcaatatagccgaagccttcaaagatgtgagcgagcctatcgttttcttacagcagatgcaggaatttagggagaaaattaaagtgattaaggaaactcctctgccaccgtctaacctgcctgcaagtcccctgatgaaaaattttgatacctcacagtgggaagacatcaagctggtggacgttgataagctgtccctgccccaggatactgggacattcatttcaaagattccgtggtcattttataagctgttcctgctcatccttcttctggggctagtcattgtctttggacccaccatgtttttggagtggtcattgtttgacgatcttgccacatggaagggctgcctttctaacttctctagctatctgacaaaaacggctgacttcattgagcagtctgtgttttattgggaacaggtaaccgatgggttctttatctttaacgaacggttcaagaacttcaccttggtcgtgctgaacaacgttgcagaatttgtctgtaaatataagctcctgtag

SEQ ID NO: 265848 - DNA, 1224 bp, Artificial Sequence
  derived and/or modified sequence
atggagctgctggaggaggacctgacctgccccatctgctgcagcctgtttgatgacccccgggtgctgccctgcagccacaacttctgcaagaagtgcctggagggcatcctggagggctctgtgaggaacagcctgtggaggcctgcccccttcaagtgccccacctgcaggaaggagaccagcgccaccggcatcaacagcctgcaggtgaactacagcctgaagggcatcgtggagaagtacaacaagatcaagatcagccccaagatgcctgtgtgcaagggccacctgggccagcccctgaacatcttctgcctgacagacatgcagctgatctgtggcatctgtgccaccagaggagagcacaccaagcacgtgttctgcagcattgaagatgcctatgcccaggagagagatgcctttgagagcctcttccagagctttgagacctggaggagaggagatgccctgagccggctggacaccctggagaccagcaagaggaagagcctgcagctgctgaccaaggacagcgacaaggtgaaggagttctttgagaagctgcagcacaccctggaccagaagaagaatgagatcctgagtgactttgagaccatgaagctggccgtgatgcaggcctatgaccctgagatcaacaagctgaacaccatcctgcaggagcagaggatggccttcaacattgctgaggccttcaaggatgtgtctgagcccatcgtgttcctgcagcagatgcaggagttccgggagaagatcaaggtgatcaaggagacccccctgccccccagcaacctgcctgccagccccctgatgaagaactttgacaccagccagtgggaggacatcaagctggtggatgtggacaagctgagcctgccccaggacaccggcaccttcatcagcaagatcccctggagcttctacaagctgttcctgctgatcctgctgctgggcctggtgattgtgtttggccccaccatgttcctggagtggagcctgtttgatgacctggccacctggaagggctgcctgagcaacttcagcagctacctgaccaagacagctgacttcatcgagcagagcgtcttctactgggagcaggtgacagatggcttcttcatcttcaatgaacgcttcaagaacttcaccctggtggtgctgaacaacgtggccgagtttgtgtgcaagtacaagctgctgtag

SEQ ID NO: 265849 - DNA, 801 bp, Artificial Sequence
  derived and/or modified sequence
atggagctgctggaggaggacctgacctgccccatctgctgcagcctgtttgatgacccccgggtgctgccctgcagccacaacttctgcaagaagtgcctggagggcatcctggagggctctgtgaggaacagcctgtggaggcctgcccccttcaagtgccccacctgcaggaaggagaccagcgccaccggcatcaacagcctgcaggtgaactacagcctgaagggcatcgtggagaagtacaacaagatcaagatcagccccaagatgcctgtgtgcaagggccacctgggccagcccctgaacatcttctgcctgacagacatgcagctgatctgtggcatctgtgccaccagaggagagcacaccaagcacgtgttctgcagcattgaagatgcctatgcccaggagagagatgcctttgagagcctcttccagagctttgagacctggaggagaggagatgccctgagccggctggacaccctggagaccagcaagaggaagagcctgcagctgctgaccaaggacagcgacaaggtgaaggagttctttgagaagctgcagcacaccctggaccagaagaagaatgagatcctgagtgactttgagaccatgaagctggccgtgatgcaggcctatgaccctgagatcaacaagctgaacaccatcctgcaggagcagaggatggccttcaacattgctgaggccttcaaggatgtgtctgagcccatcgtgttcctgcagcagatgcaggagttccgggagaagatcaaggtgatcaaggagaccccctag

SEQ ID NO: 265850 - DNA, 390 bp, Artificial Sequence
  derived and/or modified sequence
atggagctgctggaggaggacctgacctgccccatctgctgcagcctgtttgatgacccccgggtgctgccctgcagccacaacttctgcaagaagtgcctggagggcatcctggagggctctgtgaggaacagcctgtggaggcctgcccccttcaagtgccccacctgcaggaaggagaccagcgccaccggcatcaacagcctgcaggtgaactacagcctgaagggcatcgtggagaagtacaacaagatcaagatcagccccaagatgcctgtgtgcaagggccacctgggccagcccctgaacatcttctgcctgacagacatgcagctgatctgtggcatctgtgccaccagaggagagcacaccaagcacgtgttctgctag

SEQ ID NO: 265851 - DNA, 1224 bp, Artificial Sequence
  derived and/or modified sequence
atggagctgctggaggaggacctgacctgccccatctgctgcagcctgtttgacgatcccagagttctcccatgctcccataacttctgtaagaagtgcctggaaggaattctagaaggcagcgtccgcaacagcctgtggaggcccgcaccgttcaagtgtccaacgtgtaggaaggaaaccagtgccactggcatcaactctttgcaggtgaactacagcttaaagggcatcgtggaaaaatacaacaaaattaagatctctccgaagatgccagtatgtaagggacacttggggcagcccctgaacatcttttgcctgaccgacatgcagttaatttgtggaatttgtgcaacacggggggaacacacaaagcacgtgttctgtagtatcgaagatgcatatgcgcaagagagggacgctttcgaatcactgtttcaatcttttgagacctggcgcaggggcgacgctctctctaggctcgacaccttggaaacttcaaagcgaaagtctctgcaactgttgacgaaagattctgacaaggtcaaggagttctttgagaagctgcagcataccctggaccaaaagaaaaatgagatcctctccgacttcgagactatgaaacttgccgttatgcaggcatacgacccagagataaacaaattaaatacaatcctgcaagaacagaggatggcatttaacatcgcagaggctttcaaggacgtatccgagccgattgtgtttctgcaacaaatgcaggagttccgcgagaagattaaggtgattaaggaaacccccctcccaccgagcaatttaccggcttctccccttatgaagaacttcgatacctcacagtgggaagacatcaaacttgtcgatgtcgacaagcttagccttccacaggataccgggacatttatcagtaagattccctggagtttttacaaattattcctccttattttactcctggggcttgtaatcgtgttcggacccacaatgtttctggagtggagcctcttcgacgacctcgccacatggaaaggctgcctgtctaacttttccagttatctgaccaagacggccgacttcatagagcagtctgtgttctattgggagcaggtgacggacgggttctttatctttaacgagagattcaaaaacttcacattggttgtgttgaataacgtggccgaatttgtctgtaagtataagctgctgtag

SEQ ID NO: 265852 - DNA, 801 bp, Artificial Sequence
  derived and/or modified sequence
atggagctgctggaggaggacctgacctgccccatctgctgcagcctttttgacgaccctagagtgctgccatgcagtcataatttttgcaaaaagtgtctcgagggtatactggagggaagtgtgcgaaatagcctgtggaggcccgctcccttcaagtgtcctacgtgcagaaaggaaacctccgctacaggcatcaactcccttcaggtaaactacagtctcaagggcatcgtggagaaatacaacaagattaaaatctctccaaagatgccagtttgcaagggtcacctgggacagcccctgaacattttctgcttaacagatatgcaactaatctgtggaatttgcgcaacaagaggagagcataccaagcacgtcttttgttcaattgaggatgcgtatgcgcaggaaagagacgctttcgagtccctgtttcagtccttcgaaacatggaggaggggggacgccttgagtcgtctggacaccctggagaccagcaagcgtaaatccctgcagctcctcacaaaggactccgacaaggtaaaagagttctttgaaaagcttcagcacactcttgatcagaaaaaaaacgaaatactgagcgactttgagactatgaaactcgccgtgatgcaggcttacgaccccgaaatcaacaagctgaacacaattcttcaggaacagcgaatggcctttaatatagccgaagctttcaaggacgtcagtgaaccaattgtctttctgcagcagatgcaagagttcagagagaagatcaaggttataaaagaaactccctag

SEQ ID NO: 265853 - DNA, 1224 bp, Artificial Sequence
  derived and/or modified sequence
atggagctgctggaggaggacctgacctgccccatctgctgcagcctcttcgatgaccctcgggtgttaccatgctcccacaatttctgcaaaaagtgtttggagggcatcctcgagggttcagttaggaactctctgtggcgtcccgcacctttcaagtgtcctacctgtcgcaaggagacatccgccacaggcatcaattcactgcaagtcaactattccttgaaggggattgtggaaaagtataacaaaatcaagattagccccaagatgcccgtgtgcaagggacacctgggacagcctttgaacatcttctgtctgaccgacatgcaattgatatgtggcatctgcgcaacccggggggagcacaccaagcatgttttctgctctatcgaagatgcgtatgcacaggagcgagacgctttcgagtctctcttccaatctttcgaaacatggagaaggggggacgccctaagtagacttgacacgctcgagacctctaaaaggaaatccctccaactcttgacaaaggacagcgataaggttaaggaattctttgagaagctccagcataccctcgatcagaaaaagaacgaaatcctctccgatttcgagaccatgaagctcgccgtcatgcaagcctatgaccccgagataaacaagctgaacaccatcctgcaggaacagcgaatggcattcaatatcgccgaggccttcaaggatgtgtccgaaccaattgtgtttctccagcagatgcaggagttcagagagaagatcaaggttataaaggaaacccctctcccaccttctaacctccccgcttctcctcttatgaaaaacttcgacaccagtcagtgggaggacatcaagctggtggatgtagataagctctcactacctcaggatacagggacgtttataagcaagattccctggagcttctacaagcttttcctgttgatccttctgctgggcctcgtgatagtgttcggaccaacaatgttcttagaatggtctctctttgacgatttagctacttggaaaggatgcttgagcaacttctcttcatatctgactaaaaccgctgatttcatagagcagtcagtcttctattgggaacaggtgacagatggattctttattttcaacgagcggttcaaaaactttacactcgtggtgctgaacaatgtggccgagttcgtttgtaaatacaaactgttgtag

SEQ ID NO: 265854 - DNA, 390 bp, Artificial Sequence
  derived and/or modified sequence
atggagctgctggaggaggacctgacctgccccatctgctgcagcttgttcgacgatccaagagtgctgccctgttcccacaacttttgtaaaaagtgcctagaaggaattctcgagggatcggttcgtaactcactgtggcgtcccgccccatttaagtgcccaacttgccgaaaggagactagcgcaactggaatcaactctctgcaggtgaattatagccttaagggaatcgtggagaagtataataagattaaaatctctccaaaaatgccagtgtgtaaaggccaccttggtcagcccctcaacatcttttgtctgacagatatgcagctcatctgtgggatttgcgccacacgcggggagcataccaagcacgtattctgctag

SEQ ID NO: 265855 - DNA, 1224 bp, Artificial Sequence
  derived and/or modified sequence
atggagctgctggaggaggacctgacctgccccatctgctgcagcctgttcgatgatcctcgcgtccttccgtgttctcataatttttgcaaaaaatgtctagaagggatcctggaggggtccgtgagaaacagcctgtggcggcctgcacctttcaaatgtcccacatgccgtaaggagacatccgcaaccggaataaactctcttcaggtcaactatagccttaaaggcatcgtggagaagtataacaagataaagatttcacctaaaatgccagtctgtaaaggccatctcgggcagccactgaatattttctgtttgacagacatgcaactaatctgtggtatatgcgcaaccaggggggaacacaccaagcacgtattttgtagcattgaagatgcctatgctcaggagcgggacgccttcgaatctctctttcagtcctttgagacatggcggaggggcgatgccctgtctcgacttgatacattggagacctcgaagaggaagtccctgcagctgctaaccaaagacagtgacaaggtaaaagaattttttgaaaagctgcagcataccctggatcagaaaaagaatgagatcctctccgattttgagactatgaagcttgctgtgatgcaggcttatgaccctgaaattaacaagctaaacactatcctgcaggaacaacggatggcattcaatatcgctgaggccttcaaggacgtgtccgagcctatcgtcttcctgcagcagatgcaggagttcagggagaagatcaaggtaatcaaagagacaccacttcctccatctaaccttccggcctcacccctgatgaagaacttcgacaccagtcaatgggaggatattaaactcgttgacgtggacaaactctctttacctcaggatacgggaacattcattagcaaaatcccctggtctttttataagctcttcctgcttatcctgcttctgggactggtcatcgtgttcgggccaaccatgtttctggagtggagcctgtttgatgacttagccacttggaaaggctgcctgtctaactttagctcctatctcactaagaccgccgattttattgaacagtctgtgttctactgggagcaggtgacagacggtttttttatcttcaatgaacggtttaaaaattttactctggtggtgcttaacaatgtggccgagtttgtgtgcaagtataagctgctgtag

SEQ ID NO: 265856 - DNA, 1224 bp, Artificial Sequence
  derived and/or modified sequence
atggaacttcttgaggaagatttaacatgcccaatttgttgctccctgttcgacgaccccagagtcctgccctgcagtcataatttttgcaagaaatgtttagagggcattttagaggggtctgtgcggaactccctctggcgcccagctccctttaaatgccccacttgccgtaaggagacttccgcaacgggtattaacagcctccaagttaactattcgctgaaggggatcgtcgagaaatacaataaaatcaaaatttccccgaaaatgcccgtctgcaagggccatttaggccaacccctgaatatcttttgtctgacagatatgcagctaatctgtggcatatgtgccacaagaggcgaacatacaaaacacgtattctgtagtattgaggacgcctacgctcaggagcgggacgcatttgaatcgttattccagtcattcgagacttggcgacgaggcgatgcgctttcccgtcttgatactttagaaacctctaagaggaagtccctgcagttgctcacgaaggacagtgacaaagtaaaggagttctttgagaagctacagcacacccttgatcagaaaaagaacgaaatacttagtgatttcgagacaatgaagttggccgtgatgcaggcttacgatcccgaaattaacaaactgaatacaatcctgcaggaacaaaggatggcctttaatatcgcagaagcttttaaagatgtcagcgagccaattgtttttctgcaacaaatgcaggagtttcgcgagaagatcaaagtcatcaaagaaactccccttcccccatccaatttgccagcgtcaccgctgatgaaaaattttgatacaagtcagtgggaggatattaaattggtcgatgtcgacaaactgtcactccctcaggataccggtacatttattagtaaaataccgtggtctttttacaagttatttcttctcatcctccttcttggcttggtgatagttttcggtcccactatgttcctcgaatggagcttattcgatgacctggctacctggaaggggtgcctgagtaacttcagttcttatctgaccaagactgcagacttcattgagcagtctgttttctactgggagcaggtaaccgatggcttttttatcttcaatgaacggttcaagaacttcacgttggtggtgttgaacaatgtggcggagttcgtgtgcaagtataagctcttgtag

SEQ ID NO: 265857 - DNA, 801 bp, Artificial Sequence
  derived and/or modified sequence
atggagcttctggaggaggatctaacctgccccatttgttgtagcctcttcgatgaccctagagttctcccctgttctcacaatttctgtaagaaatgtttagagggtattttggaaggaagcgtgagaaatagtctttggaggcctgcaccgttcaagtgtcccacctgcaggaaagagacctctgccacgggcatcaacagcctgcaggtgaattacagcctgaaagggatcgtcgaaaagtacaataagatcaagatatcccccaagatgcccgtttgtaaggggcatctcgggcagccccttaatatcttttgcttaactgacatgcagttaatttgcggcatctgtgccactcgcggagagcacactaaacacgtgttttgctcaatcgaggacgcatacgcgcaggaacgagacgcattcgagagcctgtttcagagctttgagacctggcggagaggggatgctcttagtcgactcgacacgctggagactagtaagagaaagagcctacagttgctgaccaaggatagtgacaaggtgaaagagttttttgagaaacttcagcacacactggatcagaagaagaacgagattttgagcgacttcgagaccatgaaacttgccgtcatgcaggcatatgatcccgaaatcaataagttaaacacaatattacaggaacagaggatggcattcaatatcgcggaagcatttaaagatgtgagtgagccgatcgtgttcctgcagcagatgcaggagtttagggaaaagattaaagtgataaaggagaccccctag

SEQ ID NO: 265858 - DNA, 1224 bp, Artificial Sequence
  derived and/or modified sequence
atggagttgctggaggaggatctgacctgccccatttgttgcagcctctttgacgatcccagggtactgccctgctctcacaacttttgcaaaaagtgcctggaaggtatcctggaaggttccgtgcgcaatagcctgtggcggcctgccccattcaagtgccccacctgccgcaaagagaccagcgccacgggtatcaacagcctgcaagtgaactactctttaaaaggaatcgtggaaaaatacaacaagattaagatctccccaaagatgcctgtgtgtaagggccatttgggccagcccttaaatatattttgcctcacggacatgcagcttatatgcggcatctgcgccacccgaggcgagcacaccaaacatgttttttgctccatagaggatgcttatgcccaggaacgggacgcgttcgagagtctattccagtcatttgagacttggagacggggagacgccctgtcacgcctggataccctcgagacctctaagaggaagtccctgcagctccttactaaggactccgataaggttaaagagttttttgagaagctgcaacatacactcgaccagaaaaaaaacgagattctgagcgattttgaaaccatgaaactggcagtcatgcaggcatatgatccggagattaataagctgaataccattttacaggagcagcgcatggcctttaacatcgccgaggcgtttaaagatgtgagtgaacccattgtgtttttacagcagatgcaggaatttcgtgagaagataaaggtgatcaaagaaactcccctgcctcctagcaacctcccggcttcaccccttatgaaaaactttgacacatctcagtgggaagacattaaacttgtggatgttgataaattaagccttccccaggacaccggcacgtttatctcaaagatcccctggtccttttacaaactgtttctactcattctgctgctgggactagtgatagtatttggtccaacaatgttcctggaatggtccctgtttgacgacctagccacatggaaagggtgtctttctaactttagctcttatctgacaaagaccgctgacttcattgagcagtccgtattctattgggagcaggttactgatggctttttcatatttaatgaacgctttaaaaacttcacacttgtcgtcctcaacaatgtggctgagtttgtatgtaagtacaagctgctgtag

SEQ ID NO: 265859 - DNA, 390 bp, Artificial Sequence
  derived and/or modified sequence
atggagctgctggaagaggacctgacgtgccccatatgttgctcactgttcgacgatccaagggtcctgccgtgttcacataacttctgtaaaaaatgcctggaaggaatcctcgagggctcagtgagaaattctctctggcggccagcaccttttaagtgccctacttgccgaaaggagacttcagcaacaggtattaattctttgcaggtgaattactctctgaagggcattgttgaaaagtataacaagatcaagataagtccaaagatgcctgtgtgcaaaggtcacctgggacagcccctaaacatattttgccttaccgacatgcaacttatctgtggcatatgcgccactcgaggcgagcataccaagcatgtgttttgctag

SEQ ID NO: 265860 - DNA, 1224 bp, Artificial Sequence
  derived and/or modified sequence
atggaactgttagaggaagatctcacgtgcccgatctgttgctccctgttcgatgaccctcgcgtgttgccctgcagtcataatttctgcaagaaatgtctcgagggtatcctcgagggaagcgtgcggaattcattgtggagacctgccccattcaagtgcccgacctgccgcaaggaaactagtgccaccgggattaacagcttgcaggtgaactatagcctgaaagggatcgtagaaaaatataataagatcaaaatatctcctaagatgccagtgtgtaaaggacatctgggacaacctctgaacattttctgtttgaccgacatgcaactgatttgcggcatttgtgcaacaaggggggaacacaccaagcatgtgttctgctcaattgaagacgcctatgcccaagagagggacgcttttgaatctctgttccagtccttcgaaacgtggaggcggggagacgcccttagtcggctggatactcttgagacttctaaacggaaaagcctccagctccttacaaaggattcggacaaggttaaggaattcttcgaaaaactgcaacacactttggatcagaagaagaatgagattctgtccgattttgaaacaatgaaactcgctgtgatgcaggcttatgaccctgagatcaataaacttaacaccattctgcaggaacaaagaatggcattcaacattgctgaggcatttaaggacgtgtcagagccgattgtcttcctgcagcaaatgcaggagtttcgagaaaagattaaggtcatcaaagaaacccccttacctccgtcaaatctgccagcaagtcccctcatgaagaactttgataccagccagtgggaggatatcaaactggtggatgtggataagttaagcttgccccaagacacgggtactttcatatctaagatcccatggagcttttacaagctatttctcttgatcctcttgttaggcttggtgatcgtctttggaccaacaatgttcctcgaatggtcactgttcgatgatcttgccacctggaagggctgccttagcaatttcagcagctatctcacgaaaacagccgacttcattgagcagtcagttttttattgggaacaggtcacagacgggttctttattttcaacgaaaggttcaagaacttcacactggtggtccttaataatgtcgctgagttcgtctgcaaatacaaactgctctag

SEQ ID NO: 265861 - protein, 735 aa, Artificial Sequence
  derived and/or modified sequence
MHCGLLEEPDMDSTESWIERCLNESENKRYSSHTSLGNVSNDENEEKENNRASKPHSTPATLQWLEENYEIAEGVCIPRSALYMHYLDFCEKNDTQPVNAASFGKIIRQQFPQLTTRRLGTRGQSKYHYYGIAVKESSQYYDVMYSKKGAAWVSETGKKEVSKQTVAYSPRSKLGTLLPEFPNVKDLNLPASLPEEKVSTFIMMYRTHCQRILDTVIRANFDEVQSFLLHFWQGMPPHMLPVLGSSTVVNIVGVCDSILYKAISGVLMPTVLQALPDSLTQVIRKFAKQLDEWLKVALHDLPENLRNIKFELSRRFSQILRRQTSLNHLCQASRTVIHSADITFQMLEDWRNVDLNSITKQTLYTMEDSRDEHRKLITQLYQEFDHLLEEQSPIESYIEWLDTMVDRCVVKVAAKRQGSLKKVAQQFLLMWSCFGTRVIRDMTLHSAPSFGSFHLIHLMFDDYVLYLLESLHCQERANELMRAMKGEGSTAEVREEIILTEAAAPTPSPVPSFSPAKSATSVEVPPPSSPVSNPSPEYTGLSTTGAMQSYTWSLTYTVTTAAGSPAENSQQLPCMRNTHVPSSSVTHRIPVYPHREEHGYTGSYNYGSYGNQHPHPMQSQYPALPHDTAISGPLHYAPYHRSSAQYPFNSPTSRMEPCLMSSTPRLHPTPVTPRWPEVPSANTCYTSPSVHSARYGNSSDMYTPLTTRRNSEYEHMQHFPGFAYINGEASTGWAK

SEQ ID NO: 265862 - DNA, 2208 bp, Artificial Sequence
  derived and/or modified sequence
atgcattgtggcctcttggaggagcctgatatggatagcacagagagttggatcgagaggtgcctcaacgagtccgagaacaagaggtactcaagccacacatctctcgggaacgtgtctaatgatgagaacgaagagaaagaaaataacagggcctccaagccacactctaccccagccactctgcaatggctggaggaaaattatgagatcgccgagggggtctgcatcccaaggtccgctctttatatgcactacctcgacttctgcgaaaagaatgatacccagcctgttaatgccgccagctttggcaaaattataagacagcagtttcctcagttgacgacacgcagactggggactaggggacagtccaagtaccattattatggaatagctgttaaggagagctctcagtactacgatgtgatgtattcaaagaaaggcgcagcatgggtttccgagaccggaaaaaaagaagtgagcaagcagactgtggcttattctccgcgcagcaagctgggcacccttttaccagagttcccaaacgttaaggacctgaacttgcctgcttctttgcccgaagagaaagtctctacgttcatcatgatgtaccgaacccattgtcagagaatcctggatacagtgattcgtgccaatttcgacgaagtccagtcattcttactgcatttctggcagggcatgccccctcacatgctaccagtactcggttcaagtacggtggtgaacattgttggcgtgtgcgactccattctgtacaaagccatttctggtgtgctcatgcctaccgtgcttcaggctctccctgacagtcttacgcaggtaatccggaaattcgcgaaacagctcgacgagtggttgaaggtcgccctgcatgacttacccgaaaaccttagaaacattaagttcgaactgagcaggcgcttttcacagattctccggcgccaaacctcgctcaatcacctgtgtcaggcaagcagaactgtgatccactcagccgacataacctttcagatgcttgaggattggagaaatgtggacttaaatagtataactaagcagaccctttacaccatggaggattcccgcgacgaacaccgcaagcttattacccagttataccaagagtttgaccatctgcttgaagaacagtctccaattgaatcatatatcgaatggttggacaccatggttgacaggtgcgtcgtgaaagttgcagccaaacgccagggtagcttgaagaaggtggcccaacaatttcttttgatgtggtcctgcttcgggacccgagtgattcgggatatgacattacattccgctccttccttcggtagttttcatctgattcatctcatgttcgatgattatgtgctctacctgctggagtctcttcattgtcaggaaagggccaacgagctcatgcgggccatgaaaggagaagggagtacagccgaggttagagaggaaatcattttgactgaagccgctgctcctactccaagtcctgttccttcattctcccccgccaagagcgcgacatctgtagaggttcccccgccctcttccccagttagtaacccaagcccggagtataccggtctatccaccacgggcgctatgcagtcatatacatggtctctgacttacactgtaaccactgccgcaggtagtccagcagagaactcccagcagcttccttgcatgcgcaatacccacgtgcccagcagtagcgtgacacaccgcatccctgtgtaccctcaccgagaagagcatggatacacaggttcctacaactacggaagttacgggaatcagcacccccatcccatgcagagtcagtacccggccctgccacacgacaccgctatcagtggaccactacactatgcaccttaccaccgctcatcagctcagtacccattcaattcgccgactagtagaatggagccatgcctgatgagttccacaccacggctgcatcctacccctgtgaccccccggtggcccgaggtgccaagcgccaacacttgctacacctcaccgtctgtccactcagctaggtatggcaattccagtgatatgtatactccactgactaccagaagaaattcagagtatgaacacatgcaacatttcccggggtttgcgtatattaatggggaagcatccactgggtgggccaaatag

SEQ ID NO: 265863 - DNA, 2208 bp, Artificial Sequence
  derived and/or modified sequence
atgcactgcggcctgctggaggagccagacatggacagcacagagagctggattgagcgctgcctgaatgaaagtgagaacaagcgctacagcagccacaccagcctgggcaatgtgtccaatgatgaaaatgaggagaaggagaacaacagagccagcaagccccacagcaccccagccaccctgcagtggctggaggagaactatgaaattgctgagggcgtgtgcatccccaggtctgccctgtacatgcactacctggacttctgtgagaagaatgacacccagcctgtgaatgctgccagctttgggaagatcatccggcagcagttcccccagctgaccacccggcggctgggcacccggggccagagcaagtaccactactacggcattgctgtgaaggagagcagccagtactatgatgtgatgtacagcaagaagggggccgcctgggtgtctgagaccgggaagaaggaggtgtccaagcagacagtggcctacagccccaggagcaagctgggcaccctgctgcctgagttccccaacgtgaaggacctgaacctgcctgccagcctgcctgaggagaaggtgtccaccttcatcatgatgtaccgcacccactgccagaggatcctggacaccgtcatccgggccaactttgatgaggtgcagagcttcctgctgcacttctggcagggcatgccaccccacatgctgcctgtgctgggcagcagcacagtggtgaacatcgtgggcgtgtgtgacagcatcctgtacaaggccatcagcggcgtgctgatgcccaccgtgctgcaggccctgcctgacagcctgacccaggtgatcaggaagtttgccaagcagctggatgagtggctgaaggtggccctgcatgacctgcctgagaacctgaggaacatcaagtttgagctgagccgccgcttcagccagatcctgcggcggcagaccagcctgaaccacctgtgccaggccagcaggacagtcatccacagcgctgacatcaccttccagatgctggaggactggagaaatgtggacctgaacagcatcaccaagcagaccctgtacaccatggaggacagcagagatgagcacaggaagctgatcacccagctgtaccaggagtttgaccacctgctggaggagcagagccccatcgagagctacatcgagtggctggacaccatggtggacagatgtgtggtgaaggtggccgccaagaggcagggcagcctgaagaaggtggcccagcagttcctgctgatgtggagctgcttcggcaccagggtcatccgggacatgaccctgcacagcgcccccagctttggcagcttccacctgatccacctgatgtttgatgattatgtgctgtacctgctggagagcctgcactgccaggagcgggccaatgagctgatgagggccatgaagggggagggcagcacagctgaggtgcgggaggagatcatcctgacagaggccgccgcccccacccccagccctgtgcccagcttctccccagccaagagcgccacctctgtggaggtgcccccacccagcagccctgtgagcaaccccagccctgagtacacaggcctgagcaccaccggggccatgcagagctacacctggagcctgacctacacagtgaccacagctgctggcagccctgctgagaacagccagcagctgccctgcatgaggaacacccacgtgcccagcagctctgtgacccaccgcatccctgtgtacccccaccgggaggagcacggctacacaggcagctacaactacggcagctatggcaaccagcacccccaccccatgcagagccagtacccagccctgccccatgacacagccatcagcggccccctgcactacgccccctaccacaggagcagcgcccagtaccccttcaacagccccaccagcaggatggagccctgcctgatgagcagcaccccccggctgcaccccacccctgtgaccccccgctggccagaggtgcccagcgccaacacctgctacaccagccccagcgtgcacagcgcccgctatggcaacagcagtgacatgtacacccccctgaccaccaggagaaattctgaatatgagcacatgcagcacttccctggctttgcctacatcaacggggaggccagcacaggctgggccaagtag

SEQ ID NO: 265864 - DNA, 3955 bp, Artificial Sequence
  derived and/or modified sequence
atctgacgagcggccattcatcaggccggctggcctatcaatgacattgctcccatcggggctcctataaaatgatgctttttcccatgaaacatccgcaaacattttgacgggtttggctttgcccggctggattactgagtgtccccttgctcgctcgctttttctctctcccccttctccgagctcgctcccttctctccctctctctcctcttttcttctttctcttttctttcctcttctttttcttttcttttcctttcctcctttatccttgtgccccctcactttctgcgtctctctctctccccttctccctccctccctcccttcctccctgggcatctctagcacaggggatccccaaacatcaggacttttggggggcgcctgtgctgtccatgggaagagcatgcattgtgggttactggaggaacccgacatggattccacagagagctggattgaaagatgtctcaacgaaagtgaaaacaaacgttattccagccacacatctctggggaatgtttctaatgatgaaaatgaggaaaaagaaaataatagagcatccaagccccactccactcctgctactctgcaatggctggaggagaactatgagattgcagagggggtctgcatccctcgcagtgccctctatatgcattacctggatttctgcgagaagaatgatacccaacctgtcaatgctgccagctttggaaagatcataaggcagcagtttcctcagttaaccaccagaagactcgggacccgaggacagtcaaagtaccattactatggcattgcagtgaaagaaagctcccaatattatgatgtgatgtattccaagaaaggagctgcctgggtgagtgagacgggcaagaaagaagtgagcaaacagacagtggcatattcaccccggtccaaactcggaacactgctgccagaatttcccaatgtcaaagatctaaatctgccagccagcctgcctgaggagaaggtttctacctttattatgatgtacagaacacactgtcagagaatactggacactgtaataagagccaactttgatgaggttcaaagtttccttctgcacttttggcaaggaatgccgccccacatgctgcctgtgctgggctcctccacggtggtgaacattgtcggcgtgtgtgactccatcctctacaaagctatctccggggtgctgatgcccactgtgctgcaggcattacctgacagcttaactcaggtgattcgaaagtttgccaagcaactggatgagtggctaaaagtggctctccacgacctcccagaaaacttgcgaaacatcaagttcgaattgtcgagaaggttctcccaaattctgagacggcaaacatcactaaatcatctctgccaggcatctcgaacagtgatccacagtgcagacatcacgttccaaatgctggaagactggaggaacgtggacctgaacagcatcaccaagcaaaccctttacaccatggaagactctcgcgatgagcaccggaaactcatcacccaattatatcaggagtttgaccatctcttggaggagcagtctcccatcgagtcctacattgagtggctggataccatggttgaccgctgtgttgtgaaggtggctgccaagagacaagggtccttgaagaaagtggcccagcagttcctcttgatgtggtcctgtttcggcacaagggtgatccgggacatgaccttgcacagcgcccccagcttcgggtcttttcacctaattcacttaatgtttgatgactacgtgctctacctgttagaatctctgcactgtcaggagcgggccaatgagctcatgcgagccatgaagggagaaggaagcactgcagaagtccgagaagagatcatcttgacagaggctgccgcaccaaccccttcaccagtgccatcgttttctccagcaaaatctgccacatctgtggaagtgccacctccctcttcccctgttagcaatccttcccctgagtacactggcctcagcactacaggagcaatgcagtcttacacgtggtctctaacatacacagtgacgacggctgctgggtccccagctgagaactcccaacagctgccctgtatgaggaacactcatgtgccttcttcctccgtcacacacaggataccagtttatccccacagagaggaacatggatacacgggaagctataactatgggagctatggcaaccagcatcctcaccccatgcagagccagtatccggccctccctcatgacacagctatctctgggccactccactatgccccttaccacaggagctctgcacagtacccttttaatagccccacttcccggatggaaccttgtttgatgagcagtactcccagactgcatcctaccccagtcactccccgctggccagaggtgccctcagccaacacgtgctacacaagcccgtctgtgcattctgcgaggtacggaaactctagtgacatgtatacacctctgacaacgcgcaggaattctgaatatgagcacatgcaacactttcctggctttgcttacatcaacggagaggcctctacaggatgggctaaatgactgctatcataggcatccatatttaatattaataataataattaataataataataaacccaacacccatcccccagaagactttatctctatacattgtaactcatgggctattcctaagtgcccattttcctaatgaacatgaggatgggatcaatgtgggatgaataaactttagttcagaaacaggacttactaaaagtcagtgggactgggtttctgtagccaagccagacttgactgtttctgtagagcactatctcgggcaggccattctgtgccttttccctctgttccatgactttgctttgtgttggcaaccacttctagtaagctactgattttcctgttgacaaaatctctttagtcttgaaggatggatactggagacagaatctggtttgtgttcttggatgggcacataatttaccaagagcattcaccttgccatctgtcttgtcattgtactgtacaaggaacagccctcagacgtgttctgcacatcccttcttcctggtggtaccatccctatttcctggagcaccagggctaaatggggagctatctggaaactctagattttctgtcatacccacatctgtcacagtacctgcattgtcttggaatgtaagcactgtcttgagggaaggaagaggtctgttctgtattgccttaagttgattgaggtttgtaggagactggttcttctacatacaaggatttgtcttaagtttgcacaatggctagtgtcagcaaaaggcaggagagggtttttgttttttttttaagttctatgagaatgtggatttatggcattgagtatcacactcagctctgctgtgttaactttgtgaaactggatggaacaaactttaacttaccaagcaccaagtgtgaaagtgactttcacggttccttcataaaactataataatatccgacactttgatagaaaaaaattcaaagctgtgcctttgagcctatactatactgtgtatgtgtggaaataaaaatgtattgtacttttggagaattttttgtaggcatttttctgtcagatttgtagtaatttgtgaggtttgttagagattaatataggttttctttctgtattataaaatgcaccaagcaattatggtggacctattaccctatgggtaagaaataaatggaaatatgacatcggatgtttcagcaactgttctgtaaataaaatctttgatcacaccactcagtgtgataattgtgtctacagctaaaatggaaatagttttatctgtacagttgtgcaagatatgaatggtttcacactcaaataaaaaatattgaaacg

SEQ ID NO: 265865 - DNA, 2208 bp, Artificial Sequence
  derived and/or modified sequence
atgcactgcggcctgctggaggagcccgacatggacagcaccgagtcttggatagagcgatgcttgaacgaatccgagaacaaacggtactcatctcacacatctctgggcaatgtctcaaacgacgagaacgaggaaaaggaaaacaatcgggcttccaaaccccactcaaccccagccactttgcagtggctcgaagaaaattacgaaattgccgagggggtttgtatcccaagaagcgccttgtatatgcactacctagacttttgtgaaaaaaatgacacacagccagttaacgccgcaagtttcggaaagattataaggcagcagtttccccagctcaccaccagacgcttgggaacaagggggcaaagtaagtaccattattatggcattgccgttaaggaatctagtcaatattacgatgtaatgtactctaaaaaaggggcagcttgggtcagcgaaacaggaaagaaagaagtgagcaagcaaaccgtggcatattctcccaggagtaaacttgggactttgctgccagagttcccgaatgtgaaggacctgaacttacccgcctcactgcctgaagaaaaggtgtccacatttataatgatgtaccgcacacattgtcaacggattctggacactgtcatcagagctaactttgacgaagtgcagagcttcctgcttcatttttggcagggcatgccaccccacatgttgccggtgctaggaagcagcacggtagtgaacatcgtcggcgtgtgcgactcaattctgtacaaagccatcagcggtgtccttatgcccaccgttcttcaggctctccctgattccttaacgcaggtgattcgaaagttcgctaagcaactggacgagtggctgaaagtggccctgcatgacctgcctgaaaatttgcgaaacatcaaattcgagctttccagaagattctctcagattctcaggcgccagacaagcctcaatcatctttgccaagcatctcggacagtcatccattccgctgacataacattccagatgctggaagattggcgaaacgtggacctgaactctattacaaaacaaacactctatacgatggaggactccagggatgaacaccgcaaactaatcacacaactgtaccaagagttcgaccacttgctggaagagcagtcccctatcgagtcatacattgagtggctggacaccatggttgaccgctgcgtggtcaaggtcgcggcaaagaggcagggcagtctgaaaaaggtcgcacagcagttcctgctcatgtggtcatgcttcggtacccgggtcatccgagacatgacattacatagcgcccccagtttcggatcctttcacctgatacatctcatgtttgacgattacgtgctctacttgcttgaatctctccactgtcaggaaagagcgaacgaactgatgagagcaatgaagggtgagggatccaccgctgaagtgcgggaagagatcattctgacagaggcagctgccccgacccctagcccagttccttccttctctcctgctaaatccgccacctctgtcgaagtgcctccacctagttctcccgtaagtaatccaagccctgaatatacaggactgagcaccacgggagcaatgcagtcatacacctggtcactaacctacacggtaaccaccgctgctgggtcccccgccgagaattcgcagcagcttccctgtatgcgtaatacacatgtgccgagctcttccgttacccatcgcattcctgtgtatcctcacagggaagaacatgggtacactgggtcctataactatgggagttacggtaatcaacatccccatcccatgcagtcacaataccctgctttaccgcacgacacagctatcagcgggccgttgcactacgccccttatcatcgttcttccgctcagtacccttttaattcaccgacctcacgcatggagccctgcctgatgtcttccaccccacgactccaccctacgcccgtgaccccgagatggccggaggtgccctcagccaatacatgctacacctctccaagcgtgcatagcgctaggtacgggaactcgtcggatatgtatactcccctgacaactcgccgaaacagcgaatacgaacacatgcagcacttccctggtttcgcttacatcaatggagaagccagtaccggatgggccaaatag

SEQ ID NO: 265866 - DNA, 2208 bp, Artificial Sequence
  derived and/or modified sequence
atgcattgcggcctgctggaggaaccggacatggattctaccgagtcctggatagagcgttgcctaaacgagagtgaaaataaacgttactcaagtcatacctccctgggaaacgtgagtaatgatgaaaatgaggaaaaggaaaacaaccgcgcaagtaagccgcattcaactccggcaacgcttcagtggctggaagagaactatgagatagccgagggtgtgtgcattcctagaagtgctctatatatgcactatcttgacttttgtgagaagaacgacacccagccggtaaatgctgcaagctttggcaaaatcatccggcagcagttccctcaactaaccactcggaggctgggtacacgtgggcagtctaaatatcattattatggaattgcggtaaaggaatcttcgcagtattacgacgtgatgtactccaagaagggagccgcttgggtttccgaaacgggtaaaaaagaagtttccaaacagactgtggcatactctccaaggtcaaaactcggaactttgttgccagaatttccaaacgtgaaggacctgaatctccctgccagcctgcccgaagagaaggtgtctaccttcatcatgatgtatcgcactcattgtcagcgtatcctggacaccgtgataagggccaactttgacgaagtacagtccttccttctacacttttggcagggtatgcccccacacatgctacccgtgctgggcagctcaacggtggtgaacattgtaggcgtgtgtgactctattctatataaagcgatcagcggggtgcttatgcctactgtactccaggccctgcccgattccctgacgcaggtcatccgcaaatttgctaaacaattggatgagtggcttaaggttgcgctgcacgacctgcctgaaaatctgcgcaatattaagtttgagctttctcgacggttcagccagatccttaggagacagacttcgctcaaccacctgtgtcaggccagtcgtacagtgatccattcagcggatattacttttcaaatgctggaggactggaggaatgtggatcttaattctattacaaaacagacactctacacaatggaggatagtcgggatgagcacaggaaactcattactcagctgtatcaggagttcgaccacttactcgaagagcagagcccaatagaatcatacatagagtggttagacacgatggtagacaggtgtgtggttaaggtggccgctaagagacaaggcagtctgaagaaagttgcacagcagtttctcctgatgtggtcctgctttgggacaagggtaatcagggacatgacactgcatagcgccccatcttttggtagttttcacctgattcacctgatgtttgatgactacgtactctacctactggagtccctgcactgtcaggaaagggcaaacgagcttatgcgcgcaatgaaaggcgaaggaagtacagctgaagtgcgcgaagaaatcattcttaccgaggctgccgctcctaccccgagccctgtgccctccttcagccccgctaagtcagcgaccagcgtcgaggtcccgcctccaagctctcctgtgagcaacccctcaccagagtataccggcctgagtacgaccggtgccatgcaatcatacacatggtctctgacctacacggtcacaacagctgcaggttcacctgccgaaaactctcagcagctgccctgtatgcgaaacactcacgttcccagtagttcagtcacccacagaattcccgtctatccgcacagagaggagcacgggtatacagggtcttataactacggttcttatggaaaccagcatccacatcccatgcagtcccaatatcctgcactcccacatgacacagccattagcggcccattgcattacgcaccgtaccatagatccagcgctcagtatccatttaatagtcccacctcccgcatggagccttgcctcatgagtagtacccccagactgcaccctactcccgtaaccccccgatggccagaggtcccatccgccaatacctgctacacttccccctccgtgcactctgcaaggtacgggaattccagcgacatgtatacccccctcactactaggcggaacagcgagtacgaacatatgcaacactttccgggtttcgcctatatcaatggtgaagcttcaacgggctgggcgaaatag

SEQ ID NO: 265867 - DNA, 2208 bp, Artificial Sequence
  derived and/or modified sequence
atgcactgcggcctgctggaggagcccgacatggacagcaccgagagctggatcgagagatgcctgaacgagagcgagaacaagagatacagcagccacaccagcctgggcaacgtgagcaacgacgagaacgaggagaaggagaacaacagagccagcaagccccacagcacccccgccaccctgcagtggctggaggagaactacgagatcgccgagggcgtgtgcatccccagaagcgccctgtacatgcactacctggacttctgcgagaagaacgacacccagcccgtgaacgccgccagcttcggcaagatcatcagacagcagttcccccagctgaccaccagaagactgggcaccagaggccagagcaagtaccactactacggcatcgccgtgaaggagagcagccagtactacgacgtgatgtacagcaagaagggcgccgcctgggtgagcgagaccggcaagaaggaggtgagcaagcagaccgtggcctacagccccagaagcaagctgggcaccctgctgcccgagttccccaacgtgaaggacctgaacctgcccgccagcctgcccgaggagaaggtgagcaccttcatcatgatgtacagaacccactgccagagaatcctggacaccgtgatcagagccaacttcgacgaggtgcagagcttcctgctgcacttctggcagggcatgcccccccacatgctgcccgtgctgggcagcagcaccgtggtgaacatcgtgggcgtgtgcgacagcatcctgtacaaggccatcagcggcgtgctgatgcccaccgtgctgcaggccctgcccgacagcctgacccaggtgatcagaaagttcgccaagcagctggacgagtggctgaaggtggccctgcacgacctgcccgagaacctgagaaacatcaagttcgagctgagcagaagattcagccagatcctgagaagacagaccagcctgaaccacctgtgccaggccagcagaaccgtgatccacagcgccgacatcaccttccagatgctggaggactggagaaacgtggacctgaacagcatcaccaagcagaccctgtacaccatggaggacagcagagacgagcacagaaagctgatcacccagctgtaccaggagttcgaccacctgctggaggagcagagccccatcgagagctacatcgagtggctggacaccatggtggacagatgcgtggtgaaggtggccgccaagagacagggcagcctgaagaaggtggcccagcagttcctgctgatgtggagctgcttcggcaccagagtgatcagagacatgaccctgcacagcgcccccagcttcggcagcttccacctgatccacctgatgttcgacgactacgtgctgtacctgctggagagcctgcactgccaggagagagccaacgagctgatgagagccatgaagggcgagggcagcaccgccgaggtgagagaggagatcatcctgaccgaggccgccgcccccacccccagccccgtgcccagcttcagccccgccaagagcgccaccagcgtggaggtgcccccccccagcagccccgtgagcaaccccagccccgagtacaccggcctgagcaccaccggcgccatgcagagctacacctggagcctgacctacaccgtgaccaccgccgccggcagccccgccgagaacagccagcagctgccctgcatgagaaacacccacgtgcccagcagcagcgtgacccacagaatccccgtgtacccccacagagaggagcacggctacaccggcagctacaactacggcagctacggcaaccagcacccccaccccatgcagagccagtaccccgccctgccccacgacaccgccatcagcggccccctgcactacgccccctaccacagaagcagcgcccagtaccccttcaacagccccaccagcagaatggagccctgcctgatgagcagcacccccagactgcaccccacccccgtgacccccagatggcccgaggtgcccagcgccaacacctgctacaccagccccagcgtgcacagcgccagatacggcaacagcagcgacatgtacacccccctgaccaccagaagaaacagcgagtacgagcacatgcagcacttccccggcttcgcctacatcaacggcgaggccagcaccggctgggccaagtag

SEQ ID NO: 265868 - protein, 167 aa, Artificial Sequence
  derived and/or modified sequence
MAAAGAFRLRRAASALLLRSPRLPARELSAPARLYHKKVVDHYENPRNVGSLDKTSKNVGTGLVGAPACGDVMKLQIQVDEKGKIVDARFKTFGCGSAIASSSLATEWVKGKTVEEALTIKNTDIAKELCLPPVKLHCSMLAEDAIKAALADYKLKQEPKKGEAEKK

SEQ ID NO: 265869 - DNA, 504 bp, Artificial Sequence
  derived and/or modified sequence
atggccgcagcaggagcgtttcggctcagacgggcagcgagcgcactgctgttgagaagccccagattgccagctcgcgagctatctgcaccggcacgtctttatcacaagaaggttgtcgaccactatgaaaacccaagaaatgtggggagcctggataagactagcaaaaacgtgggcacaggactagtaggagcacctgcgtgtggggatgtaatgaagctgcagatccaggtggatgagaagggcaaaattgtggatgcccgattcaaaacgttcggatgcggctcagcaattgcctcatcctccctagcaactgagtgggtaaaaggcaagacggtggaagaagccctgaccataaaaaacaccgatatcgctaaagagctctgcctgccccctgtcaagctccattgcagcatgctggcagaagacgcgataaaagcagcattagcagattataaactcaaacaggaacctaagaaaggagaagctgaaaaaaagtag

SEQ ID NO: 265870 - DNA, 994 bp, Artificial Sequence
  derived and/or modified sequence
ggcgcaggcgcaagccggcaagatggcggcggctggggctttccgtctgaggcgggcggcatcggctctgctgctgcggagcccccgcctgcccgcccgggagctgtcggccccggcccgactctatcacaagaaggttgttgatcattatgaaaatcctagaaacgtggggtcccttgacaagacatctaaaaatgttggaactggactggtgggggctccagcatgtggtgacgtaatgaaattacagattcaagtggatgaaaaggggaagattgtggatgctaggtttaaaacatttggctgtggttccgcaattgcctccagctcattagccactgaatgggtgaaaggaaagacggtggaggaagccttgactatcaaaaacacagatatcgccaaggagctctgccttcctcccgtgaaactgcactgctccatgctggctgaagatgcaatcaaggccgccctggctgattacaaattgaaacaagaacccaaaaaaggagaggcagagaagaaatgagccctccctcggcgaagcctccagcaggccacaccagctgtttcccacctgctgtgcagtcaccttagatgttcagaagccgcttcctctccactgaagagctatgagatacgcacaatacttgctgttcacgttatgactctcatgcaagcaaaatacacagtttcattgttctgaatcctgtggtttctttcagcccacttttatcgccttaacctagttaatgtatattttgaattgtgtgtatgacctcagaactgaaattgataatgaagttgcaagttttgatagcccgtgaagtgcataagtatctaattttacctgaattgatttggggggaaattaccagtagaatgccttggtctgaatatttgatagaaccaattgttgtacataaaacagattgcgcatatatatatatgtataaaaaataataaaataatggaagatgatggtgttctctagtaa

SEQ ID NO: 265871 - DNA, 504 bp, Artificial Sequence
  derived and/or modified sequence
atggctgctgctggggccttccggctgcggcgggccgccagcgccctgctgctgcggagcccccggctgcctgcccgggagctgagcgccccagcccggctgtaccacaagaaggtggtggaccactatgagaaccccagaaatgtgggcagcctggacaagaccagcaagaatgtgggcaccggcctggtgggcgccccagcctgtggagatgtgatgaagctgcagatccaggtggatgagaagggcaagatcgtggatgcccgcttcaagaccttcggctgcggcagcgccatcgccagcagcagcctggccacagagtgggtgaagggcaagacagtggaggaggccctgaccatcaagaacacagacatcgccaaggagctgtgcctgccccctgtgaagctgcactgcagcatgctggctgaagatgccatcaaggccgccctggccgactacaagctgaagcaggagcccaagaagggggaggccgagaagaagtag

SEQ ID NO: 265872 - DNA, 504 bp, Artificial Sequence
  derived and/or modified sequence
atggccgccgccggcgccttccggctgcggcgggccgccagcgccctgcttctccgctccccaagactgccagctcgggagctctctgcccccgccagattataccacaagaaagtagtcgaccactacgagaatccaaggaatgtggggagtctagataaaaccagtaagaatgtgggcaccggtctggtgggtgcgcctgcctgtggcgatgtgatgaagcttcaaatccaagtcgacgaaaaaggaaagatcgttgatgccagattcaaaaccttcggctgtggaagcgccatagcaagcagctccctggctaccgaatgggtaaagggaaagactgtcgaggaggcccttactattaaaaacaccgacatcgccaaagagctgtgtttgccaccagttaagttacattgctccatgcttgctgaggacgctataaaggccgccctggccgactataaattaaagcaggaaccaaaaaaaggggaagccgagaagaagtag

SEQ ID NO: 265873 - DNA, 504 bp, Artificial Sequence
  derived and/or modified sequence
atggcagctgccggtgcattcagactgcgaagagcagcatcagccctgcttttgagaagtccccgtctgccagctagggaactgagtgcccctgcgcgtctgtatcacaaaaaggtcgtcgaccattatgaaaaccccagaaacgtcgggtctcttgataagacatcaaaaaacgtcggcaccggacttgtgggcgctccagcatgtggcgatgtgatgaagttgcagatccaagtggacgaaaagggcaagatcgtggacgccagattcaagacgttcggttgtggtagcgccattgcatcgtccagcctggccaccgaatgggtgaagggtaaaaccgtggaggaggccttaacaataaagaacacagacatcgccaaagaactgtgtctgcctcctgttaagctccactgctcgatgctggccgaagacgcgatcaaggcggcacttgcggactacaaactgaaacaggagccgaagaagggcgaagccgagaagaagtag

SEQ ID NO: 265874 - DNA, 504 bp, Artificial Sequence
  derived and/or modified sequence
atggccgccgccggcgccttcagactgagaagagccgccagcgccctgctgctgagaagccccagactgcccgccagagagctgagcgcccccgccagactgtaccacaagaaggtggtggaccactacgagaaccccagaaacgtgggcagcctggacaagaccagcaagaacgtgggcaccggcctggtgggcgcccccgcctgcggcgacgtgatgaagctgcagatccaggtggacgagaagggcaagatcgtggacgccagattcaagaccttcggctgcggcagcgccatcgccagcagcagcctggccaccgagtgggtgaagggcaagaccgtggaggaggccctgaccatcaagaacaccgacatcgccaaggagctgtgcctgccccccgtgaagctgcactgcagcatgctggccgaggacgccatcaaggccgccctggccgactacaagctgaagcaggagcccaagaagggcgaggccgagaagaagtag

SEQ ID NO: 265875 - protein, 913 aa, Artificial Sequence
  derived and/or modified sequence
MGDPDLLEVLAEEGEKVNKHIDYSFQMSEQSLSSRETSFLINEETMPAKRFNLFLRRRLMFQKNQQSKDSIFFRDGIRQIDFVLSYVDDVKKDAELKAERRKEFETNLRKTGLELEIEDKRDSEDGRTYFVKIHAPWEVLVTYAEVLGIKMPIKESDIPRPKHTPISYVLGPVRLPLSVKYPHPEYFTAQFSRHRQELFLIEDQATFFPSSSRNRIVYYILSRCPFGIEDGKKRFGIERLLNSNTYSSAYPLHDGQYWKPSEPPNPTNERYTLHQNWARFSYFYKEQPLDLIKNYYGEKIGIYFVFLGFYTEMLFFAAVVGLACFIYGLLSMEHNTSSTEICDPEIGGQMIMCPLCDQVCDYWRLNSTCLASKFSHLFDNESTVFFAIFMGIWVTLFLEFWKQRQARLEYEWDLVDFEEEQQQLQLRPEFEAMCKHRKLNAVTKEMEPYMPLYTRIPWYFLSGATVTLWMSLVVTSMVAVIVYRLSVFATFASFMESDASLKQVKSFLTPQITTSLTGSCLNFIVILILNFFYEKISAWITKMEIPRTYQEYESSLTLKMFLFQFVNFYSSCFYVAFFKGKFVGYPGKYTYLFNEWRSEECDPGGCLIELTTQLTIIMTGKQIFGNIKEAIYPLALNWWRRRKARTNSEKLYSRWEQDHDLESFGPLGLFYEYLETVTQFGFVTLFVASFPLAPLLALINNIVEIRVDAWKLTTQYRRTVASKAHSIGVWQDILYGMAVLSVATNAFIVAFTSDIIPRLVYYYAYSTNATQPMTGYVNNSLSVFLIADFPNHTAPSEKRDFITCRYRDYRYPPDDENKYFHNMQFWHVLAAKMTFIIVMEHVVFLVKFLLAWMIPDVPKDVVERIKREKLMTIKILHDFELNKLKENLGINSNEFAKHVMIEENKAQLAKSTL

SEQ ID NO: 265876 - DNA, 2742 bp, Artificial Sequence
  derived and/or modified sequence
atgggcgaccctgatttgttagaggtgttggccgaggaaggggagaaggtcaacaaacatatcgactacagcttccagatgtccgaacaaagcctgtctagccgcgaaaccagctttttgataaacgaggagaccatgcccgccaaaagatttaacctgttcctgcgacgcaggctcatgttccaaaaaaatcagcagtccaaggatagtatctttttccgcgacgggattcgacagattgacttcgtactcagctacgtggatgatgttaaaaaggacgccgagcttaaggccgaaaggcggaaggagttcgaaacaaatttgagaaagaccggattggaacttgagatcgaagacaagagggacagtgaagacggccgtacttacttcgtaaagatacatgccccttgggaggtcctggtgacttatgctgaagttttaggcatcaagatgccgattaaagagtctgatataccacgcccaaagcacacccctattagttacgtactcggcccagttaggctgcctctatcagtaaagtatccccaccctgagtacttcactgcccagttcagccgccatcgacaggaactttttttgattgaagatcaggccaccttcttcccaagctcgtcccgaaaccggatcgtgtactacatccttagccgatgcccctttggcatcgaagatggaaaaaagaggtttggcatcgagaggctcctaaattctaacacctactcctctgcttatccgctacacgatggccaatattggaagccttctgagcccccaaatcccaccaatgagaggtacactctgcaccagaattgggcccgcttcagttacttttataaggaacagcccctggatctcatcaagaattattacggggaaaagatcggcatctattttgtctttctgggcttttacaccgagatgctgttcttcgccgctgtcgttggcttagcttgctttatttacgggcttctctccatggaacacaatacctcctctaccgaaatctgcgaccccgagatcggcggtcagatgatcatgtgtcctttatgtgaccaggtttgtgactactggagattgaactcaacttgtctggctagcaaattcagccatttattcgataatgaatcgactgtgttctttgcgatcttcatggggatctgggtgaccctcttcctggaattttggaagcagcgacaagccagattggagtacgaatgggacctggtggatttcgaggaagaacagcagcagttgcagctgcgccctgaattcgaggccatgtgcaaacatcgcaagctgaacgccgtgaccaaagagatggaaccatatatgccattatatactcggatcccttggtacttcctatcaggggcaacggtcaccctctggatgagcttggtggtgacgtccatggttgcagtgattgtttacagactgtccgtctttgcaacgttcgcctcatttatggaatccgacgccagcctgaaacaggtgaagtctttcctgacccctcagatcaccaccagcctcacaggtagctgccttaactttatagtgatcctcatcctgaacttcttctatgaaaaaatatccgcgtggatcactaagatggagattccgcggacttatcaggagtatgaaagttctcttacactgaagatgtttctctttcaattcgttaatttttatagcagctgcttttacgtcgcctttttcaagggcaagtttgtgggatatccgggcaaatacacttatctgtttaacgagtggaggtctgaggagtgtgaccctggagggtgcctgattgaactgactacgcagttgaccatcatcatgaccgggaagcagatctttgggaacattaaggaggcaatatatcctcttgcactgaattggtggcgaagacgaaaagcaagaaccaacagcgagaagctttatagcaggtgggagcaggaccacgaccttgaaagtttcggacccctcggtttattctacgagtaccttgaaacagtgactcaattcggatttgtgacattattcgtagcctccttccctcttgccccgcttttagcccttattaataacattgtcgagataagggtagacgcctggaagcttaccacacagtataggcgcactgtagcgagtaaagcgcactcgataggggtttggcaggacatcctttacggcatggccgtgctgtcagtggctactaatgccttcattgtggcttttacttccgacataatcccaagactcgtgtactattacgcctactccaccaatgccactcagcccatgaccggctacgttaataattccttgtctgtgtttctgattgccgattttccaaaccacactgccccttctgaaaaaagagactttatcacatgccgctaccgcgactaccgataccccccagacgatgagaataaatatttccataacatgcagttttggcacgtgctcgccgcaaaaatgacattcattatagtgatggaacatgttgtctttctggtgaaatttttacttgcatggatgatccccgatgtgcccaaggatgtggtggagcgcatcaaaagagagaagctgatgacaatcaaaatactgcacgactttgaactgaataaactgaaggaaaacttgggaatcaattccaacgaattcgccaaacatgtgatgattgaggaaaacaaggctcagttggccaagagtacactgtag

SEQ ID NO: 265877 - DNA, 2742 bp, Artificial Sequence
  derived and/or modified sequence
atgggagaccctgacctgctggaggtgctggccgaggagggggagaaggtgaacaagcacatcgactacagcttccagatgtctgagcagagcctgagcagccgggagaccagcttcctgatcaatgaggagaccatgcctgccaagcgcttcaacctcttcctgcggcggcggctgatgttccagaagaaccagcagagcaaggacagcatcttcttcagagatggcatccggcagattgactttgtgctgtcctatgtggatgatgtgaagaaggatgctgagctgaaggccgagaggaggaaggagtttgagaccaacctgaggaagacaggcctggagctggagattgaggacaagagggacagtgaagatggccgcacctactttgtgaagatccacgccccctgggaggtgctggtgacctacgccgaggtgctgggcatcaagatgcccatcaaggagagtgacatcccccggcccaagcacacccccatctcctatgtgctgggccctgtgcggctgcccctgtctgtgaagtacccccaccctgagtacttcaccgcccagttcagccgccaccggcaggagctgttcctgattgaggaccaggccaccttcttccccagcagcagcaggaaccgcatcgtgtactacatcctgagccgctgccccttcggcattgaagatggcaagaagagatttggaattgagcggctgctgaacagcaacacctacagcagcgcctaccccctgcatgatggccagtactggaagcccagcgagccccccaaccccaccaatgaaagatacaccctgcaccagaactgggcccgcttctcctacttctacaaggagcagcccctggacctgatcaagaactactacggggagaagattggcatctactttgtgttcctgggcttctacacagagatgctgttctttgctgctgtggtgggcctggcctgcttcatctacggcctgctgtccatggagcacaacaccagcagcacagagatctgtgaccctgagatcggcggccagatgatcatgtgccccctgtgtgaccaggtgtgtgactactggaggctgaacagcacctgcctggccagcaagttcagccacctgtttgacaatgaaagcacagtgttctttgccatcttcatgggcatctgggtgaccctcttcctggagttctggaagcagaggcaggcccggctggagtatgagtgggacctggtggactttgaggaggagcagcagcagctgcagctgcggcctgagtttgaggccatgtgcaagcacaggaagctgaatgctgtgaccaaggagatggagccctacatgcccctgtacacccgcatcccctggtacttcctgagcggggccaccgtgaccctgtggatgagcctggtggtgacctccatggtggccgtgattgtgtaccgcctgtctgtgtttgccacctttgccagcttcatggagagtgatgccagcctgaagcaggtgaagagcttcctgaccccccagatcaccaccagcctgaccggcagctgcctgaacttcatcgtcatcctgatcctgaacttcttctatgagaagatcagcgcctggatcaccaagatggagatccccaggacctaccaggagtatgagagcagcctgaccctgaagatgttcctgttccagtttgtgaacttctacagcagctgcttctacgtggccttcttcaagggcaagtttgtgggctacccaggcaagtacacctacctgttcaatgagtggaggtctgaggagtgtgaccccggcggctgcctgattgagctgaccacccagctgaccatcatcatgaccgggaagcagatcttcggcaacatcaaggaggccatctaccccctggccctgaactggtggaggaggaggaaggcccggaccaacagcgagaagctgtacagccgctgggagcaggaccatgacctggagagctttggccccctgggcctcttctatgagtacctggagaccgtgacccagtttggatttgtgaccctgtttgtggccagcttccccctggcccccctgctggccctgatcaacaacatcgtggagatccgggtggatgcctggaagctgaccacccagtacagaagaacagtggccagcaaggcccacagcattggagtgtggcaggacatcctgtatggcatggctgtgctgtctgtggccaccaatgccttcatcgtggccttcaccagtgacatcatcccccggctggtgtactactatgcctacagcaccaatgccacccagcccatgacaggctacgtgaacaacagcctgagcgtcttcctgattgctgacttccccaaccacacagcccccagcgagaagagggacttcatcacctgccgctacagagactaccgctaccccccagatgatgagaacaagtacttccacaacatgcagttctggcacgtgctggccgccaagatgaccttcatcatcgtgatggagcacgtggtgttcctggtgaagttcctgctggcctggatgatcccagatgtgcccaaggatgtggtggagcgcatcaagcgggagaagctgatgaccatcaagatcctgcatgactttgagctgaacaagctgaaggagaacctgggcatcaacagcaatgaatttgccaagcacgtgatgattgaggagaacaaggcccagctggccaagagcaccctgtag

SEQ ID NO: 265878 - DNA, 2742 bp, Artificial Sequence
  derived and/or modified sequence
atgggcgaccccgacctgctggaggtgctggccgaggagggcgagaaagtgaacaagcatatagactatagcttccagatgtctgaacaaagtctaagcagtcgagagacctcgttccttatcaatgaggaaacaatgcctgctaagcgatttaatctgttcctcagacggaggctgatgtttcagaagaatcagcagagcaaagactctatcttcttccgcgatggaatccggcagatcgattttgtgctgtcatacgtggatgacgtcaagaaagacgccgaattgaaggctgagagaaggaaggagtttgagacaaacctgagaaagacaggcctggaattggaaatagaggataagcgggattccgaagacggtcgaacttacttcgtgaaaatccacgcaccctgggaggtgctggttacctatgcagaggtgcttggaattaaaatgcccataaaggaaagcgatattcctcggcccaagcatacaccaatctcatacgtgttgggacccgtaaggcttccgctgtcagtgaaatacccacaccccgagtacttcaccgctcagttcagcaggcaccgacaggagttgttcctgattgaagatcaggcgaccttttttcctagctcctctcgcaatcggatcgtatactacatcttaagccgctgcccatttggtattgaggacggcaagaaacggttcggcatcgaacggctgcttaacagcaatacctacagctccgcgtatcctctccatgacggccagtattggaaaccatctgaaccaccaaacccgacgaacgaaaggtataccctgcaccagaattgggcgaggtttagctatttttataaggagcagccgttggaccttatcaagaactattacggcgagaaaatcggcatctatttcgtctttttgggtttctataccgaaatgctgttcttcgccgcggttgtaggactggcctgctttatttacggactcctcagcatggaacacaacacctcttccacagaaatctgtgatccggagatcggagggcagatgatcatgtgccctttgtgtgatcaggtgtgcgattattggcgcctgaatagcacatgtctcgcgtctaaattttcacatctgtttgataacgaatctaccgtctttttcgcgatatttatggggatctgggtaacactatttctcgaattttggaaacaaagacaggcccggctggaatacgagtgggaccttgtggattttgaggaggagcagcagcagctccagctgcggccggaattcgaggcgatgtgcaaacataggaagttgaatgcggtgactaaggaaatggagccctatatgcccctgtatacccgcatcccttggtactttttgtctggcgccacggtgaccctgtggatgagcctcgtggtgacgtctatggtcgcagtgatcgtgtacaggctcagcgtgtttgccacgtttgcgtccttcatggaatccgacgccagcctcaaacaggtgaaatcctttctgaccccacagattacaacttctctgacgggatcatgcctcaacttcatcgtcatcctgatcctcaactttttttacgaaaagatttccgcatggattacgaagatggagatacctcgcacctaccaggagtatgaatccagcctgacgctgaagatgtttttattccagtttgtaaacttttactcatcatgtttttatgtagcgttcttcaaaggaaaattcgtcggctacccaggcaagtacacttacttgtttaatgaatggcgtagcgaagagtgtgatccaggggggtgtctgatcgagttgacaacccagctcacaattataatgacaggaaagcagatatttggaaacatcaaggaggccatatatccacttgctctcaactggtggcgacgtcggaaggcacggactaacagtgagaaattatattcgcgatgggagcaggaccatgatctggagtcctttgggcccctgggtctgttttatgaatatctcgagactgttacccagttcgggtttgtgactttattcgtagcgagcttcccattggctcctctcctggcattaatcaacaacattgtcgaaatcagagtcgacgcctggaaactgactacccaatatcgtcgtaccgtggcgtctaaggcacactccattggcgtttggcaggacatcctttacggaatggcggtgttgtccgtggcgactaacgctttcatagtagctttcacctcagatattattccaagacttgtttattactacgcttactcaactaacgctacacagcctatgacggggtatgtgaacaattccctctccgtttttttaatcgctgacttcccgaaccatactgctccaagcgaaaaacgagacttcattacgtgcaggtaccgcgactaccgctatcccccggacgatgagaataagtatttccacaatatgcagttttggcatgtcttggcagccaagatgacattcattattgttatggagcatgtagtgttcctagtcaagttcctattagcctggatgattccggatgttccgaaggatgtggtagagcgaattaaacgcgagaagttaatgaccatcaagatcctgcatgatttcgaattgaataaattaaaagagaatcttggcataaactctaatgagttcgctaagcatgtcatgatagaggagaataaagcacagctggctaagtcgactttgtag

SEQ ID NO: 265879 - DNA, 2742 bp, Artificial Sequence
  derived and/or modified sequence
atgggggaccccgatcttctggaggtactcgccgaggagggtgagaaggtgaataaacatatcgactacagcttccaaatgtccgagcagtctctgagctcccgtgaaacatcttttctgataaatgaggagacaatgcccgcaaagaggtttaatcttttcctgagacgtcgccttatgttccagaagaaccaacagtcgaaggactcaattttcttccgggatgggattagacagatcgacttcgtcctgtcctatgtcgatgatgtgaagaaggatgcagaactgaaggcagaaaggcgaaaagagtttgagaccaatctccggaagacaggccttgaactggaaattgaagacaagagggatagcgaggacggacgaacctatttcgtaaaaatacacgcaccgtgggaggtcttagtgacctatgcggaagttttaggaattaagatgcctatcaaagaaagtgacattcctagaccaaaacacactccaataagttatgtccttggcccagtcaggctccccttatccgtgaagtaccctcatcccgagtactttaccgctcagtttagtcgacaccgccaagaactctttctgattgaggaccaggctacattcttcccctcctcatcaaggaaccgcatcgtttactacatcctctctaggtgtcctttcggcatcgaagatggaaagaaaagatttggtatagagcgacttttgaattccaacacatactccagtgcatatccactgcacgatgggcagtattggaagccctcagaaccgccaaaccccacaaacgaacggtatactcttcaccagaattgggcaagattcagttacttttacaaggagcagcctctagatctgatcaagaactattatggcgagaagatcggaatctactttgttttcttgggattctacacggagatgctattttttgctgcagtggtgggactggcctgtttcatttacgggctgctgagcatggaacacaacacgtccagcaccgaaatttgcgatcctgaaatcggtggccagatgataatgtgtcccttatgtgaccaggtttgcgactactggcgcctgaactctacttgtttagcttccaagttcagccacctgttcgacaatgaatcgaccgtattctttgctatcttcatgggaatatgggttaccctatttttggaattctggaaacagcggcaagccagattggagtacgaatgggacctggtagacttcgaggaggagcagcagcagctgcagcttcgcccagaatttgaagccatgtgtaaacaccgaaaacttaacgctgtgaccaaggagatggaaccctacatgcccctgtatacacggattccttggtactttctgtctggtgccacagtgactttgtggatgtctctggttgtgacgtctatggtcgctgtaatagtatataggctctcagtttttgccactttcgcctctttcatggaaagcgatgcatcattaaaacaggtcaaatccttcctgacacctcagatcacaacaagcctcactggatcctgtttgaacttcatcgtgatactcattttaaactttttttacgagaagataagcgcttggatcactaagatggagattcctcggacataccaggaatacgagagctccttgacccttaaaatgtttttgtttcagttcgtgaacttctattcaagctgtttctatgtggctttttttaaagggaagtttgtgggctacccaggtaaatacacatatttgtttaatgagtggcgctccgaggagtgtgatcctggcggatgtctgattgagctcactactcagctaactatcatcatgaccggaaaacagatcttcggcaatatcaaagaagctatttacccacttgccttaaattggtggcgccgaagaaaagcccgtacaaactccgaaaagctatattccaggtgggagcaggatcatgatctggagagttttggccctcttgggttattctacgaatacctggaaacagtcacccaattcgggttcgtcacactgtttgtggctagttttccacttgctcctctgctggcactgatcaacaacattgtggagatacgcgtggatgcctggaagctgaccacccaatatcgaagaaccgtcgcctcaaaggcccacagcatcggcgtgtggcaggacatcttatatggaatggctgtcctcagcgttgctactaatgcatttatcgtggctttcacctccgacatcattccaaggctggtgtactactatgcttattcaacaaatgctacccagcccatgacaggttacgtcaacaatagcctctccgtgtttttaattgctgattttccaaatcacacagcccctagtgagaagagagactttattacctgtagataccgagactacaggtacccacccgacgatgaaaataaatatttccataatatgcaattttggcacgtcctggccgctaagatgactttcataatcgtaatggaacacgtcgtgtttctagtgaaattcctgcttgcctggatgatcccggatgtccctaaggatgtggtcgaaagaattaaacgggagaagctcatgactattaaaatactgcatgacttcgagctcaataagctgaaagagaatctggggatcaactctaacgagttcgccaagcacgtaatgattgaagagaacaaagctcaattagcaaagtccaccctttag

SEQ ID NO: 265880 - DNA, 6651 bp, Artificial Sequence
  derived and/or modified sequence
agagcgcccaggagcgctaccggctgagggtggggaagcgcagggccaagcgcgcgaagcaggttgtgggggaccgggtcgagtggaagtacccgccggagaggaaggccggctggctgtggcgcccagagacggtggagtccgaggaggaggagaaggaggcctgcagaaggaagagcaggcccttagaagtccagcagcagcaactccggcggcccacagtcagattcagcacctgcctcagatctccacgtctgtctcagctgcccctctcctgctgcctctcaggcaccagtgccattaacgagctggcgaagatgggcgacccggatctcctggaagtgttggcggaggaaggggaaaaagtcaataagcatatagactactctttccaaatgagtgagcagagcctgagcagcagagagaccagctttctcatcaatgaagaaacaatgcctgcaaagcgattcaatttgttcctgaggcggcggcttatgtttcaaaaaaatcagcaaagcaaagattctatcttcttccgagatgggattaggcaaattgattttgtgctttcctacgttgatgatgtaaagaaagacgcagagttaaaggcggaaagaagaaaagagtttgaaactaatctcagaaaaacaggtcttgagttggaaatagaagacaaaagggactcggaagatggaagaacttattttgtcaagatccatgccccttgggaggtattagttacctatgctgaagtcttgggaatcaaaatgcctattaaggagagtgatattccccgccctaagcacactcctataagctatgtgcttggacctgtaagactcccactgagtgtgaagtatccccatcctgaatattttactgcacaattcagcagacatcggcaggagctcttcctcatcgaagatcaggcaaccttctttccatcctcatcaagaaacagaattgtgtactatattctctcaagatgtccttttggcatagaagatgggaagaaaaggtttgggattgaaagactgctaaactctaacacttactcatctgcctatccactccatgatggccaatattggaagccatcagaacctcccaatcctaccaatgaaagatacacacttcaccagaattgggctcgattttcctatttctacaaggagcagcctttagacttgattaagaattattatggagaaaaaattggtatctattttgtctttcttggattttacacagaaatgctattctttgcagctgtagttggcttagcttgttttatttatggcttattatcaatggaacataacacaagcagcactgaaatctgtgaccctgagattggtggtcagatgatcatgtgcccactctgtgatcaagtgtgtgattattggagactaaatagtacgtgtttggcttcaaagttctcccatttgtttgataatgagtcaacagtgttctttgcaatattcatgggaatttgggtcaccttatttttggagttttggaaacaacgacaagccagactggaatatgaatgggacctggtggactttgaagaggaacagcagcagcttcagctgagaccagaatttgaagctatgtgtaaacacaggaaattgaatgcagtgactaaggagatggaaccttacatgcctctatacacgcgtattccatggtactttctttcaggagccacagtgacattatggatgtctcttgtcgtcaccagtatggtagctgtaattgtgtaccgcctgtcagtctttgctacatttgctagtttcatggaaagtgatgcatccttaaagcaggtcaaaagcttccttactcctcagataaccacatcactcacaggatcatgcttgaactttattgtcatcttgatcttgaatttcttttatgaaaagatatctgcctggatcacaaaaatggaaattcctcgaacataccaggagtatgagagcagtcttaccttgaaaatgttcctgtttcagtttgtaaatttttactcatcctgcttctacgtagctttctttaaagggaagttcgtaggctatcctggaaaatacacatatttatttaatgagtggagaagtgaagagtgtgatcctggaggctgtcttatagaattgacaacccaattgaccattataatgaccgggaaacagatttttggaaacattaaagaagccatttatcccttggctttgaattggtggagacgccgaaaagctcggacaaactctgagaagctgtatagtcgatgggagcaggatcatgaccttgaaagttttggaccccttgggcttttctatgagtacttagaaacagttactcaatttggatttgttacactatttgtggcctcttttcctttggctcctcttcttgctctcataaataatattgtagagattcgagtggatgcctggaaacttaccactcaatacaggagaactgtagcttctaaagctcatagcataggtgtttggcaagacattctttatggaatggctgtcctttctgttgcaactaatgcctttattgttgcatttacgtcagacatcattccccgtctagtttactactatgcttactcaacaaatgccacacagcctatgacaggatatgtgaataatagcctgtcagtattcctgatagctgattttccaaaccacactgcaccttcggaaaaacgagacttcatcacttgcaggtacagagattacagatatcctcctgatgacgagaataaatattttcataatatgcaattctggcatgtccttgctgccaagatgaccttcatcattgttatggaacatgttgtgtttttagttaaatttttgctggcctggatgatacctgatgttccaaaagatgttgtggagagaatcaagagagaaaagttaatgactatcaagattctccatgattttgagctcaacaaattaaaagagaacttgggaattaattctaatgaatttgccaagcatgtcatgattgaggaaaacaaagcacagctggctaaatcaacactctaatcagtatagtgaggaagcagcaggtgatctgccttacttcactttatcctctggttttagggccagacgccagaagccatgtgtcaattttaccctttcttttttttttttttctttttttttttaaactcaaagtttttatacacttttatagaggccaactttgtgatgttggaaatgtactacttctctgcttcattgactgggccctctccagatgttgttttctgaggtgctgtaaatgactgttgaaagtgcaggtagaatcagaatactgggaaattatggagtcttgcagtttagtaagaaacactggccttgggctgtcccatcactttccagtgcatctatttatttttgtggtcttctcttgggttatttgatacctccttccccattaagaaaaatgttggggcaaaaagaaatggatcaaagagactgactgagccctatatatcctatcattttaaaatatgcaaatgaattgccaagatcagatgacataagaaaactcacacattaaggtgttaatgtatcatagcagaggtttattcctaacacattcaactaccatcagaatcccagatagttcttcctggtaaaggcagaattccttttctcgagactgaaattttgggtttcaacataaaacaacttggttcttagagataataatttggttataatagtttcaagactgatcttatctggaaagcaacattatgaagctgttagattgcttcaggttctcaagcaaagacacaatacagaagtaaatgtgttttcttagtagttaatggatgcaggacaatgtatattgattaatttgttgattttaatttagaaaattgttaaattatttcttaaaaatcacttttcttctggaatgccaatttcacatcatgaagcctttttgtataagttagatacgagttgtttatgataaacatttctttgctttaaaataattgcaaatattttaataagtttacaaccttttctattgatgtatcatcttatacaatgctcagtgccttgttccaatacctctgacacacaagaagtcatgttgttagctagtgatttgatgtgatgtaacatcttaaatgtaagcttgtcttaatgaaattgtcagtgtaataacaactacagtcttgaaaaccaaaagtgaatcaaccaactaagaatgagttcatggacttaataatctaagggggaaaaaatgtttgttgaattattcctctcaaatttaggcttgtgttacatgcacaaaaatccttgttctgttttcacttaaaaaaactaaatatgtataactttgtgtatacacacacacacatctatatatataattattagcactagagggatatagtccagttatgtagtatttaaatctccagtttcaaattataattcacctccaaaagaatagttttttaatcacacacataagaaattttatcacaatatttaaaactaatatttcattatctaatgctaataaattattgtggtactgccagtattaaatatatggcagatggtattaactactgatcaatagtaagcatacagaactggggattatggattttataaactatgagacagtcaccccagtttggactgggactaatccccagtactgatttgtcatccactgagtagactttatgaatattttgggtaatttgaaatgatctcattattgaaagatgatttcatatgtagagaagataatatttctttcttgaaaaaacaagtcaggcttaccatgatgtgtgcaaccaatgtaggatctttggcttgtcaaatcagattctccattgctatagtgtacagtgcacacagctcatattgcttccttcctgggtgctgataaaaataagaaagagcatggaaattggtttcttgaatataagctttaatttttaaggcttaaaagtattcatagaggtagactgtatgataaataaaaacaaatttaattcacaaagttatctgtacactgcagttttaaaatataccaactaaattattgggtttctggaagtgaatggagaaaacagcaagggaagaaatcgtttttaagataagtaaataattcccatggattgataaatattttccttttaaaatgttatggactgatattttttattcacctttaaatttcttatcaagaagtttatctttgtttttcagatttaaaaatgaaatacaggtattcgtcactttcctgaaaccatgctaaccaaaatcagtagccaaaccaattcagatagatgtgtctcatctaattaaacccattggtttttatgggagggctgcattaagagcacccaaccaccacatgtaagttgataattaccagcatggcaggtgattttatctgctgaccaagcgcatagttttgttttgttttcagaatgttctagggaacatttgagattttatgtgaaataaaattttaagtgccaaagccaaaaaaatacttaactcttttcaaaggccctctttcatccttgccttcgtcaactttcctttgcacacaggaagcaaaatctacttcaagacatttattttagaggaatccattaagaaaggattgttttacttaaatgaaatgctgtcttatttttgctgtgtcttttgacacctcttagctttaacattcttcttttaaccaagccattatgcaaagttatcaaagaagaggagaaggaaaggaggacagatgaaagtgacgggaaatgagaaagaagaggagtgaggaaacagttatttccttatgaatcctgtgtgtttctttggaagaaagagctgttccgaggaagtttggtccagctgtggttgataagaggtatatctcttaaaaaagacacctaatgaaagtgagagaaaagctaaagaaaatttcaatgtgaccactattatgtgtcaaaataaaacttagattccaaagtggttttgtagtgttgggtgctatgagtaggtatggatctctgttgattgactccagttgaaggtgagaaatctgtaccaatcattcaaaaagggaatctattgttttgaaagaaactctctcatatttcctttaaattgttaatagttgttatgcaactaaagaatgttatgaagaaaaatagcattgcaaaaagtaccattggccagccttacaagtcagccacaatgagtcggtataactactgtgttattctttttctagacaaattttgactcttctacttttatgtgtaataattccagtattctatttatttcagcattatgtgaaaaatgataagaatgttaaaaagaaaataatagtgtggtttaattggtatgagatacctgcttcctcctcctcaaaggtttgactgggtgtatctctcctatgtgtgacattatgtctcctggtgttaacacaggaaatgagtgctcctttttaaaatttctttcttccaagtttttttttccaggaagagaaatatgcagttatgcaggaaaagctctcttaaataatgtgtacataaatctcaagagaatcaaattcacagagtgaataaagtaataatattaaactaca

SEQ ID NO: 265881 - DNA, 2742 bp, Artificial Sequence
  derived and/or modified sequence
atgggcgaccccgacctgctggaggtgctggccgaggagggcgagaaggtgaacaagcacatcgactacagcttccagatgagcgagcagagcctgagcagcagagagaccagcttcctgatcaacgaggagaccatgcccgccaagagattcaacctgttcctgagaagaagactgatgttccagaagaaccagcagagcaaggacagcatcttcttcagagacggcatcagacagatcgacttcgtgctgagctacgtggacgacgtgaagaaggacgccgagctgaaggccgagagaagaaaggagttcgagaccaacctgagaaagaccggcctggagctggagatcgaggacaagagagacagcgaggacggcagaacctacttcgtgaagatccacgccccctgggaggtgctggtgacctacgccgaggtgctgggcatcaagatgcccatcaaggagagcgacatccccagacccaagcacacccccatcagctacgtgctgggccccgtgagactgcccctgagcgtgaagtacccccaccccgagtacttcaccgcccagttcagcagacacagacaggagctgttcctgatcgaggaccaggccaccttcttccccagcagcagcagaaacagaatcgtgtactacatcctgagcagatgccccttcggcatcgaggacggcaagaagagattcggcatcgagagactgctgaacagcaacacctacagcagcgcctaccccctgcacgacggccagtactggaagcccagcgagccccccaaccccaccaacgagagatacaccctgcaccagaactgggccagattcagctacttctacaaggagcagcccctggacctgatcaagaactactacggcgagaagatcggcatctacttcgtgttcctgggcttctacaccgagatgctgttcttcgccgccgtggtgggcctggcctgcttcatctacggcctgctgagcatggagcacaacaccagcagcaccgagatctgcgaccccgagatcggcggccagatgatcatgtgccccctgtgcgaccaggtgtgcgactactggagactgaacagcacctgcctggccagcaagttcagccacctgttcgacaacgagagcaccgtgttcttcgccatcttcatgggcatctgggtgaccctgttcctggagttctggaagcagagacaggccagactggagtacgagtgggacctggtggacttcgaggaggagcagcagcagctgcagctgagacccgagttcgaggccatgtgcaagcacagaaagctgaacgccgtgaccaaggagatggagccctacatgcccctgtacaccagaatcccctggtacttcctgagcggcgccaccgtgaccctgtggatgagcctggtggtgaccagcatggtggccgtgatcgtgtacagactgagcgtgttcgccaccttcgccagcttcatggagagcgacgccagcctgaagcaggtgaagagcttcctgaccccccagatcaccaccagcctgaccggcagctgcctgaacttcatcgtgatcctgatcctgaacttcttctacgagaagatcagcgcctggatcaccaagatggagatccccagaacctaccaggagtacgagagcagcctgaccctgaagatgttcctgttccagttcgtgaacttctacagcagctgcttctacgtggccttcttcaagggcaagttcgtgggctaccccggcaagtacacctacctgttcaacgagtggagaagcgaggagtgcgaccccggcggctgcctgatcgagctgaccacccagctgaccatcatcatgaccggcaagcagatcttcggcaacatcaaggaggccatctaccccctggccctgaactggtggagaagaagaaaggccagaaccaacagcgagaagctgtacagcagatgggagcaggaccacgacctggagagcttcggccccctgggcctgttctacgagtacctggagaccgtgacccagttcggcttcgtgaccctgttcgtggccagcttccccctggcccccctgctggccctgatcaacaacatcgtggagatcagagtggacgcctggaagctgaccacccagtacagaagaaccgtggccagcaaggcccacagcatcggcgtgtggcaggacatcctgtacggcatggccgtgctgagcgtggccaccaacgccttcatcgtggccttcaccagcgacatcatccccagactggtgtactactacgcctacagcaccaacgccacccagcccatgaccggctacgtgaacaacagcctgagcgtgttcctgatcgccgacttccccaaccacaccgcccccagcgagaagagagacttcatcacctgcagatacagagactacagatacccccccgacgacgagaacaagtacttccacaacatgcagttctggcacgtgctggccgccaagatgaccttcatcatcgtgatggagcacgtggtgttcctggtgaagttcctgctggcctggatgatccccgacgtgcccaaggacgtggtggagagaatcaagagagagaagctgatgaccatcaagatcctgcacgacttcgagctgaacaagctgaaggagaacctgggcatcaacagcaacgagttcgccaagcacgtgatgatcgaggagaacaaggcccagctggccaagagcaccctgtag

SEQ ID NO: 265882 - protein, 471 aa, Artificial Sequence
  derived and/or modified sequence
MDSAPLFPRPHLFQNLLLFLWALLNCGLGVSAQGPGEWTPWVSWTRCSSSCGRGVSVRSRRCLRLPGEEPCWGDSHEYRLCQLPDCPPGAVPFRDLQCALYNGRPVLGTQKTYQWVPFHGAPNQCDLNCLAEGHAFYHSFGRVLDGTACSPGAQGVCVAGRCLSAGCDGLLGSGALEDRCGRCGGANDSCLFVQRVFRDAGAFAGYWNVTLIPEGARHIRVEHRSRNHLALMGGDGRYVLNGHWVVSPPGTYEAAGTHVVYTRDTGPQETLQAAGPTSHDLLLQVLLQEPNPGIEFEFWLPRERYSPFQARVQALGWPLRQPQPRGVEPQPPAAPAVTPAQTPTLAPDPCPPCPDTRGRAHRLLHYCGSDFVFQARVLGHHHQAQETRYEVRIQLVYKNRSPLRAREYVWAPGHCPCPMLAPHRDYLMAVQRLVSPDGTQDQLLLPHAGYARPWSPAEDSRIRLTARRCPG

SEQ ID NO: 265883 - DNA, 1496 bp, Artificial Sequence
  derived and/or modified sequence
ggtggctctatggactcggcccctctgttccccaggccccacctcttccagaacctcctgctcttcctgtgggccctgctgaactgtggtttgggggtcagtgctcagtagggtccgggcgagtggaccccgtgggtgtcctggacccgctgctccagctcctgcgggcgtggcgtctctgtgcgcagccggcgctgcctccggcttcctggggaagaaccgtgctggggagactcccatgagtaccgcctctgccagttgccagactgccccccaggggctgtgcccttccgagacctacagtgtgccctgtacaatggccgccctgtcctgggcacccagaagacctaccagtgggtgcccttccatggggcgcccaaccagtgcgacctcaactgcctggctgaggggcacgccttctaccacagcttcggccgcgtcctggacggcaccgcctgcagcccgggtgcccagggggtctgcgtggctggccgctgccttagcgccggctgtgatgggttgttgggctcgggtgccctcgaggaccgctgtggccgctgcggaggcgccaacgactcgtgccttttcgtgcagcgcgtgtttcgtgacgccggtgccttcgctgggtactggaacgtgaccctgatccccgagggcgccagacacatccgcgtggaacacaggagccgcaaccacctggcactgatggggggcgatgggcgctacgtgcttaatgggcactgggtggtcagcccaccagggacctacgaggcggccggcacgcatgtggtctacacccgagacacagggccccaggagacattgcaagcagccgggcccacctcccatgacctgctcctacaggtcctcctgcaggagcccaaccctggcatcgagtttgagttctggctccctcgggagcgctacagccccttccaggctcgtgtgcaggccctgggctggcccctgaggcagcctcagccccggggggtggagcctcagccccccgcagcccctgctgtcacccctgcacagaccccaacgctggccccaggcccgagtgctgggccaccaccaccaggcccaggagacccgctatgaggtgcgcatccagctcgtctacaagaaccgctcgccactgcgggcacgcgagtacgtgtgggcgccaggccactgcccctgcccgatgctggcaccccaccgggactacctgatggctgtccagcgtcttgtcagccccgacggcacacaggaccagctgctgctgccccacgccggctacgcccggccctggagccctgcggaggacagccgcatacgcctgactgcccggcgctgtcctggctgagcccctgcaggagccccggccacacacagcaagaaagatacatctgaccagcctcaacgtcaacgtatttcccctctcaccctggcttccaggcagctctgaaatacgtcccacctgtgcagctatgtgactccctcccacacacgct

SEQ ID NO: 265884 - DNA, 1416 bp, Artificial Sequence
  derived and/or modified sequence
atggattctgcccctctgttcccgaggccccatctgttccaaaacttattattgttcctgtgggccctgctgaactgcggcctcggcgtatccgcccagggccctggagagtggaccccttgggtgagctggacaagatgttcatctagttgtgggagaggcgtgagtgtgagatcacgtcgctgcttaagactgccgggagaagagccctgttggggcgattcacacgagtatcgcttgtgtcagctgcccgattgcccaccaggcgctgtcccatttagagacctccagtgtgccctctacaacggaagacccgtgctcggaactcagaaaacataccagtgggttccctttcatggcgctcccaatcagtgtgatctgaactgcctggcagagggacatgccttttaccattcttttggtcgggtgctggacggaaccgcatgctcaccgggtgcccaaggtgtgtgtgtcgcagggaggtgcctcagtgcagggtgcgacgggctcttagggagtggggctcttgaggatcgatgcggaaggtgcgggggagccaatgatagctgtttgtttgtccagcgggtgttcagagacgctggtgctttcgccggttattggaacgtgacactgatccctgagggcgcaagacatattcgggtggaacaccgttctcgaaatcacttggcactcatgggaggggatggcagatacgtgctgaacggccattgggtcgtctccccaccaggcacatacgaggctgctggcacccatgttgtgtatacacgggatactgggccacaggaaaccctccaggccgctggtcccacttcccacgacctcctgctgcaggtgctgctgcaggaacccaatccaggcatcgagttcgaattctggttgcccagagagagatattcaccttttcaggcaagggtgcaggccctgggctggccccttcgacagccccagcccagaggcgtggagccacagccgccagccgcacctgccgtgactccagcacagacacccacactagcccctgacccatgccctccctgcccggacacccgcggtcgcgcacaccggcttttacactattgcgggtccgactttgtctttcaggcacgcgtcctagggcatcatcatcaggctcaggagacacggtacgaagtccgcatacagctcgtttacaaaaaccgaagtccattgcgagctagagagtatgtgtgggctccaggccactgtccctgtcccatgctggctccccaccgtgattatctcatggcagtgcagaggctcgtgtctcctgacgggacacaggaccaattgctgctcccccatgccggatatgcccgtccttggtcccccgctgaagattcacgcatacgtcttacagccagacgctgccccggttag

SEQ ID NO: 265885 - DNA, 1416 bp, Artificial Sequence
  derived and/or modified sequence
atggatagcgctcctctgtttccccgaccccacctgtttcagaatctcttactgttcctctgggccttgctgaactgcggcctcggtgtgagcgcccagggcccaggggaatggacgccctgggttagttggactcgatgcagctcttcttgtggcaggggtgtgtcagtccgaagcaggcggtgtctgaggctgcccggagaggaaccttgctggggggacagccacgaatatcgtctgtgtcaactgcccgattgtccaccaggcgctgttcctttccgcgacctgcaatgcgctttgtacaatggccgtcccgttttggggactcaaaagacataccagtgggtgccttttcacggcgcaccaaatcagtgcgaccttaattgcctcgcagagggccacgctttttaccattccttcggaagagttctcgatggcaccgcttgttcacccggggctcagggcgtatgcgtcgctgggcgatgcctgtctgctggttgtgatggactattaggatctggagcactggaagacagatgtgggcgatgcggtggcgcaaacgactcctgtctgtttgttcagcgggttttcagagatgccggagctttcgcggggtactggaacgtgaccctgatccccgaaggtgcccgccacatcagggttgagcatcggagcaggaaccacctggcgctgatgggcggagacgggaggtatgttctgaacggccactgggtcgtcagccccccaggaacctacgaggctgctggaacgcacgttgtatatacacgtgatactggaccacaggaaacattgcaggctgccgggcccacctctcatgatcttctgctgcaggtgctattacaggaacctaatcccggcatcgagttcgaattttggttgcctcgcgaacgttacagcccttttcaagcacgtgtgcaggcattaggttggcctcttagacagccccagccacgcggtgtggagccccagccccccgcggcccccgccgtgacacccgcacagacaccaaccctcgccccagacccttgtcccccctgtccagatacacgggggcgagcccacagattattgcactactgcggctccgatttcgttttccaagccagggtcctaggacatcaccaccaggcacaggaaacccggtacgaagtgaggatccagctggtttataagaaccggtcaccactgcgagctcgtgagtatgtatgggctcctgggcattgtccttgtcccatgcttgccccccacagagactacctgatggcagtccagcggttagttagcccagacggaactcaggatcagctgctgctcccccacgctgggtacgccagaccttggtctccggcagaagactccagaatccgcttgaccgctaggagatgccccgggtag

SEQ ID NO: 265886 - DNA, 1416 bp, Artificial Sequence
  derived and/or modified sequence
atggactcagccccccttttcccacggccccatctttttcaaaatctgttattatttctgtgggcgctcttaaattgtggcctcggagtgagcgcccaaggacccggagagtggaccccatgggtgtcttggacacggtgtagctcgtcatgcgggcgcggagtatcagtccgtagcaggaggtgcctgaggctaccaggtgaggagccatgctggggtgattcacacgaatacagactttgccaactgcccgactgcccgcctggcgccgtgccctttcgcgatttgcaatgtgcgctctacaatggtcggcccgtactgggtacacagaagacttaccagtgggttccttttcacggtgctccaaatcaatgtgacctcaactgcttggccgaaggccatgccttctaccattcctttggacgcgtcctcgatggcaccgcttgctctcctggtgctcagggcgtgtgtgttgctggcagatgtctgagtgccggatgcgatggactgcttggcagtggcgctctagaagaccggtgcgggagatgcggtggtgccaatgatagttgtctctttgtccaacgcgtatttcgtgatgcaggtgcttttgccgggtattggaatgtaaccctcatcccagaaggtgcacgacatattagagtcgaacacagatcaaggaatcacctagccctaatgggtggcgacggcaggtacgtgctaaacggacactgggtcgtttctcctccgggaacctacgaggccgcggggactcatgtggtttatacccgggataccgggccacaggaaacactacaggcagccggaccaacttcccacgaccttctgctacaggttctactgcaggaaccaaatccaggcatagagtttgaattttggttaccgagagaacgctattcccctttccaagctcgggtccaggcactgggatggccactccggcagccccagccacgcggggtggaaccgcagcctcccgccgcccccgccgtcacccctgcccagacacccacgctcgcaccagacccttgtcccccttgtcccgacaccagaggccgtgcacatcgactcctccactactgcggttccgatttcgtctttcaggcccgagtgctgggccaccaccaccaagcccaggagacaagatacgaagtccgcattcagcttgtttataagaacaggtcaccattgagagcgagagagtatgtttgggcccccggtcactgcccatgccccatgttagctccccaccgcgattacctgatggctgtccaaagacttgtctccccagatggaacacaagaccagttgcttctccctcatgctggatacgccaggccctggtcccccgcggaggattcacgtattcggttaactgcccgacgatgcccgggatag

SEQ ID NO: 265887 - DNA, 1416 bp, Artificial Sequence
  derived and/or modified sequence
atggacagcgcccccctgttccccagaccccacctgttccagaacctgctgctgttcctgtgggccctgctgaactgcggcctgggcgtgagcgcccagggccccggcgagtggaccccctgggtgagctggaccagatgcagcagcagctgcggcagaggcgtgagcgtgagaagcagaagatgcctgagactgcccggcgaggagccctgctggggcgacagccacgagtacagactgtgccagctgcccgactgcccccccggcgccgtgcccttcagagacctgcagtgcgccctgtacaacggcagacccgtgctgggcacccagaagacctaccagtgggtgcccttccacggcgcccccaaccagtgcgacctgaactgcctggccgagggccacgccttctaccacagcttcggcagagtgctggacggcaccgcctgcagccccggcgcccagggcgtgtgcgtggccggcagatgcctgagcgccggctgcgacggcctgctgggcagcggcgccctggaggacagatgcggcagatgcggcggcgccaacgacagctgcctgttcgtgcagagagtgttcagagacgccggcgccttcgccggctactggaacgtgaccctgatccccgagggcgccagacacatcagagtggagcacagaagcagaaaccacctggccctgatgggcggcgacggcagatacgtgctgaacggccactgggtggtgagcccccccggcacctacgaggccgccggcacccacgtggtgtacaccagagacaccggcccccaggagaccctgcaggccgccggccccaccagccacgacctgctgctgcaggtgctgctgcaggagcccaaccccggcatcgagttcgagttctggctgcccagagagagatacagccccttccaggccagagtgcaggccctgggctggcccctgagacagccccagcccagaggcgtggagccccagccccccgccgcccccgccgtgacccccgcccagacccccaccctggcccccgacccctgccccccctgccccgacaccagaggcagagcccacagactgctgcactactgcggcagcgacttcgtgttccaggccagagtgctgggccaccaccaccaggcccaggagaccagatacgaggtgagaatccagctggtgtacaagaacagaagccccctgagagccagagagtacgtgtgggcccccggccactgcccctgccccatgctggccccccacagagactacctgatggccgtgcagagactggtgagccccgacggcacccaggaccagctgctgctgccccacgccggctacgccagaccctggagccccgccgaggacagcagaatcagactgaccgccagaagatgccccggctag

SEQ ID NO: 265888 - DNA, 2857 bp, Artificial Sequence
  derived and/or modified sequence
cgctcgcgtccgccgggcagtcccctgccgcagatccgcgcccgccgcgcgagggcgcccggggccgccgcccctcctgacccgggcctgggcgcgcctgcggaggccgcggtgggagggaccgtcccaggctccccaccccgcccagcaccttgggccccgccgcttccgctcgccctggggccgctcagggagccgggacgcgctgcctgggctccgcgcagccgatgacattctgagttcttcctctccataccgggctccacgtctcctgtcttctttacctgatccacaggacccctcaactttcctgtaagggaggctctattaccccgtttttcagagacgagaggtagggctcagagaggtttagttactttccaagatcacacagccagtcagggcagagccgggacacaaccctgtgtctctggcggtggctctatggactcggcccctctgttccccaggccccacctcttccagaacctcctgctcttcctgtgggccctgctgaactgtggtttgggggtcagtgctcagggtccgggcgagtggaccccgtgggtgtcctggacccgctgctccagctcctgcgggcgtggcgtctctgtgcgcagccggcgctgcctccggcttcctggggaagaaccgtgctggggagactcccatgagtaccgcctctgccagttgccagactgccccccaggggctgtgcccttccgagacctacagtgtgccctgtacaatggccgccctgtcctgggcacccagaagacctaccagtgggtgcccttccatggggcgcccaaccagtgcgacctcaactgcctggctgaggggcacgccttctaccacagcttcggccgcgtcctggacggcaccgcctgcagcccgggtgcccagggggtctgcgtggctggccgctgccttagcgccggctgtgatgggttgttgggctcgggtgccctcgaggaccgctgtggccgctgcggaggcgccaacgactcgtgccttttcgtgcagcgcgtgtttcgtgacgccggtgccttcgctgggtactggaacgtgaccctgatccccgagggcgccagacacatccgcgtggaacacaggagccgcaaccacctggcactgatggggggcgatgggcgctacgtgcttaatgggcactgggtggtcagcccaccagggacctacgaggcggccggcacgcatgtggtctacacccgagacacagggccccaggagacattgcaagcagccgggcccacctcccatgacctgctcctacaggtcctcctgcaggagcccaaccctggcatcgagtttgagttctggctccctcgggagcgctacagccccttccaggctcgtgtgcaggccctgggctggcccctgaggcagcctcagccccggggggtggagcctcagccccccgcagcccctgctgtcacccctgcacagaccccaacgctggccccagacccctgcccaccctgccctgacacccgcggccgcgcccaccgactactccactattgcggcagtgactttgtgttccaggcccgagtgctgggccaccaccaccaggcccaggagacccgctatgaggtgcgcatccagctcgtctacaagaaccgctcgccactgcgggcacgcgagtacgtgtgggcgccaggccactgcccctgcccgatgctggcaccccaccgggactacctgatggctgtccagcgtcttgtcagccccgacggcacacaggaccagctgctgctgccccacgccggctacgcccggccctggagccctgcggaggacagccgcatacgcctgactgcccggcgctgtcctggctgagcccctgcaggagccccggccacacacagcaagaaagatacatctgaccagcctcaacgtcaacgtatttcccctctcaccctggcttccaggcagctctgaaatacgtcccacctgtgcagctatgtgactccctcccacacacgcttaagacacctctgcatgcagtcaaagccactgtcacaagccggcaggcactggtgaggaggcactaaggagactctgacttttatttcgcctctctccttggctgccaggaagctcatagctatttatactcagaaagtttaacgctgctttctttctctttgcgcgcgtcacacttgcttggagacactgtcatgaacgagcatgacaccctgctgccctgggtacccagaagatcatctgtttacttcccagacactgtgctgtctctgctctctgctactcacacacaccctcatgtgtgaagggcagagacactgtcacaaacaggcatgccccttagaagacatgcctaaccaggcactgtaacgtaccaacgtaccaatttccccttttcccctggctaccaggaaactcggagacaatcttttcagcctcagcatttctggctggatttccacccatcaacacgtgcttgctcctcctttttttttttttctgaggtagacccttgctctgtcacctaggctgaagtgcggtggtgcaatcatggctcactgcagcctcaaattcctgggctcaagcgatcctcccacctcagcctccacagcagctggaactccaggtgtgaatcaccatgcccggctaacttttaaattttttgtagagatggggtcttgctacgttgcccacactgctctccaactactggcctcaaacgatcctcctgcctcggcctcccaaagcactggaatttcaggcatgcactatcgtactggctgttcaccccccttttattcctctttaatttttacaagcactttttaaaaaaaaattttactttaagttc

SEQ ID NO: 265889 - DNA, 1416 bp, Artificial Sequence
  derived and/or modified sequence
atggattctgctccccttttccctagaccacatctcttccagaatttgctgctttttctgtgggccctcctcaattgcggactgggagtgtcagcgcaggggccaggtgagtggaccccctgggtgtcatggacacgctgttcttcctcatgcggcaggggggtctccgtgagatcccggagatgtttacgactgcccggtgaagagccttgctggggtgattcacacgagtatagattgtgccagttaccggactgcccgcctggcgcggtgccattcagggacctgcaatgtgccctgtacaacggacgaccagtcttggggacccagaagacataccagtgggtgcccttccacggcgcacccaaccagtgcgacctgaattgcctggctgagggacatgccttttaccattcttttggccgggtgcttgatggcacagcttgtagtccaggagcacaaggggtctgtgtggccggccggtgtctttcggcagggtgcgatggtctgctcggctccggcgctttggaggatagatgtggaaggtgcgggggcgccaacgattcatgcctgttcgttcaacgggtgtttcgcgatgccggagcattcgctggctattggaacgttactctgatccccgaaggagcaaggcacatccgggtggaacaccgaagccgtaatcatctggctttgatgggtggggacggaaggtacgtactgaatggtcactgggtagttagccctcccggaacctatgaggccgcaggcactcacgtggtctacacacgcgacaccggccctcaggaaactctccaggctgctggccctacttcccacgacttgttgctgcaggtgctgttgcaagagcccaatcccggcatcgagttcgaattttggctaccccgtgagcggtacagtccgttccaggccagggtgcaggcattaggctggcctctgcgccagcctcagccccggggggtggagcctcagcctccagccgctcctgcagtgacgcccgcccaaacccccaccctggcaccagacccttgtcctccatgtccggatacacgggggcgagcccacagactcttgcactactgcgggagtgatttcgtctttcaggccagagtgctcggacaccatcaccaggcccaggaaactcgatatgaggttagaatccagcttgtgtacaaaaaccgaagtcctctgagggctcgcgaatacgtgtgggctccgggccactgtccatgtccgatgctggcccctcaccgggactacctaatggcagtgcagcgcttagtttcacccgatggaacccaggatcaactgctgttgccacacgccggctatgcccgcccatggagcccagccgaggactcacgaatccgactgacagcccggaggtgtcccggctag

SEQ ID NO: 265890 - DNA, 1416 bp, Artificial Sequence
  derived and/or modified sequence
atggattctgcccccctcttcccccggccccacctgttccagaacctgctgctcttcctgtgggccctgctgaactgtggcctgggcgtgtctgcccagggccctggagagtggaccccctgggtgtcctggacccgctgcagcagcagctgtggccggggcgtgtctgtgcgcagccgccgctgcctgcggctgcccggggaggagccctgctggggagacagccatgagtaccgcctgtgccagctgcctgactgccccccaggagctgtgcccttccgggacctgcagtgtgccctgtacaacggccggcctgtgctgggcacccagaagacctaccagtgggtgcccttccatggagcccccaaccagtgtgacctgaactgcctggccgagggccacgccttctaccacagctttggccgggtgctggatggaacagcctgcagccctggggcccagggcgtgtgtgtggccggccgctgcctgtctgctggctgtgatggcctgctgggcagcggggccctggaggacagatgtggccgctgtggcggggccaatgacagctgcctgtttgtgcagagggtcttcagagatgctggggcctttgctggctactggaatgtgaccctcatccctgagggcgcccggcacatccgggtggagcacaggagcaggaaccacctggccctgatgggaggagatggccgctacgtgctgaatggccactgggtggtgagccccccaggcacctatgaggccgccggcacccacgtggtgtacacccgggacaccggcccccaggagaccctgcaggccgccggccccaccagccatgacctgctgctgcaggtgctgctgcaggagcccaaccctggcatcgagtttgagttctggctgccccgggagcgctacagccccttccaggcccgggtgcaggccctgggctggcccctgcggcagccccagccccggggcgtggagccccagcccccagctgccccagctgtgaccccagcccagacccccaccctggccccagacccctgccccccctgcccagacacccggggccgggcccaccggctgctgcactactgcggcagtgactttgtgttccaggcccgggtgctgggccaccaccaccaggcccaggagaccaggtatgaggtgcgcatccagctggtgtacaagaacagaagccccctgcgggcccgggagtatgtgtgggcccctggccactgcccctgccccatgctggccccccaccgggactacctgatggctgtgcagaggctggtgtccccagatggcacccaggaccagctgctgctgccccacgccggctacgcccggccctggagccctgctgaggacagccgcatccggctgacagcccggcgctgccccggctag

SEQ ID NO: 265891 - DNA, 1416 bp, Artificial Sequence
  derived and/or modified sequence
atggacagcgcccccctgttcccccggccccacctgttccagaacctcctgctcttcctgtgggcactgctcaattgtggcctgggagtctccgctcagggaccaggcgagtggacaccatgggtgtcttggactaggtgtagttcctcctgcggccgaggtgtgagcgttcggtcacggcgctgcctgcgtctgcccggcgaagagccctgttggggtgactctcacgagtatagactttgccaacttcctgattgcccacccggcgctgtgccctttagggatcttcagtgtgccctctataatggaagacctgtactagggacacagaagacctaccagtgggtccctttccacggcgcaccaaaccagtgcgatctgaactgcctggccgaagggcacgccttctaccacagcttcggacgggtactggacggcacagcctgttcaccgggggcccagggagtgtgtgtggcaggccgctgcctgtcagcagggtgcgacgggttgctaggctcaggggcacttgaggaccgctgcggccgctgcggtggcgcaaatgacagttgcctgtttgttcagagagtgttccgcgacgccggagcctttgctggttactggaatgttacccttatccccgagggtgctcgtcacatccgcgttgaacatagaagccggaatcatctggcactcatgggaggcgatgggcgctatgtcctgaacggacactgggtagttagtccacccggaacatacgaggctgccggtacccatgtggtgtatacccgggatacagggccacaagaaactttgcaggctgctggccctacatcccacgatcttttgcttcaagtgttgctccaggagcccaaccctggtatcgaattcgaattctggctgccacgggagcggtacagcccatttcaggcgagggtgcaggctctgggctggccgttgaggcagcctcagccgcggggagtggagccccagccccccgctgctccagcggtgaccccagcacagacacctacactggccccagacccctgccctccttgccccgacaccagaggccgggcccaccgattacttcactattgtgggagtgacttcgtcttccaggcccgcgtgctgggccatcaccatcaagctcaagagactcggtacgaagtgcgaatccaactggtgtacaaaaatcgctcacccctgcgtgcccgggaatatgtctgggcccccgggcattgcccctgtccgatgttggctccccatcgagactatcttatggccgtgcagcggctagtcagccccgatgggacgcaagatcagctgcttctacctcacgctgggtacgccaggccatggtcccccgctgaggacagcagaataagactcacagcccgccgctgcccaggttag

SEQ ID NO: 265892 - RNA, 1416 nt, Artificial Sequence
  derived and/or modified sequence
auggauagcgcuccucuguuuccccgaccccaccuguuucagaaucucuuacuguuccucugggccuugcugaacugcggccucggugugagcgcccagggcccaggggaauggacgcccuggguuaguuggacucgaugcagcucuucuuguggcaggggugugucaguccgaagcaggcggugucugaggcugcccggagaggaaccuugcuggggggacagccacgaauaucgucugugucaacugcccgauuguccaccaggcgcuguuccuuuccgcgaccugcaaugcgcuuuguacaauggccgucccguuuuggggacucaaaagacauaccagugggugccuuuucacggcgcaccaaaucagugcgaccuuaauugccucgcagagggccacgcuuuuuaccauuccuucggaagaguucucgauggcaccgcuuguucacccggggcucagggcguaugcgucgcugggcgaugccugucugcugguugugauggacuauuaggaucuggagcacuggaagacagaugugggcgaugcgguggcgcaaacgacuccugucuguuuguucagcggguuuucagagaugccggagcuuucgcgggguacuggaacgugacccugauccccgaaggugcccgccacaucaggguugagcaucggagcaggaaccaccuggcgcugaugggcggagacgggagguauguucugaacggccacugggucgucagccccccaggaaccuacgaggcugcuggaacgcacguuguauauacacgugauacuggaccacaggaaacauugcaggcugccgggcccaccucucaugaucuucugcugcaggugcuauuacaggaaccuaaucccggcaucgaguucgaauuuugguugccucgcgaacguuacagcccuuuucaagcacgugugcaggcauuagguuggccucuuagacagccccagccacgcgguguggagccccagccccccgcggcccccgccgugacacccgcacagacaccaacccucgccccagacccuuguccccccuguccagauacacgggggcgagcccacagauuauugcacuacugcggcuccgauuucguuuuccaagccaggguccuaggacaucaccaccaggcacaggaaacccgguacgaagugaggauccagcugguuuauaagaaccggucaccacugcgagcucgugaguauguaugggcuccugggcauuguccuugucccaugcuugccccccacagagacuaccugauggcaguccagcgguuaguuagcccagacggaacucaggaucagcugcugcucccccacgcuggguacgccagaccuuggucuccggcagaagacuccagaauccgcuugaccgcuaggagaugccccggguag

SEQ ID NO: 265893 - RNA, 1416 nt, Artificial Sequence
  derived and/or modified sequence
auggacucagccccccuuuucccacggccccaucuuuuucaaaaucuguuauuauuucugugggcgcucuuaaauuguggccucggagugagcgcccaaggacccggagaguggaccccaugggugucuuggacacgguguagcucgucaugcgggcgcggaguaucaguccguagcaggaggugccugaggcuaccaggugaggagccaugcuggggugauucacacgaauacagacuuugccaacugcccgacugcccgccuggcgccgugcccuuucgcgauuugcaaugugcgcucuacaauggucggcccguacuggguacacagaagacuuaccaguggguuccuuuucacggugcuccaaaucaaugugaccucaacugcuuggccgaaggccaugccuucuaccauuccuuuggacgcguccucgauggcaccgcuugcucuccuggugcucagggcguguguguugcuggcagaugucugagugccggaugcgauggacugcuuggcaguggcgcucuagaagaccggugcgggagaugcgguggugccaaugauaguugucucuuuguccaacgcguauuucgugaugcaggugcuuuugccggguauuggaauguaacccucaucccagaaggugcacgacauauuagagucgaacacagaucaaggaaucaccuagcccuaauggguggcgacggcagguacgugcuaaacggacacugggucguuucuccuccgggaaccuacgaggccgcggggacucaugugguuuauacccgggauaccgggccacaggaaacacuacaggcagccggaccaacuucccacgaccuucugcuacagguucuacugcaggaaccaaauccaggcauagaguuugaauuuugguuaccgagagaacgcuauuccccuuuccaagcucggguccaggcacugggauggccacuccggcagccccagccacgcgggguggaaccgcagccucccgccgcccccgccgucaccccugcccagacacccacgcucgcaccagacccuugucccccuugucccgacaccagaggccgugcacaucgacuccuccacuacugcgguuccgauuucgucuuucaggcccgagugcugggccaccaccaccaagcccaggagacaagauacgaaguccgcauucagcuuguuuauaagaacaggucaccauugagagcgagagaguauguuugggcccccggucacugcccaugccccauguuagcuccccaccgcgauuaccugauggcuguccaaagacuugucuccccagauggaacacaagaccaguugcuucucccucaugcuggauacgccaggcccuggucccccgcggaggauucacguauucgguuaacugcccgacgaugcccgggauag

SEQ ID NO: 265894 - protein, 486 aa, Artificial Sequence
  derived and/or modified sequence
MAKVNRARSTSPPDGGWGWMIVAGCFLVTICTRAVTRCISIFFVEFQTYFTQDYAQTAWIHSIVDCVTMLCAPLGSVVSNHLSCQVGIMLGGLLASTGLILSSFATSLKHLYLTLGVLTGLGFALCYSPAIAMVGKYFSRRKALAYGIAMSGSGIGTFILAPVVQLLIEQFSWRGALLILGGFVLNLCVCGALMRPITLKEDHTTPEQNHVCRTQKEDIKRVSPYSSLTKEWAQTCLCCCLQQEYSFLLMSDFVVLAVSVLFMAYGCSPLFVYLVPYALSVGVSHQQAAFLMSILGVIDIIGNITFGWLTDRRCLKNYQYVCYLFAVGMDGLCYLCLPMLQSLPLLVPFSCTFGYFDGAYVTLIPVVTTEIVGTTSLSSALGVVYFLHAVPYLVSPPIAGRLVDTTGSYTAAFLLCGFSMIFSSVLLGFARLIKRMRKTQLQFIAKESDPKLQLWTNGSVAYSVARELDQKHGEPVATAVPGYSLT

SEQ ID NO: 265895 - protein, 516 aa, Artificial Sequence
  derived and/or modified sequence
MPSGSHWTANSSKIITWLLEQPGKEEKRKTMAKVNRARSTSPPDGGWGWMIVAGCFLVTICTRAVTRCISIFFVEFQTYFTQDYAQTAWIHSIVDCVTMLCAPLGSVVSNHLSCQVGIMLGGLLASTGLILSSFATSLKHLYLTLGVLTGLGFALCYSPAIAMVGKYFSRRKALAYGIAMSGSGIGTFILAPVVQLLIEQFSWRGALLILGGFVLNLCVCGALMRPITLKEDHTTPEQNHVCRTQKEDIKRVSPYSSLTKEWAQTCLCCCLQQEYSFLLMSDFVVLAVSVLFMAYGCSPLFVYLVPYALSVGVSHQQAAFLMSILGVIDIIGNITFGWLTDRRCLKNYQYVCYLFAVGMDGLCYLCLPMLQSLPLLVPFSCTFGYFDGAYVTLIPVVTTEIVGTTSLSSALGVVYFLHAVPYLVSPPIAGRLVDTTGSYTAAFLLCGFSMIFSSVLLGFARLIKRMRKTQLQFIAKESDPKLQLWTNGSVAYSVARELDQKHGEPVATAVPGYSLT

SEQ ID NO: 265896 - protein, 25 aa, Artificial Sequence
  derived and/or modified sequence
MPSGSHWTANSSKIITWLLEQPGKE

SEQ ID NO: 265897 - protein, 150 aa, Artificial Sequence
  derived and/or modified sequence
MRPITLKEDHTTPEQNHVCRTQKEDIKRVSPYSSLTKEWAQTCLCCCLQQEYSFLLMSDFVVLAVSVLFMAYGCSPLFVYLVPYALSVGVSHQQAAFLMSILGVIDIIGNITFGWLTDRRFCIKTFGIFRKSVRKMYILRSTILHFYTEF

SEQ ID NO: 265898 - DNA, 1461 bp, Artificial Sequence
  derived and/or modified sequence
atggccaaggtcaaccgtgcacgatcgaccagtccacctgatggtggttggggctggatgatcgtggccggatgtttcctcgtcaccatctgcacccgtgcagtgaccaggtgcattagcatctttttcgttgagtttcagacatattttacccaagactacgcccagaccgcctggattcactccatcgttgattgtgtcaccatgctctgcgcacctctgggcagcgtagttagcaatcacctcagctgtcaggtggggattatgcttggcggcctgcttgccagtactgggcttattcttagcagcttcgccacttctctcaagcatctgtacttaacactgggagtccttaccgggctgggatttgccttatgttattctccagcgattgcaatggttggcaagtactttagccggcgcaaggccctagcttatggcatcgcaatgagcggtagcggtattggaactttcatcctggctccagtagtgcaactgctaatcgaacagttcagttggcgaggcgctttactgattctgggtggcttcgtgctcaacttatgcgtctgcggcgccctcatgcgacccataacacttaaggaggaccataccacgcccgaacagaaccacgtgtgcagaacacagaaagaagatatcaagagagtgtccccatacagtagtctgactaaggaatgggctcagacatgtctctgttgctgcctccagcaggagtacagctttttgttgatgtccgactttgtggtgctggccgtgtccgtgctcttcatggcatatgggtgtagtcctctttttgtgtacctggtgccttacgccctgtcggtgggggtttcacaccagcaggccgccttcctgatgagcatccttggggtgatagacatcatcggaaatatcaccttcggatggctgactgacagacgttgtttgaaaaattaccaatatgtatgctacctcttcgctgtgggtatggatggcctttgctacttgtgccttcctatgcttcagtccctgcctctgctggtgccctttagctgcacatttggctacttcgatggcgcctatgtgacactcatcccagtggtaactaccgagattgtaggaaccacatccctatcatcagccctgggagtggtatatttccttcacgcagtgccatatctagtgtccccgcctatcgctgggagattggtggatacgacaggatcatataccgctgcatttctactgtgcggcttttcaatgattttctcttccgtgctgctaggctttgccagacttattaagaggatgcgaaagactcagctgcaatttattgctaaagaatcggatcctaaactccaactctggactaatggtagcgtggcttactccgtcgctcgagaacttgaccaaaagcacggcgagccggtggctacagcggtgcccggatatagtcttacctag

SEQ ID NO: 265899 - DNA, 1551 bp, Artificial Sequence
  derived and/or modified sequence
atgccctctggaagccactggactgcgaattcaagtaagataatcacctggcttttggagcagcctgggaaggaagaaaaaaggaagaccatggccaaagtgaatagggcacgctctaccagtccaccggatggaggatgggggtggatgatcgtggccggctgcttcctggtcacaatctgtacccgggcagttaccaggtgcattagcatcttctttgtagaattccagacatatttcacacaggattatgcccaaactgcctggattcactctatcgtggactgtgtgacgatgttatgcgctcccctgggatctgttgtgtccaaccacctttcctgtcaagtagggatcatgctagggggccttctcgctagcaccggcctgattctgtccagtttcgctacttctctgaagcatctctacctgactttgggcgttctgacaggtctcggcttcgctctgtgctacagccccgctatcgctatggtgggaaaatacttttctaggaggaaggccctggcctacggaatcgctatgagcggatctgggatcggcacttttattcttgcccccgtcgtccagctgttgatcgagcagttcagttggaggggagctctccttatcctgggcggctttgtcctaaatctttgtgtatgcggagctttgatgcgccctatcactctgaaggaggaccacacaactcccgagcagaatcatgtgtgccggacccaaaaagaggatattaagcgggtgagcccatactcctccctcaccaaggagtgggctcagacctgcctatgctgttgtcttcaacaagaatattcttttctgttaatgtctgacttcgtggttttagccgtgagtgtgctgttcatggcttatggctgttcacccctgttcgtgtatctggtgccatatgcgctatctgttggagtgagccaccagcaggctgccttcttgatgtctatacttggcgtaattgatataatcggcaatatcaccttcggttggcttaccgaccgccggtgcctcaagaactaccagtacgtctgttacctgtttgctgtaggaatggacggcctatgttatctgtgtctccctatgctgcagtcactgcccctccttgtgcctttctcttgtacatttgggtactttgacggagcctacgtaaccctgatcccagtcgtcactacagaaatcgtgggcacgactagccttagcagtgctctcggcgtggtctacttcctgcacgctgtgccttatctcgtcagtccgcccattgctggtcggctggtagacaccaccggttcctacacagccgcattcttgttgtgcggcttctcaatgatcttctccagcgttcttctagggttcgcacggctcatcaagaggatgcggaagacacagttgcaattcatcgcaaaggagtcagacccaaagctgcagctatggacgaacgggagcgtggcatattctgttgcacgggagctcgaccagaaacatggagagcctgtagccactgccgtcccaggttattctctaacatag

SEQ ID NO: 265900 - DNA, 78 bp, Artificial Sequence
  derived and/or modified sequence
atgccaagcgggtcacattggacggccaattcctctaagatcattacatggctgctggagcaacctgggaaagagtag

SEQ ID NO: 265901 - DNA, 453 bp, Artificial Sequence
  derived and/or modified sequence
atgagacccatcaccctgaaagaggaccataccaccccggaacagaaccacgtctgccggacacagaaggaagacataaagagggtctccccttatagcagcctcactaaagaatgggcccagacgtgtctttgttgctgcctacaacaagaatatagtttcttactgatgtccgattttgtggtcctcgccgtctccgtattgttcatggcttatgggtgctccccactgtttgtttacctcgtaccctacgcacttagcgtgggagtgagtcaccagcaggctgcctttctcatgagcatactgggcgtaatagatatcattgggaatattaccttcggctggttaaccgatcggagattctgcatcaagaccttcggaatctttagaaagagcgtcagaaagatgtacatcctgcgatctacaatcctgcacttctacactgaattttag

SEQ ID NO: 265902 - DNA, 1461 bp, Artificial Sequence
  derived and/or modified sequence
atggccaaggtgaacagagcccggagcaccagccccccagatggcggctggggctggatgattgtggccggctgcttcctggtgaccatctgcaccagggctgtgacccgctgcatcagcatcttctttgtggagttccagacctacttcacccaggactatgcccagacagcctggatccacagcatcgtggactgtgtgaccatgctgtgtgcccccctgggctctgtggtgagcaaccacctgagctgccaggtgggcatcatgctgggcggcctgctggccagcacaggcctcatcctgagcagctttgccaccagcctgaagcacctgtacctgaccctgggcgtgctgaccggcctgggctttgccctgtgctacagccctgccatcgccatggtgggcaagtacttcagcaggaggaaggccctggcctacggcatcgccatgagcggcagcggcatcggcaccttcatcctggcccctgtggtgcagctgctgattgagcagttctcctggaggggggccctgctgatcctgggcggctttgtgctgaacctgtgtgtgtgtggggccctgatgaggcccatcaccctgaaggaggaccacaccaccccagagcagaaccacgtgtgcaggacccagaaggaggacatcaagagggtgagcccctacagcagcctgaccaaggagtgggcccagacctgcctgtgctgctgcctgcagcaggagtacagcttcctgctgatgtctgactttgtggtgctggccgtgtctgtgctcttcatggcctacggctgcagccccctgtttgtgtacctggtgccctatgccctgtctgtgggcgtgagccaccagcaggccgccttcctgatgagcatcctgggcgtcatcgacatcatcggcaacatcaccttcggctggctgacagaccggcgctgcctgaagaactaccagtatgtgtgctacctgtttgctgtgggcatggatggcctgtgctacctgtgcctgcccatgctgcagagcctgcccctgctggtgcccttcagctgcaccttcggctactttgatggagcctacgtgaccctcatccctgtggtgaccacagaaattgtgggcaccaccagcctgagcagcgccctgggcgtggtgtacttcctgcatgctgtgccctacctggtgagcccccccatcgccggccgcctggtggacaccaccggcagctacacagctgccttcctgctgtgtggcttctccatgatcttcagctctgtgctgctgggctttgcccggctcatcaagaggatgaggaagacccagctgcagttcatcgccaaggagagtgaccccaagctgcagctgtggaccaatggatctgtggcctacagcgtggcccgggagctggaccagaagcacggggagcctgtggccacagctgtgcccggctacagcctgacctag

SEQ ID NO: 265903 - DNA, 1551 bp, Artificial Sequence
  derived and/or modified sequence
atgcccagcggcagccactggacagccaacagcagcaagatcatcacctggctgctggagcagcccgggaaggaggagaagaggaagaccatggccaaggtgaacagagcccggagcaccagccccccagatggcggctggggctggatgattgtggccggctgcttcctggtgaccatctgcaccagggctgtgacccgctgcatcagcatcttctttgtggagttccagacctacttcacccaggactatgcccagacagcctggatccacagcatcgtggactgtgtgaccatgctgtgtgcccccctgggctctgtggtgagcaaccacctgagctgccaggtgggcatcatgctgggcggcctgctggccagcacaggcctcatcctgagcagctttgccaccagcctgaagcacctgtacctgaccctgggcgtgctgaccggcctgggctttgccctgtgctacagccctgccatcgccatggtgggcaagtacttcagcaggaggaaggccctggcctacggcatcgccatgagcggcagcggcatcggcaccttcatcctggcccctgtggtgcagctgctgattgagcagttctcctggaggggggccctgctgatcctgggcggctttgtgctgaacctgtgtgtgtgtggggccctgatgaggcccatcaccctgaaggaggaccacaccaccccagagcagaaccacgtgtgcaggacccagaaggaggacatcaagagggtgagcccctacagcagcctgaccaaggagtgggcccagacctgcctgtgctgctgcctgcagcaggagtacagcttcctgctgatgtctgactttgtggtgctggccgtgtctgtgctcttcatggcctacggctgcagccccctgtttgtgtacctggtgccctatgccctgtctgtgggcgtgagccaccagcaggccgccttcctgatgagcatcctgggcgtcatcgacatcatcggcaacatcaccttcggctggctgacagaccggcgctgcctgaagaactaccagtatgtgtgctacctgtttgctgtgggcatggatggcctgtgctacctgtgcctgcccatgctgcagagcctgcccctgctggtgcccttcagctgcaccttcggctactttgatggagcctacgtgaccctcatccctgtggtgaccacagaaattgtgggcaccaccagcctgagcagcgccctgggcgtggtgtacttcctgcatgctgtgccctacctggtgagcccccccatcgccggccgcctggtggacaccaccggcagctacacagctgccttcctgctgtgtggcttctccatgatcttcagctctgtgctgctgggctttgcccggctcatcaagaggatgaggaagacccagctgcagttcatcgccaaggagagtgaccccaagctgcagctgtggaccaatggatctgtggcctacagcgtggcccgggagctggaccagaagcacggggagcctgtggccacagctgtgcccggctacagcctgacctag

SEQ ID NO: 265904 - DNA, 78 bp, Artificial Sequence
  derived and/or modified sequence
atgcccagcggcagccactggacagccaacagcagcaagatcatcacctggctgctggagcagcccgggaaggagtag

SEQ ID NO: 265905 - DNA, 453 bp, Artificial Sequence
  derived and/or modified sequence
atgaggcccatcaccctgaaggaggaccacaccaccccagagcagaaccacgtgtgcaggacccagaaggaggacatcaagagggtgagcccctacagcagcctgaccaaggagtgggcccagacctgcctgtgctgctgcctgcagcaggagtacagcttcctgctgatgtctgactttgtggtgctggccgtgtctgtgctcttcatggcctacggctgcagccccctgtttgtgtacctggtgccctatgccctgtctgtgggcgtgagccaccagcaggccgccttcctgatgagcatcctgggcgtgattgacatcatcggcaacatcaccttcggctggctgacagaccggcgcttctgcatcaagaccttcggcatcttcaggaagtctgtgaggaagatgtacatcctgcggagcaccatcctgcacttctacacagagttctag

SEQ ID NO: 265906 - DNA, 1461 bp, Artificial Sequence
  derived and/or modified sequence
atggccaaggtgaaccgggcccggagcaccagcccccccgacggcgggtggggatggatgatagttgctggatgctttctggtaaccatttgcacccgggccgtgactagatgtatttcaatcttctttgtggagtttcagacctatttcactcaggactacgcccagaccgcctggattcactctattgtagattgcgtcaccatgttgtgcgccccccttgggtctgttgtatccaatcacctgagttgccaggtaggcatcatgctgggtggcctgctggcttccacaggacttattctgagctcgttcgctaccagtcttaagcatctctacctgacactgggcgttctaacggggctcgggttcgctttatgttacagtcctgcaatcgccatggtcggtaaatatttttcgagacggaaagctttggcatatgggattgcaatgagtggctcaggaattgggactttcatattggcccccgtcgtccagctgctgatcgagcaattctcttggagaggtgccttgttaattttgggcgggtttgtcttgaacctgtgcgtgtgtggggctctcatgcgtcccataactctaaaagaggaccatacaacccctgagcagaatcacgtctgccggacacaaaaagaagacatcaagagagtgagcccttatagtagcctcactaaagagtgggcacagacctgtttgtgttgctgcctccagcaggaatattcattcctgctcatgagcgactttgtggtcctggccgttagcgtgctctttatggcctacgggtgctctcccctctttgtctacctggttccatatgccctctctgtgggggttagtcatcagcaggccgcattcctgatgtccatcctgggagtcattgacattatcggcaatattacattcggctggctgaccgataggaggtgccttaagaattatcagtacgtgtgttatcttttcgcagtagggatggatggcttgtgttacttgtgcttacctatgctgcaaagccttcctttacttgtgccatttagctgcacgtttggctatttcgacggggcctacgtgacgttgatccctgtcgtgaccacagaaattgtggggaccacatcactctctagcgccttgggagtggtgtactttctccatgctgtgccctacttggtgagtccacccatagcaggtcggctggtcgacaccacagggtcatacactgcagcattcctattgtgtggctttagcatgatcttctcttcagtgctgctagggttcgccagactaattaaaagaatgcggaagacacaattgcaattcattgccaaggagagcgacccaaaactgcagctctggaccaacggcagcgttgcttacagtgtagcgagagagctggaccagaaacatggagagcccgtcgccacagccgtgcccggctatagcctcacctag

SEQ ID NO: 265907 - DNA, 1551 bp, Artificial Sequence
  derived and/or modified sequence
atgcccagcggcagccactggaccgccaacagcagcaagatcatcacctggctgctggaacagccgggcaaagaagagaagcgcaaaactatggctaaggtcaaccgggcccgttccactagccctccagatggcgggtggggatggatgattgttgcgggctgtttcctggtcactatctgtaccagggcagtcacgagatgcatctcaattttcttcgtggagttccagacatactttacacaggattatgctcaaacagcttggatacactccattgtggactgtgtgaccatgctgtgtgccccgcttggctccgtcgtgtcaaatcatctgtcctgccaggtggggattatgctgggcggcctcctcgccagcaccggcctgattcttagcagcttcgcgactagcctgaaacacctctatctcacccttggtgtgctcaccggcctgggatttgctttatgctattcccctgcaattgcaatggtcggaaaatacttttcccggcgcaaagctctcgcgtatggcatcgctatgtctggttccggtatcggaacttttatccttgctcctgtggtgcagcttctgattgagcagttttcttggcgcggagccttgctcatactgggggggtttgtgctcaatctgtgcgtttgcggagccctgatgagacctatcacccttaaggaagatcacaccaccccggaacagaaccacgtgtgcagaacgcagaaggaggacatcaagagggtgagcccctactctagtttgactaaagaatgggcgcagacttgtctgtgctgctgcctgcagcaagaatacagcttcttattaatgagcgactttgtggttctcgcagtcagtgtattgtttatggcttacggatgcagcccactctttgtctacctggtgccttacgcactgtccgtgggcgtgagccatcaacaggccgccttcctcatgtcaatattgggagttattgatattatcggcaatatcaccttcggctggctcaccgatagaagatgtctcaaaaattatcaatacgtgtgttacctcttcgctgtggggatggacggattatgctacttgtgtctacctatgttgcaatcactgcctctgctggtcccattttcttgcacatttggatatttcgacggtgcgtacgtaacactgatccctgtggtgacaacggagatagttggcaccaccagcttgagctcagctctgggagttgtgtactttctccacgccgtcccatacctggtctctcctcccatcgcaggccggctggttgacacaacagggagctacacggccgccttcttgctatgcggtttctctatgatctttagcagtgtactgctgggcttcgcccggctaattaagcgaatgcgaaagacacagcttcaatttatcgctaaagagtctgacccaaaactgcagctatggaccaacggaagcgtggcctatagcgtggccagagaactcgaccagaagcacggtgaacctgtggcaacagcggtccctgggtatagcttgacttag

SEQ ID NO: 265908 - DNA, 78 bp, Artificial Sequence
  derived and/or modified sequence
atgcccagcggcagccactggaccgccaacagcagcaagatcatcacatggttgctggagcagccgggcaaagaatag

SEQ ID NO: 265909 - DNA, 453 bp, Artificial Sequence
  derived and/or modified sequence
atgcggcccatcaccctgaaggaggaccacaccacccccgagcagaaccacgtgtgtaggacacagaaggaggacattaagcgggtgagtccctactcttcccttacaaaagaatgggcccaaacatgcctgtgctgctgtctgcagcaagagtatagttttttactaatgtcagactttgttgtgctggcagtaagtgtactattcatggcctatggctgcagccccctttttgtttatttagtcccctatgctctcagcgttggagtctcccaccagcaggccgcgttcttaatgtctattctaggagtcatcgacataatcggcaatattaccttcgggtggttgacagacaggaggttctgcataaagacgttcggaatattccggaaatcagtgagaaagatgtacatcctgcgaagtaccattttacatttctacacggaattctag

SEQ ID NO: 265910 - DNA, 1461 bp, Artificial Sequence
  derived and/or modified sequence
atggctaaggttaatcgggcacgatcgacttccccacctgatggcggatgggggtggatgatagtagccggatgtttcctggtgaccatctgtacaagagccgtgacccgctgcatctctatctttttcgtcgaattccagacatacttcacccaagactacgcccagactgcgtggattcacagcatagtcgattgcgtgactatgttgtgtgctccactcgggagcgtggtctcaaatcacctctcatgtcaggtgggcatcatgttaggcggattgttggcctccaccgggctcatcctttcttccttcgcgacatcactgaaacatctgtatctcaccctgggggtgctgaccgggctcggattcgctttgtgctatagccccgcaatagctatggtcggcaagtatttctccagaagaaaggcgcttgcatacggcatcgctatgagtggctcaggtatcggaacattcattctcgccccagttgtccagctcctaattgagcaatttagttggaggggagcattgctgattctcggtggcttcgtactcaatctgtgtgtgtgtggggcacttatgcggccaatcaccttgaaggaggatcataccacccctgaacaaaaccacgtgtgcagaacacagaaggaagatattaagcgcgtgtcaccgtacagcagtttgaccaaagaatgggcacaaacatgcctgtgctgttgcttgcagcaagagtactccttcttgctcatgtcggatttcgtggttctggccgttagcgtcctcttcatggcttacggatgtagccctctcttcgtgtacctagtcccgtacgccctctcagtgggggtaagtcatcaacaggcagcttttctgatgtccatcctgggcgtcatcgacatcatcggcaatattacatttggctggttgacggaccgtaggtgcctcaagaactatcagtacgtctgttacctgtttgcagttgggatggacggactgtgttacttgtgtcttcccatgctccaaagcctccctctcttggtacctttttcctgcacattcgggtactttgatggcgcatacgtcaccctcattcccgtggtgactactgaaatagtgggtactacaagtctctcttcagccctaggcgtcgtctactttctgcacgctgttccatacttagtgagcccccctatagcgggtcgcctggtcgataccaccggatcctatacggccgcttttctcctgtgcggcttcagcatgatcttttcttccgtcctgctggggtttgccagactcataaagcggatgcgtaaaacccagctgcagtttatcgctaaggagtcggatcccaagttacaactgtggaccaatgggtccgtggcatacagcgtggccagagagctggaccaaaaacacggtgagcctgtagccacagccgtccccggatactcattaacttag

SEQ ID NO: 265911 - DNA, 1551 bp, Artificial Sequence
  derived and/or modified sequence
atgccgagcgggtctcattggactgctaattcctcgaagattatcacatggctgttggagcagccaggtaaagaagaaaagcgcaaaacgatggctaaggtgaatcgagcgcgatctacaagtcctcctgatggcggatggggatggatgattgtggctggttgctttcttgtgacaatctgtaccagagccgtgacgagatgtatcagcatcttctttgtcgaattccaaacttacttcactcaggactatgcgcagacagcatggatacatagcattgtcgactgcgtaacaatgctgtgtgccccactgggttccgttgttagtaatcatctcagttgtcaagttggaatcatgctgggaggtcttctggcatcgactggattaatcctctcatcattcgccacctcattaaagcacctctacttgactctgggagtgcttacaggcttagggtttgccctctgttactcgcctgccatcgccatggtgggtaaatatttctccagacgcaaggctctggcatacggtattgccatgagcggcagcggtatcggcactttcatccttgcccctgttgtccagctgctgatcgaacaatttagctggcggggagctcttttaatattggggggatttgtactaaacctctgcgtgtgtggcgcactgatgagaccaattacgcttaaggaagaccacacaacccctgaacagaatcatgtatgtcgaactcaaaaggaggatatcaagcgcgtttccccatactcaagcctgaccaaagagtgggcccagacatgcttgtgctgctgcctccagcaggaatactccttcctgttgatgtccgacttcgtggtcctggctgtgagcgtgctgtttatggcttatgggtgttcacccttgtttgtgtacctggtcccgtatgctctgtcagttggcgtgtcccaccagcaagccgcatttttgatgtcaattctgggcgtcatcgacatcatcggcaatattacgttcggctggttaaccgaccggagatgtcttaagaactatcagtacgtctgctacctctttgcggtcggtatggatgggctgtgttacctgtgccttccaatgttacagtcactcccgttactggtgcccttcagttgcacctttgggtacttcgatggtgcctatgtgaccctgatacctgtggtgactaccgaaattgtggggactacttctctgtccagtgcgctgggagtcgtttacttccttcacgccgtcccctacttggttagtccaccaatcgccggacgcctcgtcgacacaactgggagctatactgccgcattccttctctgtggattttctatgatatttagttccgtgctgctgggcttcgctaggcttatcaagcgtatgcgaaaaacacagctgcagttcattgctaaggagtctgaccccaagctacagctatggaccaacggatccgtggcatatagtgttgcacgggagttagaccagaagcacggggagcccgtggcgacagccgtccccggttattccctaacgtag

SEQ ID NO: 265912 - DNA, 78 bp, Artificial Sequence
  derived and/or modified sequence
atgccgtcggggtcacattggacagccaattccagcaagatcattacatggctgttggaacagcccggtaaggagtag

SEQ ID NO: 265913 - DNA, 453 bp, Artificial Sequence
  derived and/or modified sequence
atgcggcctattacactcaaagaggaccacactacccctgaacagaaccacgtctgccgcacgcagaaggaggatatcaagagagtaagcccatactcaagtctcacaaaagaatgggcccagacctgtctctgttgttgtctgcagcaggaatactcattcctgttgatgagcgattttgtggttttggcagtctcggtgctatttatggcttatggctgttcacccttattcgtttatcttgtcccatatgcgctttcagtgggggttagccatcaacaggctgcgtttctgatgtctatattgggtgtgatcgacatcatcggaaacatcaccttcggctggctaacagatcgtcggttctgtattaaaacgttcggaatcttccgtaagtccgtaaggaagatgtacatcttgcgaagcacaattttacacttttatacagagttttag

SEQ ID NO: 265914 - DNA, 4622 bp, Artificial Sequence
  derived and/or modified sequence
tcagtctcgccggcggcccccgctcccggatccccagcgccctggccaagaagcttcctcggctccccctcttccctctccctgacacggttgtgcagagggcgcggtggctcagatacaggatttcgacatattggccggtttgctctcgagctcctgggctcaagcgatctgcccgctttagcctcccaaagtgatgggattacaggcgtgagccaccgtgcctggccataatttttaaaaatgtctagtcagatggcgagtaacccatgggccaggtagcgttctatgccaaccttgaatgccatcaggaagtcactggacagcaaactcttccaagatcataacttggctgttggagcaacctggaaaagaagaaaaaagaaaaaccatggcaaaagtaaatagagctcggtctacctcccctccagatggaggctggggctggatgattgtggctggctgtttccttgttaccatctgcacacgggcagtcacaagatgtatctcaattttttttgtggagttccagacatacttcactcaggattacgcacaaacggcatggatccattccattgtagattgtgtgaccatgctctgtgctccacttgggagtgttgtcagtaaccatttatcctgtcaagtgggaatcatgctgggtggcttgcttgcatctactggactcatcctgagctcatttgccacgagtctgaagcatctctacctcactctgggagttcttacaggtcttggatttgcactttgttactctccagctattgccatggttggcaagtacttcagcagacggaaagcccttgcttatggtatcgccatgtcaggaagtggcattggcaccttcatcctggctcctgtggttcagctccttattgaacagttttcctggcggggagccttactcattcttgggggctttgtcttgaatctctgtgtatgtggtgccttgatgaggccaattactcttaaagaggaccacacaactccagagcagaaccatgtgtgtagaactcagaaagaagacattaagcgggtgtctccctattcatctttgaccaaagaatgggcacagacttgcctctgttgctgtttgcagcaagagtacagttttttactcatgtcagactttgttgtgttagccgtctccgttctgtttatggcttatggctgcagccctctctttgtgtacttggtgccttatgctttgagtgttggagtgagtcatcagcaagctgcttttcttatgtccatacttggagtgattgacattattggcaatatcacatttggatggctgaccgacagaaggtgtctgaagaattaccagtatgtttgctacctctttgccgtgggaatggatgggctctgctatctctgcctcccaatgcttcaaagtctccctctgctcgtgcctttctcttgtacctttggctactttgatggtgcctatgtgactttgatcccagtagtgaccacagagatagtggggaccacctctttgtcatcagcgcttggtgtggtatacttccttcacgcagtgccatacttggtgagcccacccatcgcaggacggctggtagataccaccggcagctacactgcagcattcctcctctgtggattttcaatgatatttagttctgtgttgcttggctttgctagacttataaagagaatgagaaaaacccagttgcagttcattgccaaagaatctgatcctaagctgcagctatggaccaatggatcagtggcttattctgtggcaagagaattagatcagaaacatggggagcctgtggctacagcagtgcctggctacagcctcacatgaccaaaggccttgagccccagaatcttcaggtttgagagaggtggggccaccagattcttcatgtttctgaaactttttattttggcagaaggattgccttccaaggaaattattattattgttttgttaacatattaatatttataagggaaaacagcacataataaggaaagctggactagcccagagccttctcatttgggatttgtgctcataactgaactcgtatcttttggtcaatgggcatagctctgtaagaaatgtaaggacacagctgatataattagctgtaattagggataatttcaaagcataaccaaagcagatgacactgggcagcagctttgttccagtctcaggcccttcatgttccctcctcagaaagaaaatggaaacattaacgtgtagctttgcttaccttgttctggttagagaagggaggtcagcttgggtgtggtggtgaagagtgaagatgccatactttttcatggtggagtttctcattagggttttacttgggattgttaaagaatacttgagattcttcaaaaagtggtgattaatatagaaagaaactcttattttttttttctcttagtcttccagccagcccttgcctctgcccaagggtagacaccactatgagaatccaaataatcatggaatgccatggttggaatagatcttaaagggcatctggtaagatccatttgaaattgtccactggaaaccgaaagctcttttcctaagactgggttccaggctctcacatttgttaccatcacatataatacttactctaaatttagcagaacacacttagtcacaaggacaacctctcaatcttacctgaaatgtcaacaacaccaaaacttcccgtcttttaccttcagagaagaagctcttacttagactgcagacgcattcctgttaggttggaaaaatgttggcagtattccaattgggcaggaactgaattcttgaatcagcaggtctctggtgagagttttctttgcagatcagacatttagttttatcattacccaaaagaggattggagggagtcagttgtctgaaaaatattatcctagagatattctaaaggtgagattcctttctccctgtgttaattcttgttccactatccactgctcttcatctctttatagataataattagaaatctactcattggattataagtttattcattctcaaatactccacttttctatggtttgggataatttctgagtcttcagattgaagagggaaggcatggagggaagaaaaagtccagatcccccagcttgtttccaaccattttaagtccaaagaattataatcctgaatctcacagtgtgtcacacctgtaataggagtaaattatgcaatcaattttaattaccaggagtttaaaatccaaatgtcaaggaactgttttgaccctgaaggctatttaatccactgtcccctacaaggcctcacaagtgctgggggaaaaaaaacagcaatgaggatgatcctgagttaatgtgtatgctccgcaagagagcttgcctataccttgattatttcataaaatcacatgttaatacattgctttcagaatgaaatactgacttgatctgataggagaaaatggtaatatttcatagttgttttccaaagacaaatttaaatgttgtctgttatctccttacttagtttaagaatttagttttgaaccccattgactttgtcatttgcaattttaaaaatatttgggactgggcatggtcgctcacgcctgtaatcccagcactttgggaggctgaggcgggtggatcatgaggtcaggagatcaagaccatcctggctaacatcgtgaaactccgtctctactaaaaatgcaaaaaattagccaggcgtggtggcgggcgcctgtagtcccagctactcatgaggctgaggccggacaatcgcttgaacccaggaggtggaggttgcagtgagccaaaatcatgccactgcactccaccctgggcgacagagcaagactccatctcaaaaaaaaaaaattggaaggtatctgtaaaatgtcaaagttaagatgaagttatatctgtttggaatagcactttgccctaaatatcatttcttgaattttcaagcctaaagatgtttaaaaatatgaatagttacaaatattcttatacatattttttatcatgatcacaacaaaattttgtttatgtggttctgcaatataatttctgtgaagtattacaagtatttatgaaaaataagcatagtgatcagaaattttaaagattttgtataaaaacatttgggagatttgactttatacatgcatagatttgcattttactttcccttttgaggcagcatttttagaaaatcagtaagaaaaatgtacatcttaaggtctactattttacatttctacacagaattttagtgttaatgttccatgtgtctatactgtttatttcaaaactgagaaattcatgggaatgatgtattttgtggaatcaagaacaaaattatagtgggataattttacatcttaaatatttctttctactactgtaagctctactttggaattatctgagtagaaaatcagaagacattatctaactttgtagatacactgtatgattgggctttttgttcagattgtaatttcattaatagatgaaatatttatgctaatattttcttatttcaaaagcaaaataaaatgaatttattgtcctgtgtttgg

SEQ ID NO: 265915 - DNA, 4617 bp, Artificial Sequence
  derived and/or modified sequence
tcagtctcgccggcggcccccgctcccggatccccagcgccctggccaagaagcttcctcggctccccctcttccctctccctgacacggttgtgcagagggcgcggtggctcagatacaggatttcgacatattggccggtttgctctcgagctcctgggctcaagcgatctgcccgctttagcctcccaaagtgatgggattacaggcgtgagccaccgtgcctggccataatttttaaaaatgtctagtcagatggcgagtaacccatgggccaggtagcgttctatgccaaccttgaatgccatcaggaagtcactggacagcaaactcttccaagatcataacttggctgttggagcaacctggaaaagaagaaaaaagaaaaaccatggcaaaagtaaatagagctcggtctacctcccctccagatggaggctggggctggatgattgtggctggctgtttccttgttaccatctgcacacgggcagtcacaagatgtatctcaattttttttgtggagttccagacatacttcactcaggattacgcacaaacggcatggatccattccattgtagattgtgtgaccatgctctgtgctccacttgggagtgttgtcagtaaccatttatcctgtcaagtgggaatcatgctgggtggcttgcttgcatctactggactcatcctgagctcatttgccacgagtctgaagcatctctacctcactctgggagttcttacaggtcttggatttgcactttgttactctccagctattgccatggttggcaagtacttcagcagacggaaagcccttgcttatggtatcgccatgtcaggaagtggcattggcaccttcatcctggctcctgtggttcagctccttattgaacagttttcctggcggggagccttactcattcttgggggctttgtcttgaatctctgtgtatgtggtgccttgatgaggccaattactcttaaagaggaccacacaactccagagcagaaccatgtgtgtagaactcagaaagaagacattaagcgggtgtctccctattcatctttgaccaaagaatgggcacagacttgcctctgttgctgtttgcagcaagagtacagttttttactcatgtcagactttgttgtgttagccgtctccgttctgtttatggcttatggctgcagccctctctttgtgtacttggtgccttatgctttgagtgttggagtgagtcatcagcaagctgcttttcttatgtccatacttggagtgattgacattattggcaatatcacatttggatggctgaccgacagaaggtgtctgaagaattaccagtatgtttgctacctctttgccgtgggaatggatgggctctgctatctctgcctcccaatgcttcaaagtctccctctgctcgtgcctttctcttgtacctttggctactttgatggtgcctatgtgactttgatcccagtagtgaccacagagatagtggggaccacctctttgtcatcagcgcttggtgtggtatacttccttcacgcagtgccatacttggtgagcccacccatcgcaggacggctggtagataccaccggcagctacactgcagcattcctcctctgtggattttcaatgatatttagttctgtgttgcttggctttgctagacttataaagagaatgagaaaaacccagttgcagttcattgccaaagaatctgatcctaagctgcagctatggaccaatggatcagtggcttattctgtggcaagagaattagatcagaaacatggggagcctgtggctacagcagtgcctggctacagcctcacatgaccaaaggccttgagccccagaatcttcaggtttgagagaggtggggccaccagattcttcatgtttctgaaactttttattttggcagaaggattgccttccaaggaaattattattattgttttgttaacatattaatatttataagggaaaacagcacataataaggaaagctggactagcccagagccttctcatttgggatttgtgctcataactgaactcgtatcttttggtcaatgggcatagctctgtaagaaatgtaaggacacagctgatataattagctgtaattagggataatttcaaagcataaccaaagcagatgacactgggcagcagctttgttccagtctcaggcccttcatgttccctcctcagaaagaaaatggaaacattaacgtgtagctttgcttaccttgttctggttagagaagggaggtcagcttgggtgtggtggtgaagagtgaagatgccatactttttcatggtggagtttctcattagggttttacttgggattgttaaagaatacttgagattcttcaaaaagtggtgattaatatagaaagaaactcttattttttttttctcttagtcttccagccagcccttgcctctgcccaagggtagacaccactatgagaatccaaataatcatggaatgccatggttggaatagatcttaaagggcatctggtaagatccatttgaaattgtccactggaaaccgaaagctcttttcctaagactgggttccaggctctcacatttgttaccatcacatataatacttactctaaatttagcagaacacacttagtcacaaggacaacctctcaatcttacctgaaatgtcaacaacaccaaaacttcccgtcttttaccttcagagaagaagctcttacttagactgcagacgcattcctgttaggttggaaaaatgttggcagtattccaattgggcaggaactgaattcttgaatcagcaggtctctggtgagagttttctttgcagatcagacatttagttttatcattacccaaaagaggattggagggagtcagttgtctgaaaaatattatcctagagatattctaaaggtgagattcctttctccctgtgttaattcttgttccactatccactgctcttcatctctttatagataataattagaaatctactcattggattataagtttattcattctcaaatactccacttttctatggtttgggataatttctgagtcttcagattgaagagggaaggcatggagggaagaaaaagtccagatcccccagcttgtttccaaccattttaagtccaaagaattataatcctgaatctcacagtgtgtcacacctgtaataggagtaaattatgcaatcaattttaattaccaggagtttaaaatccaaatgtcaaggaactgttttgaccctgaaggctatttaatccactgtcccctacaaggcctcacaagtgctgggggaaaaaaaacagcaatgaggatgatcctgagttaatgtgtatgctccgcaagagagcttgcctataccttgattatttcataaaatcacatgttaatacattgctttcagaatgaaatactgacttgatctgataggagaaaatggtaatatttcatagttgttttccaaagacaaatttaaatgttgtctgttatctccttacttagtttaagaatttagttttgaaccccattgactttgtcatttgcaattttaaaaatatttgggactgggcatggtcgctcacgcctgtaatcccagcactttgggaggctgaggcgggtggatcatgaggtcaggagatcaagaccatcctggctaacatcgtgaaactccgtctctactaaaaatgcaaaaaattagccaggcgtggtggcgggcgcctgtagtcccagctactcatgaggctgaggccggacaatcgcttgaacccaggaggtggaggttgcagtgagccaaaatcatgccactgcactccaccctgggcgacagagcaagactccatctcaaaaaaaaaaaattggaaggtatctgtaaaatgtcaaagttaagatgaagttatatctgtttggaatagcactttgccctaaatatcatttcttgaattttcaagcctaaagatgtttaaaaatatgaatagttacaaatattcttatacatattttttatcatgatcacaacaaaattttgtttatgtggttctgcaatataatttctgtgaagtattacaagtatttatgaaaaataagcatagtgatcagaaattttaaagattttgtataaaaacatttgggagatttgactttatacatgcatagatttgcattttactttcccttttgaggcagcatttttagaaaatcagtaagaaaaatgtacatcttaaggtctactattttacatttctacacagaattttagtgttaatgttccatgtgtctatactgtttatttcaaaactgagaaattcatgggaatgatgtattttgtggaatcaagaacaaaattatagtgggataattttacatcttaaatatttctttctactactgtaagctctactttggaattatctgagtagaaaatcagaagacattatctaactttgtagatacactgtatgattgggctttttgttcagattgtaatttcattaatagatgaaatatttatgctaatattttcttatttcaaaagcaaaataaaatgaatttattgtcctgtg

SEQ ID NO: 265916 - DNA, 340 bp, Artificial Sequence
  derived and/or modified sequence
gaaatggaggtgttctgacctatgatcagacaaggtaggtcagaaaccagctccagaaaccaggaaaaagttcctgccttggggagagaaagaaataggtgaaaggagggcagaaaaggagccctgcctgttttgctcgttgttgcctcactagcccataccagagtgcagggtgcgctgtaagccgtgaccgcatcacagatcatcagcatgcagagatggcgagtaacccatgggccaggtagcgttctatgccaaccttgaatgccatcaggaagtcactggacagcaaactcttccaagatcataacttggctgttggagcaacctggaaaagaag

SEQ ID NO: 265917 - DNA, 1423 bp, Artificial Sequence
  derived and/or modified sequence
tcagtctcgccggcggcccccgctcccggatccccagcgccctggccaagaagcttcctcggctccccctcttccctctccctgacacggttgtgcagagggcgcggtggctcagatacaggatttcgacatattggccggtttgctctcgagctcctgggctcaagcgatctgcccgctttagcctcccaaagtgatgggattacaggcgtgagccaccgtgcctggccataatttttaaaaatgtctagtcagatggcgagtaacccatgggccaggtagcgttctatgccaaccttgaatgccatcaggaagtcactggacagcaaactcttccaagatcataacttggctgttggagcaacctggaaaagaagaaaaaagaaaaaccatggcaaaagtaaatagagctcggtctacctcccctccagatggaggctggggctggatgattgtggctggctgtttccttgttaccatctgcacacgggcagtcacaagatgtatctcaattttttttgtggagttccagacatacttcactcaggattacgcacaaacggcatggatccattccattgtagattgtgtgaccatgctctgtgctccacttgggagtgttgtcagtaaccatttatcctgtcaagtgggaatcatgctgggtggcttgcttgcatctactggactcatcctgagctcatttgccacgagtctgaagcatctctacctcactctgggagttcttacaggtcttggatttgcactttgttactctccagctattgccatggttggcaagtacttcagcagacggaaagcccttgcttatggtatcgccatgtcaggaagtggcattggcaccttcatcctggctcctgtggttcagctccttattgaacagttttcctggcggggagccttactcattcttgggggctttgtcttgaatctctgtgtatgtggtgccttgatgaggccaattactcttaaagaggaccacacaactccagagcagaaccatgtgtgtagaactcagaaagaagacattaagcgggtgtctccctattcatctttgaccaaagaatgggcacagacttgcctctgttgctgtttgcagcaagagtacagttttttactcatgtcagactttgttgtgttagccgtctccgttctgtttatggcttatggctgcagccctctctttgtgtacttggtgccttatgctttgagtgttggagtgagtcatcagcaagctgcttttcttatgtccatacttggagtgattgacattattggcaatatcacatttggatggctgaccgacagaagattttgtataaaaacatttggcatttttagaaaatcagtaagaaaaatgtacatcttaaggtctactattttacatttctacacagaattttag

SEQ ID NO: 265918 - DNA, 1461 bp, Artificial Sequence
  derived and/or modified sequence
atggccaaggtgaacagagccagaagcaccagcccccccgacggcggctggggctggatgatcgtggccggctgcttcctggtgaccatctgcaccagagccgtgaccagatgcatcagcatcttcttcgtggagttccagacctacttcacccaggactacgcccagaccgcctggatccacagcatcgtggactgcgtgaccatgctgtgcgcccccctgggcagcgtggtgagcaaccacctgagctgccaggtgggcatcatgctgggcggcctgctggccagcaccggcctgatcctgagcagcttcgccaccagcctgaagcacctgtacctgaccctgggcgtgctgaccggcctgggcttcgccctgtgctacagccccgccatcgccatggtgggcaagtacttcagcagaagaaaggccctggcctacggcatcgccatgagcggcagcggcatcggcaccttcatcctggcccccgtggtgcagctgctgatcgagcagttcagctggagaggcgccctgctgatcctgggcggcttcgtgctgaacctgtgcgtgtgcggcgccctgatgagacccatcaccctgaaggaggaccacaccacccccgagcagaaccacgtgtgcagaacccagaaggaggacatcaagagagtgagcccctacagcagcctgaccaaggagtgggcccagacctgcctgtgctgctgcctgcagcaggagtacagcttcctgctgatgagcgacttcgtggtgctggccgtgagcgtgctgttcatggcctacggctgcagccccctgttcgtgtacctggtgccctacgccctgagcgtgggcgtgagccaccagcaggccgccttcctgatgagcatcctgggcgtgatcgacatcatcggcaacatcaccttcggctggctgaccgacagaagatgcctgaagaactaccagtacgtgtgctacctgttcgccgtgggcatggacggcctgtgctacctgtgcctgcccatgctgcagagcctgcccctgctggtgcccttcagctgcaccttcggctacttcgacggcgcctacgtgaccctgatccccgtggtgaccaccgagatcgtgggcaccaccagcctgagcagcgccctgggcgtggtgtacttcctgcacgccgtgccctacctggtgagcccccccatcgccggcagactggtggacaccaccggcagctacaccgccgccttcctgctgtgcggcttcagcatgatcttcagcagcgtgctgctgggcttcgccagactgatcaagagaatgagaaagacccagctgcagttcatcgccaaggagagcgaccccaagctgcagctgtggaccaacggcagcgtggcctacagcgtggccagagagctggaccagaagcacggcgagcccgtggccaccgccgtgcccggctacagcctgacctag

SEQ ID NO: 265919 - DNA, 1551 bp, Artificial Sequence
  derived and/or modified sequence
atgcccagcggcagccactggaccgccaacagcagcaagatcatcacctggctgctggagcagcccggcaaggaggagaagagaaagaccatggccaaggtgaacagagccagaagcaccagcccccccgacggcggctggggctggatgatcgtggccggctgcttcctggtgaccatctgcaccagagccgtgaccagatgcatcagcatcttcttcgtggagttccagacctacttcacccaggactacgcccagaccgcctggatccacagcatcgtggactgcgtgaccatgctgtgcgcccccctgggcagcgtggtgagcaaccacctgagctgccaggtgggcatcatgctgggcggcctgctggccagcaccggcctgatcctgagcagcttcgccaccagcctgaagcacctgtacctgaccctgggcgtgctgaccggcctgggcttcgccctgtgctacagccccgccatcgccatggtgggcaagtacttcagcagaagaaaggccctggcctacggcatcgccatgagcggcagcggcatcggcaccttcatcctggcccccgtggtgcagctgctgatcgagcagttcagctggagaggcgccctgctgatcctgggcggcttcgtgctgaacctgtgcgtgtgcggcgccctgatgagacccatcaccctgaaggaggaccacaccacccccgagcagaaccacgtgtgcagaacccagaaggaggacatcaagagagtgagcccctacagcagcctgaccaaggagtgggcccagacctgcctgtgctgctgcctgcagcaggagtacagcttcctgctgatgagcgacttcgtggtgctggccgtgagcgtgctgttcatggcctacggctgcagccccctgttcgtgtacctggtgccctacgccctgagcgtgggcgtgagccaccagcaggccgccttcctgatgagcatcctgggcgtgatcgacatcatcggcaacatcaccttcggctggctgaccgacagaagatgcctgaagaactaccagtacgtgtgctacctgttcgccgtgggcatggacggcctgtgctacctgtgcctgcccatgctgcagagcctgcccctgctggtgcccttcagctgcaccttcggctacttcgacggcgcctacgtgaccctgatccccgtggtgaccaccgagatcgtgggcaccaccagcctgagcagcgccctgggcgtggtgtacttcctgcacgccgtgccctacctggtgagcccccccatcgccggcagactggtggacaccaccggcagctacaccgccgccttcctgctgtgcggcttcagcatgatcttcagcagcgtgctgctgggcttcgccagactgatcaagagaatgagaaagacccagctgcagttcatcgccaaggagagcgaccccaagctgcagctgtggaccaacggcagcgtggcctacagcgtggccagagagctggaccagaagcacggcgagcccgtggccaccgccgtgcccggctacagcctgacctag

SEQ ID NO: 265920 - DNA, 78 bp, Artificial Sequence
  derived and/or modified sequence
atgcccagcggcagccactggaccgccaacagcagcaagatcatcacctggctgctggagcagcccggcaaggagtag

SEQ ID NO: 265921 - DNA, 453 bp, Artificial Sequence
  derived and/or modified sequence
atgagacccatcaccctgaaggaggaccacaccacccccgagcagaaccacgtgtgcagaacccagaaggaggacatcaagagagtgagcccctacagcagcctgaccaaggagtgggcccagacctgcctgtgctgctgcctgcagcaggagtacagcttcctgctgatgagcgacttcgtggtgctggccgtgagcgtgctgttcatggcctacggctgcagccccctgttcgtgtacctggtgccctacgccctgagcgtgggcgtgagccaccagcaggccgccttcctgatgagcatcctgggcgtgatcgacatcatcggcaacatcaccttcggctggctgaccgacagaagattctgcatcaagaccttcggcatcttcagaaagagcgtgagaaagatgtacatcctgagaagcaccatcctgcacttctacaccgagttctag

SEQ ID NO: 265922 - protein, 237 aa, Artificial Sequence
  derived and/or modified sequence
MERNDIINFKALEKELQAALTADEKYKRENAAKLRAVEQRVASYEEFRGIVLASHLKPLERKDKMGGKRTVPWNCHTIQGRTFQDVATEISPEKAPLQPETSADFYRDWRRHLPSGPERYQALLQLGGPRLGCLFQTDVGFGLLGELLVALADHVGPADRAAVLGILCSLASTGRFTLNLSLLSRAERESCKGLFQKLQAMGNPRSVKEGLSWEEQGLEEQSGGLQEEERLLQELLE

SEQ ID NO: 265923 - protein, 242 aa, Artificial Sequence
  derived and/or modified sequence
MERNDIINFKALEKELQAALTADEKYKRENAAKLRAVEQRVASYEEFRGIVLASHLKPLERKDKMGGKRTVPWNCHTIQGRTFQDVATEISPEKAPLQPETSADFYRDWRRHLPSGPERYQALLQLGGPRLGCLFQTDVGFGLLGELLVALADHVGPADRAAVLGILCSLASTGRFTLNLSLLSRAERESCKGLFQKLQAMGNPRSVKEGLSWEEQGLEEQSGGLQEEERLLQELLELYQVD

SEQ ID NO: 265924 - DNA, 714 bp, Artificial Sequence
  derived and/or modified sequence
atggagagaaacgacatcatcaacttcaaggccctggagaaggagctgcaggccgccctgaccgccgacgagaagtacaagagagagaacgccgccaagctgagagccgtggagcagagagtggccagctacgaggagttcagaggcatcgtgctggccagccacctgaagcccctggagagaaaggacaagatgggcggcaagagaaccgtgccctggaactgccacaccatccagggcagaaccttccaggacgtggccaccgagatcagccccgagaaggcccccctgcagcccgagaccagcgccgacttctacagagactggagaagacacctgcccagcggccccgagagataccaggccctgctgcagctgggcggccccagactgggctgcctgttccagaccgacgtgggcttcggcctgctgggcgagctgctggtggccctggccgaccacgtgggccccgccgacagagccgccgtgctgggcatcctgtgcagcctggccagcaccggcagattcaccctgaacctgagcctgctgagcagagccgagagagagagctgcaagggcctgttccagaagctgcaggccatgggcaaccccagaagcgtgaaggagggcctgagctgggaggagcagggcctggaggagcagagcggcggcctgcaggaggaggagagactgctgcaggagctgctggagtag

SEQ ID NO: 265925 - DNA, 729 bp, Artificial Sequence
  derived and/or modified sequence
atggagagaaacgacatcatcaacttcaaggccctggagaaggagctgcaggccgccctgaccgccgacgagaagtacaagagagagaacgccgccaagctgagagccgtggagcagagagtggccagctacgaggagttcagaggcatcgtgctggccagccacctgaagcccctggagagaaaggacaagatgggcggcaagagaaccgtgccctggaactgccacaccatccagggcagaaccttccaggacgtggccaccgagatcagccccgagaaggcccccctgcagcccgagaccagcgccgacttctacagagactggagaagacacctgcccagcggccccgagagataccaggccctgctgcagctgggcggccccagactgggctgcctgttccagaccgacgtgggcttcggcctgctgggcgagctgctggtggccctggccgaccacgtgggccccgccgacagagccgccgtgctgggcatcctgtgcagcctggccagcaccggcagattcaccctgaacctgagcctgctgagcagagccgagagagagagctgcaagggcctgttccagaagctgcaggccatgggcaaccccagaagcgtgaaggagggcctgagctgggaggagcagggcctggaggagcagagcggcggcctgcaggaggaggagagactgctgcaggagctgctggagctgtaccaggtggactag

SEQ ID NO: 265926 - DNA, 849 bp, Artificial Sequence
  derived and/or modified sequence
gctaggcaaccacagctgcgggcgtggtctgcgcggggttgccctcctgttctggtttatcaggggatccccaaagaaagcaaggggaccaaggccgggactgctggggtgaaggtccgggaggctgagcacaggccatggaaaggaatgacatcatcaacttcaaggctttggagaaagagctgcaggctgcactcactgctgatgagaagtacaaacgggagaatgctgccaagttacgggcagtggaacagagggtggcttcctatgaggagttcaggggtattgtccttgcatcacatctgaagccactggagcggaaggataagatgggaggaaagagaactgtgccctggaactgtcacactattcagggaaggaccttccaggatgtggccactgaaatctccccggagaaagcccccctccagcccgagacgtctgctgacttctatcgtgattggcgacgacacttgccaagtgggccagagcgctaccaggctctactgcagcttgggggtccaaggctcggctgcctcttccagacagatgtgggatttggacttcttggggagctgctggtggcactggctgatcacgtggggccggctgaccgggcagcggtgctggggatcctatgcagcctggcgagcactgggcgcttcaccctgaacctaagcctgctgagccgggcagagagagagagctgcaagggcttgtttcagaagctgcaagccatgggcaaccccagatccgtgaaggaggggctcagctgggaggagcagggtctggaggagcagtctggtgggctccaggaggaggagaggctcctgcaggagctgctggagc

SEQ ID NO: 265927 - DNA, 859 bp, Artificial Sequence
  derived and/or modified sequence
atcaggggatccccaaagaaagcaaggggaccaaggccgggactgctggggtgaaggcacaggccatggaaaggaatgacatcatcaacttcaaggctttggagaaagagctgcaggctgcactcactgctgatgagaagtacaaacgggagaatgctgccaagttacgggcagtggaacagagggtggcttcctatgaggagttcaggggtattgtccttgcatcacatctgaagccactggagcggaaggataagatgggaggaaagagaactgtgccctggaactgtcacactattcagggaaggaccttccaggatgtggccactgaaatctccccggagaaagcccccctccagcccgagacgtctgctgacttctatcgtgattggcgacgacacttgccaagtgggccagagcgctaccaggctctactgcagcttgggggtccaaggctcggctgcctcttccagacagatgtgggatttggacttcttggggagctgctggtggcactggctgatcacgtggggccggctgaccgggcagcggtgctggggatcctatgcagcctggcgagcactgggcgcttcaccctgaacctaagcctgctgagccgggcagagagagagagctgcaagggcttgtttcagaagctgcaagccatgggcaaccccagatccgtgaaggaggggctcagctgggaggagcagggtctggaggagcagtctggtgggctccaggaggaggagaggctcctgcaggagctgctggagctgtaccaggttgactgatgcggcaagctaccctcagaggtcccagtggtcactggaggcagttttttggttgttgtcttggg

SEQ ID NO: 265928 - DNA, 3397 bp, Artificial Sequence
  derived and/or modified sequence
atcaggggatccccaaagaaagcaaggggaccaaggccgggactgctggggtgaaggtccgggaggctgagtaaggggacggaagggcacaggccatggaaaggaatgacatcatcaacttcaaggctttggagaaagagctgcaggctgcactcactgctgatgagaagtacaaacgggagaatgctgccaagttacgggcagtggaacagagggtggcttcctatgaggagttcaggggtattgtccttgcatcacatctgaagccactggagcggaaggataagatgggaggaaagagaactgtgccctggaactgtcacactattcagggaaggaccttccaggatgtggccactgaaatctccccggagaaagcccccctccagcccgagacgtctgctgacttctatcgtgattggcgacgacacttgccaagtgggccagagcgctaccaggctctactgcagcttgggggtccaaggctcggctgcctcttccagacagatgtgggatttggacttcttggggagctgctggtggcactggctgatcacgtggggccggctgaccgggcagcggtgctggggatcctatgcagcctggcgagcactgggcgcttcaccctgaacctaagcctgctgagccgggcagagagagagagctgcaagggcttgtttcagaagctgcaagccatgggcaaccccagatccgtgaaggaggggctcagctgggaggagcagggtctggaggagcagtctggtgggctccaggaggaggagaggctcctgcaggagctgctggagctgtaccaggttgactgatgcggcaagctaccctcagaggtcccagtggtcactggaggcagttttttggttgttgtcttgggggttctgcaggaccataataagaaacccacacctggttcccttctcaacttggaattttcagagcaaaaacaggaatcaagtcttccccacttctccagtccctcagtgtctcgctgttttgaactgtgtgtatccatggacagtcaagagctcaggaagttgagagcggttttgtttcccacccttagagtctgccaagcctctagcccactggccttgagagatgagtgtgtgcccaaccaaatgctggctataccagttacagcctccactcataaaagggaaaaagcaaaatctttatggtaaacaaacactgatctccacagctcttaacaagaatgtttatagccccaaaccaatgaatggacatgtaatcaacaaatgatcaaatactacatcatttgaggtgttgaattttcccctagagactcagttcttgtgcaggttgggcctgggaaagtcccaagccatcagctcaggtccagccagcctcccggatggccagatatgcaggagggtgggtttccttcatcccccaggttgatgaaagacttttccaccaggctggcagggcagggcctggagcactgaggcagagatctccctgcccgagcacctcggcccgcccttctcattccggtttcctttgacccattcttgggtgagcgccagtgttctagaaaggggagtaaaggccaggttctagaatggctttccccccccaccctgagatcaggtctggaatgttagaagggcatcttgtacatccactgggaataaattgccttgcacttggcggcttcctctgcagattgttgctgcttttcctggctgcataatcctttcctcatctagaggcttccgcttagcagagctttctaggagccctatgagcctttaatgccctggttttgccctgcccctctgacccctgcctccttcaggtatgcacctggccctcaccactgtgctcctgtgggcatgggggctccaggcctttgaaattgtggagaaggaaaacatttttcagaggaccccctgccctgctttcctgatgtttgaaaatgcagcctacctggccgacatgagctttgagcttccctgtcactgcaaacccgaagaggtgccagctgtagtctggttctaccaaaagcacctaggtagcagccacaccaaagtgctgacggactttgatgggcgggtgctgacggaggcagcccaggtacgtgtgggcagcgacatgctgacccgcttcagcatccgcatgttcagcttgttggttttcagggctcagtctgaggactcaggcctgtacttctgcggcacccgcaagggggactacttttacgcctacgatgtggacatccagaacagtgagggaatggtggccactttccaggacaagggccaggagccctttgcagatgaatactatgggcacctccatgtcttcaccaccttctgggaatggaccccctgtgaccgctgcggagtgcgtggggagcagtggcgcatcggcctctgctacctgcagagcccagacctctccccacgctacctcaaggccgtgcccgatgtggtgtcttgtggctcaagggctgtgccaaggaagctgcggaccaaggccagggaccacacgcctgaggtgctggttcggagctgcttagtaccctgtgagaagacaaagaccatccgggagggcgtgctggccatcattaactatgtgtccaaagtgggcagccggccctgggtgccccaggtgcccattcagttccaccagcagagactgggccatggactcatcatctcctgtcctggggcccggccagagcatgcagtggcctgggacaaagaccgccagcacctctaccgcacacagtacctgaagggtgtcaacaggtccatgagggtgttcattgaccacggcaaccagctccacatccgcttcacccagctggatgaccggggcatctactattgctggaggcagggtgtgctagttgctggcttccggctgggtgtgacatctcatgggcactacccagcctcgttctcagatcctgagactcgctcggctgtggagctcaccctgataggctacctgctcatcacagcagtctttgtcaccattcacttctgtcgttgctgctgctacttatttcactgttgtcccagcttctccccctaggagctctcttcagctctgaagaccagttgtccttcaatgtgtttgttaaatgataccagatgtctctgggtgggtaccctgggttgggacaggtggtaggaacatgtggacaaatctgttacagcctgctccccattttcatgggcaggtctgggacctgatctgagaagtggaggggcctgaggctggtgggagattggggactgagctcaggatggaagtagggcacatgtgtttcctgacttcacatttaggtcagagaaggaaagtgtgaactcagatttatccagtggtaaacactgatcagtgttgaatcatg

SEQ ID NO: 265929 - DNA, 714 bp, Artificial Sequence
  derived and/or modified sequence
atggagagaaacgatatcatcaacttcaaggccttggaaaaagaattgcaggcagccctgaccgccgacgagaaatacaagcgcgaaaatgccgcaaagttgcgagccgtggagcagagagtggcttcctatgaggaattccgaggcatcgtattggcctctcatcttaagccattagagcgtaaggacaagatgggtggcaaaagaacagtgccctggaactgtcatacaatacagggccggaccttccaggatgtggcaacagagatctcccccgaaaaagcccctctacagccagagacgagcgccgacttctaccgcgattggcgtcgacacctaccttctggccccgagaggtaccaggcgttgctacagctcggcggacctaggttgggctgcctgttccaaaccgatgtcggattcgggctgttaggagagctgttggtggctctcgcggatcacgtgggccccgcagatagagccgctgtgctcggcatcctgtgttccctggcgagtaccggtcgatttaccttaaacctgtcccttctgtcaagagcagaaagggaatcatgcaaaggactgtttcagaagctgcaggccatgggcaatccaagatctgttaaggagggcctttcttgggaagagcaaggattggaagagcaatccggcgggctccaagaggaagaaagactactgcaggaactgcttgaatag

SEQ ID NO: 265930 - DNA, 729 bp, Artificial Sequence
  derived and/or modified sequence
atggaacgaaatgacatcatcaattttaaagctctggagaaagaactccaagctgcacttaccgccgatgaaaaatataagagagaaaacgccgctaagctcagggccgtcgagcagagggtcgcgtcttacgaggagtttcgaggtattgtccttgcctcacaccttaagcccctggagcggaaggacaaaatggggggcaaacggacagtgccctggaattgccacacaatccagggtagaacgtttcaagacgtcgcaactgaaatctcccctgagaaagctccactccagccagagacaagtgccgatttttatcgcgactggagacggcatctaccctcagggcccgaacggtaccaggctctccttcagctgggagggccacggctcggttgcctgtttcagacagatgtcggtttcggtcttctaggagagctcttggtggcgcttgcagaccatgtaggccccgcagaccgggcagccgtactcggtatcttgtgcagtctggcaagtactggaagatttactttgaacctgtcactgctctcaagggccgaaagagagagctgtaaggggttattccagaaactgcaagccatgggaaatccacgatctgtgaaagagggactatcttgggaagagcaagggcttgaggagcagagcggcggcctgcaggaggaagagcgccttctacaggagttactggagctttaccaggtggattag

SEQ ID NO: 265931 - DNA, 729 bp, Artificial Sequence
  derived and/or modified sequence
atggagcgcaacgacatcattaattttaaagctctagagaaggaattacaggctgcgttgactgctgacgagaaatacaagcgagaaaacgccgccaaactccgcgctgtggagcagcgagttgcttcctacgaggaattccgcggtattgttctggccagtcacctgaaacctctcgaaaggaaggacaagatgggcggtaagagaacagtgccatggaactgccataccatccagggaaggacttttcaggatgtcgcaaccgagattagtcctgagaaagctccacttcagccagagactagcgcagacttttaccgcgactggcgcagacacctgccttccgggccagagagataccaagccctcctgcagctgggcgggcctcggctgggctgtctgttccaaactgacgttggtttcggcctgctgggtgaattactggtagcactggccgatcatgtgggaccggccgaccgggccgctgtcctcggtatcctgtgttcactggcctccacaggacgatttacgctgaacctttctcttcttagcagagccgagagagagtcctgcaaagggctgtttcagaaactccaggctatggggaacccaaggtccgtgaaagagggactgtcttgggaagagcaaggattggaggaacagtctggtgggctccaggaggaggaacgccttctgcaggagttactcgaactatatcaggtggactag

SEQ ID NO: 265932 - DNA, 714 bp, Artificial Sequence
  derived and/or modified sequence
atggagagaaatgacatcatcaacttcaaggccctggagaaggagctgcaggccgccctgacagcagatgagaagtacaagagagaaaatgctgccaagctgcgggctgtggagcagagggtggccagctatgaggagttccggggcatcgtgctggccagccacctgaagcccctggagaggaaggacaagatgggcggcaagaggacagtgccctggaactgccacaccatccagggccgcaccttccaggatgtggccacagagatcagccctgagaaggcccccctgcagcctgagaccagcgctgacttctacagagactggaggaggcacctgcccagcggccctgagcgctaccaggccctgctgcagctgggcggcccccggctgggctgcctcttccagacagatgtgggcttcggcctgctgggggagctgctggtggccctggccgaccacgtgggccctgctgacagagctgctgtgctgggcatcctgtgcagcctggccagcacaggccgcttcaccctgaacctgagcctgctgagcagagctgagcgggagagctgcaagggcctcttccagaagctgcaggccatgggcaaccccaggtctgtgaaggagggcctgtcctgggaggagcagggcctggaggagcagagcggcggcctgcaggaggaggagcggctgctgcaggagctgctggagtag

SEQ ID NO: 265933 - DNA, 729 bp, Artificial Sequence
  derived and/or modified sequence
atggagagaaatgacatcatcaacttcaaggccctggagaaggagctgcaggccgccctgacagcagatgagaagtacaagagagaaaatgctgccaagctgcgggctgtggagcagagggtggccagctatgaggagttccggggcatcgtgctggccagccacctgaagcccctggagaggaaggacaagatgggcggcaagaggacagtgccctggaactgccacaccatccagggccgcaccttccaggatgtggccacagagatcagccctgagaaggcccccctgcagcctgagaccagcgctgacttctacagagactggaggaggcacctgcccagcggccctgagcgctaccaggccctgctgcagctgggcggcccccggctgggctgcctcttccagacagatgtgggcttcggcctgctgggggagctgctggtggccctggccgaccacgtgggccctgctgacagagctgctgtgctgggcatcctgtgcagcctggccagcacaggccgcttcaccctgaacctgagcctgctgagcagagctgagcgggagagctgcaagggcctcttccagaagctgcaggccatgggcaaccccaggtctgtgaaggagggcctgtcctgggaggagcagggcctggaggagcagagcggcggcctgcaggaggaggagcggctgctgcaggagctgctggagctgtaccaggtggactag

SEQ ID NO: 265934 - DNA, 714 bp, Artificial Sequence
  derived and/or modified sequence
atggagcggaacgacatcatcaacttcaaggccctggagaaggagcttcaggctgcgttgaccgccgacgagaagtacaagagagagaacgctgccaaactcagggctgtcgagcaaagggtggcctcttatgaggaattcaggggtatcgtccttgcttcccatttaaaaccattggaaagaaaggataagatgggcggcaagcgtactgtcccctggaactgtcacaccatccagggccgaacttttcaggatgtggctacggaaatttcaccagaaaaagcacccctgcagcctgagacgagtgccgacttttacagagattggcgccgtcacttgccgtccggcccggaacggtaccaggccttgttgcagttgggaggtccgcgtctcggatgtcttttccagaccgacgttggcttcggtctgttaggggagctgctcgtcgccctggccgatcacgtgggccccgccgacagggctgcagtgctgggcatcctctgctctctggcatctaccgggcgatttacactaaacttatcactgctgagtagagcagagagagaaagctgcaagggtctcttccagaaactgcaggcgatgggaaaccctaggagtgtgaaggagggtttatcctgggaagaacaaggcctggaagaacagtccggaggattacaggaggaagaaaggcttctacaggagcttctggagtag

SEQ ID NO: 265935 - DNA, 729 bp, Artificial Sequence
  derived and/or modified sequence
atggagcggaacgacatcatcaacttcaaggccctggagaaggagcttcaggctgctctgactgcagacgaaaaatataaacgcgagaatgccgcaaagctcagagcggtggagcagcgagtggccagttacgaggaatttcgcggaattgtcctcgccagccacttgaaaccgttggagcggaaggacaagatgggcggaaagcggacggtgccctggaattgtcacacaattcaggggagaacctttcaggacgtggcaaccgagatcagtcccgagaaggcaccactgcagccggaaaccagcgctgacttctatcgggattggaggagacatttgccaagtggacctgagagataccaggcattgctccagctgggcggaccaaggttaggttgtctcttccagactgacgtggggtttggtctattaggagagctgttggtggccctggcagatcacgtggggcccgccgacagagcagccgttctgggaatactgtgtagcttggccagcacaggacgcttcaccctgaatttaagtctattatcccgggctgaaagggagtcgtgcaaaggtcttttccagaaactgcaggcaatggggaacccccgaagcgtgaaagaggggctttcctgggaggagcaaggtctcgaggaacaatctggcgggctgcaagaagaggagagactgcttcaggaacttttggaactttatcaggtcgattag

SEQ ID NO: 265936 - DNA, 729 bp, Artificial Sequence
  derived and/or modified sequence
atggagcggaacgacatcatcaacttcaaggccctggagaaggagctgcaagccgcactcacggcagacgagaaatacaagcgggaaaatgccgccaagttgcgcgctgttgagcagagggtggccagctatgaagagttcaggggtattgtgttagccagccatctgaagcccctcgaacgcaaagataaaatgggcgggaagcgcacagttccttggaactgtcataccattcaaggacgtactttccaggacgtggccaccgaaatttcccccgagaaagccccgttacagcctgagactagtgccgacttttaccgcgactggcgacgccatctgccgtctggcccagagcggtaccaagcccttttgcagctgggcggtccaagactaggatgcttgtttcagaccgacgtaggcttcggtttgctgggcgaactgttggtggccctcgccgaccacgtggggcctgctgacagggctgccgtgcttggcatcctgtgttccttggcgagcacaggcaggttcactctcaacctgagccttctatctcgcgccgaaagggagtcttgtaaaggtctgtttcaaaaacttcaggccatgggcaatcccaggagtgtgaaagagggactgtcttgggaagaacagggcttggaggagcaatcagggggccttcaggaagaggagcggctgctacaggagttgttggagttatatcaggtggactag

SEQ ID NO: 265937 - DNA, 714 bp, Artificial Sequence
  derived and/or modified sequence
atggaaagaaacgacatcatcaattttaaagctctggagaaagagctgcaggcagccttgacggctgacgaaaagtataagcgcgaaaatgcagccaaactgagagccgtagaacagagagttgcaagctacgaggaattcagagggattgttctcgcgtctcatctgaagcctcttgaaaggaaggacaaaatgggaggaaagcgcacagtgccttggaactgtcacacaattcagggtcggacgttccaggacgtcgctacggagatctctcctgaaaaggcccctctgcagcctgaaacctcggctgacttctatagagactggcgcagacacttaccctccggtcccgaacgataccaggctctactgcagctcgggggtccaaggctgggatgtctgttccagactgatgtgggattcggcctcctgggggaacttttagtggccttggccgaccatgtggggccagccgacagagccgcagttctcggaatactgtgctccctggcttctactgggagattcaccctgaacctgtcactcctgagtagagcggagagagaatcctgcaaagggctgttccagaagctccaggcaatgggtaatccaaggtcagtcaaagagggtctgagttgggaagaacaagggttggaagaacaatcaggcggattgcaagaggaagaacggttgctacaggagctgctggagtag

SEQ ID NO: 265938 - DNA, 729 bp, Artificial Sequence
  derived and/or modified sequence
atggagcgcaacgacataattaacttcaaagctcttgagaaggaactgcaggctgctctcaccgccgacgaaaagtacaaacgagaaaacgctgccaaactgcgagccgtggagcaacgggttgccagttacgaagagtttaggggcatagttctggcctcgcatctgaaaccactggaaaggaaagataagatgggcggaaagcgaacagtcccatggaactgccacactatccagggcaggacttttcaggatgtggctactgagatctcccccgagaaagcaccactgcagccggaaacgtccgctgatttttaccgcgattggcggaggcatctgccctcagggcctgagagataccaggctctactgcaattagggggaccacggctgggctgtttattccagactgacgttggatttgggctcctgggtgagcttctggtcgccctggccgatcacgtggggcctgctgatagagcggcagtccttggaattttatgcagtcttgcttcaactgggagattcacacttaacctgtccctgctctccagagctgaaagggaatcctgtaaggggctctttcaaaagctgcaggcaatgggaaatccaaggtcagttaaagaaggcttgagttgggaggagcagggccttgaagaacagtccgggggactgcaagaggaggaacgcctgctacaggaactcctggaactgtatcaggttgattag

SEQ ID NO: 265939 - DNA, 729 bp, Artificial Sequence
  derived and/or modified sequence
atggagcgaaacgacatcatcaactttaaagctcttgagaaggagctccaggccgctttgaccgctgacgagaagtataagcgcgaaaacgcagcaaaactgcgtgccgtggagcagcgggtggcgtcttatgaagagttcagaggaattgtgctcgcttctcacctcaaacctttagagagaaaagataagatgggcggaaagaggacggtcccttggaattgtcatacaatacagggcaggactttccaggatgtggccactgagataagtcccgagaaagccccactgcaacctgagacttccgccgatttttaccgagactggaggcgccatcttccatcaggacctgagaggtatcaggcactgttgcagctgggaggacctcggctcggttgtctctttcagactgatgtggggttcggcctcctgggagagctgctggtagccctggccgaccacgttggacccgctgatcgcgctgctgtgctgggtatcctgtgttccctcgcaagcaccggccgttttaccctgaatttgtctttgctcagcagggcggaacgcgaatcctgtaaaggcctctttcaaaagttgcaggctatggggaatcccagatcagtgaaggaagggctcagctgggaagagcagggactggaggagcaatcagggggactgcaggaggaggaacggcttcttcaggaattactggagctatatcaggtggattag

SEQ ID NO: 265940 - protein, 133 aa, Artificial Sequence [sequence omitted]

SEQ ID NO: 265941 - DNA, 402 bp, Artificial Sequence
  derived and/or modified sequence
atggctatggtgtccgcaatgtcctgggtgttgtacctgtggatatcagcatgtgccatgctcctttgccacggatcactccagcacaccttccagcaacatcacctccataggcccgaaggcggtacctgtgaggtgatagctgcccacagatgttgtaacaagaaccgaatcgaggaacgaagtcaaacagtgaagtgtagttgcctccctggaaaggtggcgggaactactagaaataggccctcatgcgttgacgccagcatcgttatcggcaagtggtggtgtgagatggaaccctgcctggaaggcgaggaatgcaaaaccctgcccgacaatagcggttggatgtgtgcaactggcaacaagatcaagactacccgcattcatcccaggacgtag

SEQ ID NO: 265942 - DNA, 402 bp, Artificial Sequence
  derived and/or modified sequence
atggctatggtgtccgcaatgagttgggtattgtacctctggatcagcgcttgtgctatgctgctgtgccacggctccctgcaacacacattccagcagcaccatctgcaccggccagagggagggacatgcgaggtgatagcggctcatcgttgctgtaacaagaatcggatcgaagagcgctcacagactgttaaatgctcctgcttgcccggtaaggttgcaggtacaaccagaaatcgacctagttgtgttgacgcgagcatcgtgatcggtaagtggtggtgcgagatggagccatgcttggagggtgaagaatgcaaaaccctgccggacaattccggttggatgtgcgccactgggaacaagattaagaccacacggatccatcctcggacatag

SEQ ID NO: 265943 - DNA, 402 bp, Artificial Sequence
  derived and/or modified sequence
atggcaatggtttctgccatgagctgggtgctgtatctctggatctccgcttgtgcaatgctcctctgtcatgggagtttacagcacactttccagcaacaccacctgcaccgcccagaggggggtacctgtgaggtcattgctgcacaccgctgctgtaacaaaaatcggatcgaagagcggtctcaaaccgtgaaatgttcctgtctccctggcaaggtcgccgggacaacaagaaacagaccctcatgcgtggatgcatctattgtgattggtaagtggtggtgtgaaatggaaccctgccttgaaggagaagagtgtaagacactcccggacaactcaggatggatgtgcgctaccgggaacaaaatcaagacaacaagaatccacccccggacatag

SEQ ID NO: 265944 - DNA, 402 bp, Artificial Sequence
  derived and/or modified sequence
atggcaatggtctctgcgatgtcttgggtgttgtatctctggatctcggcatgcgctatgttgttgtgtcacggatcacttcagcacacttttcagcagcaccacctgcataggcccgaaggcggtacctgcgaagtaattgccgcacatcgctgctgcaacaaaaaccgcatcgaggagcggagccagaccgtgaaatgctcctgcctgccaggtaaggtcgctggcaccacaaggaatcggccgtcttgtgtagatgctagtatagtgattggtaagtggtggtgcgagatggagccatgtctggaaggagaggaatgtaagacactgccggataatagtgggtggatgtgtgccacaggaaataagattaagacgaccagaattcacccgagaacttag

SEQ ID NO: 265945 - DNA, 402 bp, Artificial Sequence
  derived and/or modified sequence
atggccatggtctctgctatgtcttgggtcctgtacctttggatctccgcatgcgctatgcttctctgtcatggatctctgcaacatactttccaacaacatcacctccatcgacccgagggtggcacctgcgaagtgatcgcagcacacaggtgctgtaataagaaccggatagaagagcgaagccaaaccgttaaatgctcctgtctccctggtaaggtggcaggcaccactaggaaccgaccttcatgtgttgacgcctccattgtgattggaaagtggtggtgcgagatggaaccatgtctggaaggcgaagaatgcaaaacactgcctgataattctggatggatgtgtgctactggaaacaaaatcaagacaactaggatccacccaagaacgtag

SEQ ID NO: 265946 - DNA, 402 bp, Artificial Sequence
  derived and/or modified sequence
atggccatggtatccgctatgtcctgggtcctttatctttggatttctgcttgtgcgatgctcctctgtcatggaagcttacagcacaccttccagcagcatcatctacacaggcccgaaggcggaacatgtgaagtcattgccgcacaccgctgctgtaacaagaaccggattgaggagagaagccagacagtcaaatgctcatgccttcccgggaaagtagccggtactacacgaaaccgtcccagctgcgtggatgcaagtattgttatcggtaagtggtggtgcgaaatggagccttgtttagaaggggaggagtgcaagacactaccagacaacagcggatggatgtgcgccactggaaataagattaagacaaccaggattcatccaaggacttag

SEQ ID NO: 265947 - DNA, 2014 bp, Artificial Sequence
  derived and/or modified sequence
gatactttagagcggagggatgtattgaaacagactactgctacttacagcaccgtatagcagccctgctcctacattttgctgccttactctgccccgaatgcactggagtggggatggtccatcggcaactataaactgattctcatcaggaaactgcacattatctccccatcacttcaaaggtctcgtcaggcagaggtgacgccaggagatgatttaaaggtgaaaatgacaaggtttccacccctcaaaccttggctccttttctgacaatacagtctgaatgaacccgatgtctttttttttactgtggaaataggatcggaagagagtaacatttttttttttttaatcctgataaagaagattgttgggaagctctttgaaaaaaaattttaaattgtggcacagatggattttaaaaagtgttagatctttccaatgaacactaatagagtactctgctcttggctggatttttcagagaatggcaatggtctctgcgatgtcctgggtcctgtatttgtggataagtgcttgtgcaatgctactctgccatggatcccttcagcacactttccagcagcatcacctgcacagaccagaaggagggacgtgtgaagtgatagcagcacaccgatgttgtaacaagaatcgcattgaggagcggtcacaaacagtaaagtgttcctgtctacctggaaaagtggctggaacaacaagaaaccggccttcttgcgtcgatgcctccatagtgattgggaaatggtggtgtgagatggagccttgcctagaaggagaagaatgtaagacactccctgacaattctggatggatgtgcgcaacaggcaacaaaattaagaccacgagaattcacccaagaacctaacagaagcatttgtggtagtaaaggaaaaccaaccctctggaaaatacattttgagaatctcaaacatctcacatatatacaagccaaatggatttcttacttgcactttgactggctaccagataatcacagtgcgtttactgtgtgtaacgaaatatcctacagtgagaagacacagcgttttggcaacaccatggaaagtgggcttaaaaaagggttttctcagtgaaatttttgggcatcatgaagaacgatcaactatcttctaatttgaatctatagttactttgtaccatttgaaatatatgtatatatatatatataatattttgaaatattatctattctcttcaagaaatgaacagtaccacagtttgagacggctggtgtacccctttgagttttggatgttttgtctgttttgctttgttttgttagtcatttctttttctaacggcaaggaagatatgtgcccttttgagaattcaagatggcactgacacgggaaggccagctacaggtggactcctggaatttgaggcatcataatgatactgaatcaagaacttccttctgcttctaccagatggcccaaggaagcacatcgtcctgttttattgctttctaccctgtgcaatattagcatgcaagcttggcttacatagtcatactttatattcaattgatatataataaccgttctaacctcttccaggaaaatatttttagaactactagcttttccacttagaagaaaatgaggattcttaagggagccactccaccatgctattaagactctggcagagttatgggtaggatatggatccctacatgaataagtcctgtaaatacaatgtcttaaggctttgtatagctgtcctagactgcagaaatgtcctctgattaaatccaaagtctggcatcgttaactacatagtgctgtagcaacaagtcttatcatggcatctctttctatgtttggtttgctttttccaagagtattcaggtctcctcttgtgagataggaaggccatgaaaacaattagatttcaagatgatctatgtgaccaaatgttggacagccctattaaagtggtaaacaacttctttctaaaccta

SEQ ID NO: 265948 - DNA, 1917 bp, Artificial Sequence
  derived and/or modified sequence
agacttgcaatgaagttagaatgaacaggaggagtctgcagcttttcagtgcctgggataactatagtttaaagatcattgtgtaaaataggatttttagtcagcatgcattgttttaaaccgactaactgatagcctaaaactttatttttgcattttgccaatccttggagttttgttttgcagaattaagaaaaaaatgaatgtatgatcatctgaaaagggctttctctcaatcccacttcatggcatgacctctgctggatcattagttctagccagagaagtagcaaaggaacatgacgtctgagacctcccttccctcatcagtggggctgactgagctgggggcttgaagccggaggtaacctttcctgtcgaatgttctctttagagaatggcaatggtctctgcgatgtcctgggtcctgtatttgtggataagtgcttgtgcaatgctactctgccatggatcccttcagcacactttccagcagcatcacctgcacagaccagaaggagggacgtgtgaagtgatagcagcacaccgatgttgtaacaagaatcgcattgaggagcggtcacaaacagtaaagtgttcctgtctacctggaaaagtggctggaacaacaagaaaccggccttcttgcgtcgatgcctccatagtgattgggaaatggtggtgtgagatggagccttgcctagaaggagaagaatgtaagacactccctgacaattctggatggatgtgcgcaacaggcaacaaaattaagaccacgagaattcacccaagaacctaacagaagcatttgtggtagtaaaggaaaaccaaccctctggaaaatacattttgagaatctcaaacatctcacatatatacaagccaaatggatttcttacttgcactttgactggctaccagataatcacagtgcgtttactgtgtgtaacgaaatatcctacagtgagaagacacagcgttttggcaacaccatggaaagtgggcttaaaaaagggttttctcagtgaaatttttgggcatcatgaagaacgatcaactatcttctaatttgaatctatagttactttgtaccatttgaaatatatgtatatatatatatataatattttgaaatattatctattctcttcaagaaatgaacagtaccacagtttgagacggctggtgtacccctttgagttttggatgttttgtctgttttgctttgttttgttagtcatttctttttctaacggcaaggaagatatgtgcccttttgagaattcaagatggcactgacacgggaaggccagctacaggtggactcctggaatttgaggcatcataatgatactgaatcaagaacttccttctgcttctaccagatggcccaaggaagcacatcgtcctgttttattgctttctaccctgtgcaatattagcatgcaagcttggcttacatagtcatactttatattcaattgatatataataaccgttctaacctcttccaggaaaatatttttagaactactagcttttccacttagaagaaaatgaggattcttaagggagccactccaccatgctattaagactctggcagagttatgggtaggatatggatccctacatgaataagtcctgtaaatacaatgtcttaaggctttgtatagctgtcctagactgcagaaatgtcctctgattaaatccaaagtctggcatcgttaactacatagtgctgtagcaacaagtcttatcatggcatctctttctatgtttggtttgctttttccaagagtattcaggtctcctcttgtgagataggaaggccatgaaaacaattagatttcaagatgatctatgtgaccaaatgttggacagccctattaaagtggtaaacaacttctttctaaa

SEQ ID NO: 265949 - DNA, 402 bp, Artificial Sequence
  derived and/or modified sequence
atggccatggtgagcgccatgagctgggtgctgtacctgtggatcagcgcctgcgccatgctgctgtgccacggcagcctgcagcacaccttccagcagcaccacctgcacagacccgagggcggcacctgcgaggtgatcgccgcccacagatgctgcaacaagaacagaatcgaggagagaagccagaccgtgaagtgcagctgcctgcccggcaaggtggccggcaccaccagaaacagacccagctgcgtggacgccagcatcgtgatcggcaagtggtggtgcgagatggagccctgcctggagggcgaggagtgcaagaccctgcccgacaacagcggctggatgtgcgccaccggcaacaagatcaagaccaccagaatccaccccagaacctag

SEQ ID NO: 265950 - DNA, 402 bp, Artificial Sequence
  derived and/or modified sequence
atggccatggtgtccgctatgtcttgggtcctttacttatggataagtgcatgcgccatgctactttgccacggctcgctccagcatacattccagcagcatcacctccatagaccagaggggggcacctgcgaagtcatagccgcacatcggtgctgtaataaaaaccgaatcgaggagcgcagtcagacagtgaaatgcagttgcctacccggaaaggtggctggaacgacaagaaacaggccttcctgtgtcgacgcatctattgtgatcggcaaatggtggtgtgaaatggaaccatgcttagaaggcgaagagtgcaagacgctgcctgataattcgggatggatgtgtgcaaccggcaacaagatcaaaaccacaagaattcaccctagaacttag

SEQ ID NO: 265951 - DNA, 402 bp, Artificial Sequence
  derived and/or modified sequence
atggccatggtctcagctatgagctgggttctgtacctgtggatctctgcatgcgccatgcttctttgccacgggtcgctacagcacacattccagcagcaccacttgcaccggcctgagggcggcacctgtgaggtgattgcagcccaccgatgctgtaataagaataggattgaagagagatctcagacggttaagtgttcatgtttgccaggcaaagtcgccggaacaaccagaaacaggcctagttgtgtcgatgcctctatagtgattggcaagtggtggtgcgagatggaaccgtgtctagaaggggaggaatgcaaaaccctgccggataactccggctggatgtgcgctaccggcaataagattaaaacaaccaggattcacccaaggacctag

SEQ ID NO: 265952 - DNA, 402 bp, Artificial Sequence
  derived and/or modified sequence
atggccatggtgtctgccatgtcctgggtgctgtacctgtggatcagcgcctgtgccatgctgctgtgccacggcagcctgcagcacaccttccagcagcaccacctgcacaggcctgagggcggcacctgtgaggtgattgctgcccaccgctgctgcaacaagaaccgcatcgaggagaggagccagacagtgaagtgcagctgcctgcccgggaaggtggccggcaccaccaggaaccggcccagctgtgtggatgccagcatcgtgattggcaagtggtggtgtgagatggagccctgcctggagggggaggagtgcaagaccctgcctgacaacagcggctggatgtgtgccaccggcaacaagatcaagaccacccgcatccaccccaggacatag

SEQ ID NO: 265953 - DNA, 402 bp, Artificial Sequence
  derived and/or modified sequence
atggccatggtgagcgccatgagctgggtgctgtacctgtggatctccgcttgtgcaatgcttctctgtcatggctctctgcagcacacatttcagcagcaccatctccatcgtcctgaagggggcacatgcgaggtcatagctgcccaccgctgttgcaacaaaaacaggattgaagaaagaagccagaccgtaaaatgctcttgccttcccggcaaagtggccggtacaaccagaaacagaccttcatgcgtcgacgcttccatcgtgataggcaagtggtggtgcgaaatggaaccgtgcctcgaaggtgaggagtgcaaaacactgcccgacaactccggctggatgtgcgcaaccggcaacaaaattaagaccactagaatccaccctaggacatag

SEQ ID NO: 265954 - DNA, 402 bp, Artificial Sequence
  derived and/or modified sequence
atggccatggtgagcgccatgagctgggtgctgtacctgtggatcagcgcttgtgccatgcttctgtgccacggatccctgcagcacactttccagcaacatcatctccatagacctgaagggggcacatgcgaggtcattgcagcccaccggtgttgcaacaagaaccgtatagaagagcggtcccagactgtcaagtgctcctgcctgccaggcaaagttgccggtaccactagaaatcgaccctcatgcgtggacgcatccatcgtaatcggtaagtggtggtgcgagatggagccgtgccttgagggagaagagtgcaaaacattgccggataactccggatggatgtgtgctacagggaacaaaattaagactactcggatccacccccgtacctag

SEQ ID NO: 265955 - RNA, 402 nt, Artificial Sequence
  derived and/or modified sequence
auggcaaugguuucugccaugagcugggugcuguaucucuggaucuccgcuugugcaaugcuccucugucaugggaguuuacagcacacuuuccagcaacaccaccugcaccgcccagagggggguaccugugaggucauugcugcacaccgcugcuguaacaaaaaucggaucgaagagcggucucaaaccgugaaauguuccugucucccuggcaaggucgccgggacaacaagaaacagacccucaugcguggaugcaucuauugugauugguaagugguggugugaaauggaacccugccuugaaggagaagaguguaagacacucccggacaacucaggauggaugugcgcuaccgggaacaaaaucaagacaacaagaauccacccccggacauag

SEQ ID NO: 265956 - RNA, 402 nt, Artificial Sequence
  derived and/or modified sequence
auggcaauggucucugcgaugucuuggguguuguaucucuggaucucggcaugcgcuauguuguugugucacggaucacuucagcacacuuuucagcagcaccaccugcauaggcccgaaggcgguaccugcgaaguaauugccgcacaucgcugcugcaacaaaaaccgcaucgaggagcggagccagaccgugaaaugcuccugccugccagguaaggucgcuggcaccacaaggaaucggccgucuuguguagaugcuaguauagugauugguaagugguggugcgagauggagccaugucuggaaggagaggaauguaagacacugccggauaauaguggguggaugugugccacaggaaauaagauuaagacgaccagaauucacccgagaacuuag

SEQ ID NO: 265957 - RNA, 402 nt, Artificial Sequence
  derived and/or modified sequence
auggccauggucucugcuaugucuuggguccuguaccuuuggaucuccgcaugcgcuaugcuucucugucauggaucucugcaacauacuuuccaacaacaucaccuccaucgacccgaggguggcaccugcgaagugaucgcagcacacaggugcuguaauaagaaccggauagaagagcgaagccaaaccguuaaaugcuccugucucccugguaagguggcaggcaccacuaggaaccgaccuucauguguugacgccuccauugugauuggaaagugguggugcgagauggaaccaugucuggaaggcgaagaaugcaaaacacugccugauaauucuggauggaugugugcuacuggaaacaaaaucaagacaacuaggauccacccaagaacguag

SEQ ID NO: 265958 - RNA, 402 nt, Artificial Sequence
  derived and/or modified sequence
auggccaugguauccgcuauguccuggguccuuuaucuuuggauuucugcuugugcgaugcuccucugucauggaagcuuacagcacaccuuccagcagcaucaucuacacaggcccgaaggcggaacaugugaagucauugccgcacaccgcugcuguaacaagaaccggauugaggagagaagccagacagucaaaugcucaugccuucccgggaaaguagccgguacuacacgaaaccgucccagcugcguggaugcaaguauuguuaucgguaagugguggugcgaaauggagccuuguuuagaaggggaggagugcaagacacuaccagacaacagcggauggaugugcgccacuggaaauaagauuaagacaaccaggauucauccaaggacuuag

SEQ ID NO: 265959 - protein, 516 aa, Artificial Sequence
  derived and/or modified sequence
MLGKLAMLLWVQQALLALLLPTLLAQGEARRSRNTTRPALLRLSDYLLTNYRKGVRPVRDWRKPTTVSIDVIVYAILNVDEKNQVLTTYIWYRQYWTDEFLQWNPEDFDNITKLSIPTDSIWVPDILINEFVDVGKSPNIPYVYIRHQGEVQNYKPLQVVTACSLDIYNFPFDVQNCSLTFTSWLHTIQDINISLWRLPEKVKSDRSVFMNQGEWELLGVLPYFREFSMESSNYYAEMKFYVVIRRRPLFYVVSLLLPSIFLMVMDIVGFYLPPNSGERVSFKITLLLGYSVFLIIVSDTLPATAIGTPLIGKAPPGSRAQSGEKPAPSHLLHVSLASALGCTGVYFVVCMALLVISLAETIFIVRLVHKQDLQQPVPAWLRHLVLERIAWLLCLREQSTSQRPPATSQATKTDDCSAMGNHCSHMGGPQDFEKSPRDRCSPPPPPREASLAVCGLLQELSSIRQFLEKRDEIREVARDWLRVGSVLDKLLFHIYLLAVLAYSITLVMLWSIWQYA

SEQ ID NO: 265960 - protein, 510 aa, Artificial Sequence
  derived and/or modified sequence
MLLWVQQALLALLLPTLLAQGEARRSRNTTRPALLRLSDYLLTNYRKGVRPVRDWRKPTTVSIDVIVYAILNVDEKNQVLTTYIWYRQYWTDEFLQWNPEDFDNITKLSIPTDSIWVPDILINEFVDVGKSPNIPYVYIRHQGEVQNYKPLQVVTACSLDIYNFPFDVQNCSLTFTSWLHTIQDINISLWRLPEKVKSDRSVFMNQGEWELLGVLPYFREFSMESSNYYAEMKFYVVIRRRPLFYVVSLLLPSIFLMVMDIVGFYLPPNSGERVSFKITLLLGYSVFLIIVSDTLPATAIGTPLIGKAPPGSRAQSGEKPAPSHLLHVSLASALGCTGVYFVVCMALLVISLAETIFIVRLVHKQDLQQPVPAWLRHLVLERIAWLLCLREQSTSQRPPATSQATKTDDCSAMGNHCSHMGGPQDFEKSPRDRCSPPPPPREASLAVCGLLQELSSIRQFLEKRDEIREVARDWLRVGSVLDKLLFHIYLLAVLAYSITLVMLWSIWQYA

SEQ ID NO: 265961 - protein, 238 aa, Artificial Sequence
  derived and/or modified sequence
MLLWVQQALLALLLPTLLAQGEARRSRNTTRPALLRLSDYLLTNYRKGVRPVRDWRKPTTVSIDVIVYAILNVDEKNQVLTTYIWYRQYWTDEFLQWNPEDFDNITKLSIPTDSIWVPDILINEFVDVGKSPNIPYVYIRHQGEVQNYKPLQVVTACSLDIYNFPFDVQNCSLTFTSWLHTSGHPPAAPLLCGQPATAQHLPHGHGHRGLLPAPQQWREGLFQDYTPPGLLGLPDHRF

SEQ ID NO: 265962 - DNA, 1551 bp, Artificial Sequence
  derived and/or modified sequence
atgctgggcaagctggccatgctgctgtgggtgcagcaggccctgctggccctgctgctgcccaccctgctggcccagggcgaggccagaagaagcagaaacaccaccagacccgccctgctgagactgagcgactacctgctgaccaactacagaaagggcgtgagacccgtgagagactggagaaagcccaccaccgtgagcatcgacgtgatcgtgtacgccatcctgaacgtggacgagaagaaccaggtgctgaccacctacatctggtacagacagtactggaccgacgagttcctgcagtggaaccccgaggacttcgacaacatcaccaagctgagcatccccaccgacagcatctgggtgcccgacatcctgatcaacgagttcgtggacgtgggcaagagccccaacatcccctacgtgtacatcagacaccagggcgaggtgcagaactacaagcccctgcaggtggtgaccgcctgcagcctggacatctacaacttccccttcgacgtgcagaactgcagcctgaccttcaccagctggctgcacaccatccaggacatcaacatcagcctgtggagactgcccgagaaggtgaagagcgacagaagcgtgttcatgaaccagggcgagtgggagctgctgggcgtgctgccctacttcagagagttcagcatggagagcagcaactactacgccgagatgaagttctacgtggtgatcagaagaagacccctgttctacgtggtgagcctgctgctgcccagcatcttcctgatggtgatggacatcgtgggcttctacctgccccccaacagcggcgagagagtgagcttcaagatcaccctgctgctgggctacagcgtgttcctgatcatcgtgagcgacaccctgcccgccaccgccatcggcacccccctgatcggcaaggccccccccggcagcagagcccagagcggcgagaagcccgcccccagccacctgctgcacgtgagcctggccagcgccctgggctgcaccggcgtgtacttcgtggtgtgcatggccctgctggtgatcagcctggccgagaccatcttcatcgtgagactggtgcacaagcaggacctgcagcagcccgtgcccgcctggctgagacacctggtgctggagagaatcgcctggctgctgtgcctgagagagcagagcaccagccagagaccccccgccaccagccaggccaccaagaccgacgactgcagcgccatgggcaaccactgcagccacatgggcggcccccaggacttcgagaagagccccagagacagatgcagccccccccccccccccagagaggccagcctggccgtgtgcggcctgctgcaggagctgagcagcatcagacagttcctggagaagagagacgagatcagagaggtggccagagactggctgagagtgggcagcgtgctggacaagctgctgttccacatctacctgctggccgtgctggcctacagcatcaccctggtgatgctgtggagcatctggcagtacgcctag

SEQ ID NO: 265963 - DNA, 1533 bp, Artificial Sequence
  derived and/or modified sequence
atgctgctgtgggtgcagcaggccctgctggccctgctgctgcccaccctgctggcccagggcgaggccagaagaagcagaaacaccaccagacccgccctgctgagactgagcgactacctgctgaccaactacagaaagggcgtgagacccgtgagagactggagaaagcccaccaccgtgagcatcgacgtgatcgtgtacgccatcctgaacgtggacgagaagaaccaggtgctgaccacctacatctggtacagacagtactggaccgacgagttcctgcagtggaaccccgaggacttcgacaacatcaccaagctgagcatccccaccgacagcatctgggtgcccgacatcctgatcaacgagttcgtggacgtgggcaagagccccaacatcccctacgtgtacatcagacaccagggcgaggtgcagaactacaagcccctgcaggtggtgaccgcctgcagcctggacatctacaacttccccttcgacgtgcagaactgcagcctgaccttcaccagctggctgcacaccatccaggacatcaacatcagcctgtggagactgcccgagaaggtgaagagcgacagaagcgtgttcatgaaccagggcgagtgggagctgctgggcgtgctgccctacttcagagagttcagcatggagagcagcaactactacgccgagatgaagttctacgtggtgatcagaagaagacccctgttctacgtggtgagcctgctgctgcccagcatcttcctgatggtgatggacatcgtgggcttctacctgccccccaacagcggcgagagagtgagcttcaagatcaccctgctgctgggctacagcgtgttcctgatcatcgtgagcgacaccctgcccgccaccgccatcggcacccccctgatcggcaaggccccccccggcagcagagcccagagcggcgagaagcccgcccccagccacctgctgcacgtgagcctggccagcgccctgggctgcaccggcgtgtacttcgtggtgtgcatggccctgctggtgatcagcctggccgagaccatcttcatcgtgagactggtgcacaagcaggacctgcagcagcccgtgcccgcctggctgagacacctggtgctggagagaatcgcctggctgctgtgcctgagagagcagagcaccagccagagaccccccgccaccagccaggccaccaagaccgacgactgcagcgccatgggcaaccactgcagccacatgggcggcccccaggacttcgagaagagccccagagacagatgcagccccccccccccccccagagaggccagcctggccgtgtgcggcctgctgcaggagctgagcagcatcagacagttcctggagaagagagacgagatcagagaggtggccagagactggctgagagtgggcagcgtgctggacaagctgctgttccacatctacctgctggccgtgctggcctacagcatcaccctggtgatgctgtggagcatctggcagtacgcctag

SEQ ID NO: 265964 - DNA, 2331 bp, Artificial Sequence
  derived and/or modified sequence
ctctcagctgtcccctcccctttcctcccgcctgaaacatgatccagctgaaggactgattgcaggaaaacttggcagctccccaaccttggtggcccagggagtgtgaggctgcagcctcagaaggtgtgagcagtggccacgagaggcaggctggctgggacatgaggttggcagagggcaggcaagctggcccttggtgggcctcgtcctgagcactcggaggcactcctatgcttggaaagctcgctatgctgctgtgggtccagcaggcgctgctcgccttgctcctccccacactcctggcacagggagaagccaggaggagccgaaacaccaccaggcccgctctgctgaggctgtcggattaccttttgaccaactacaggaagggtgtgcgccccgtgagggactggaggaagccaaccaccgtatccattgacgtcattgtctatgccatcctcaacgtggatgagaagaatcaggtgctgaccacctacatctggtaccggcagtactggactgatgagtttctccagtggaaccctgaggactttgacaacatcaccaagttgtccatccccacggacagcatctgggtcccggacattctcatcaatgagttcgtggatgtggggaagtctccaaatatcccgtacgtgtatattcggcatcaaggcgaagttcagaactacaagccccttcaggtggtgactgcctgtagcctcgacatctacaacttccccttcgatgtccagaactgctcgctgaccttcaccagttggctgcacaccatccaggacatcaacatctctttgtggcgcttgccagaaaaggtgaaatccgacaggagtgtcttcatgaaccagggagagtgggagttgctgggggtgctgccctactttcgggagttcagcatggaaagcagtaactactatgcagaaatgaagttctatgtggtcatccgccggcggcccctcttctatgtggtcagcctgctactgcccagcatcttcctcatggtcatggacatcgtgggcttctacctgccccccaacagtggcgagagggtctctttcaagattacactcctcctgggctactcggtcttcctgatcatcgtttctgacacgctgccggccactgccatcggcactcctctcattggtaaggcccctcctggcagcagagctcagtctggtgagaaacccgccccctcccacctcctgcatgtgtctcttgcctctgccctgggctgcacaggtgtctactttgtggtgtgcatggctctgctggtgataagtttggccgagaccatcttcattgtgcggctggtgcacaagcaagacctgcagcagcccgtgcctgcttggctgcgtcacctggttctggagagaatcgcctggctactttgcctgagggagcagtcaacttcccagaggcccccagccacctcccaagccaccaagactgatgactgctcagccatgggaaaccactgcagccacatgggaggaccccaggacttcgagaagagcccgagggacagatgtagccctcccccaccacctcgggaggcctcgctggcggtgtgtgggctgctgcaggagctgtcctccatccggcaattcctggaaaagcgggatgagatccgagaggtggcccgagactggctgcgcgtgggctccgtgctggacaagctgctattccacatttacctgctagcggtgctggcctacagcatcaccctggttatgctctggtccatctggcagtacgcttgagtgggtacagcccagtggaggagggggtacagtcctggttaggtggggacagaggatttctgcttaggcccctcaggacccagggaatgccagggacattttcaagacacagacaaagtcccgtgccctgtttccaatgccaattcatctcagcaatcacaagccaaggtctgaacccttccaccaaaaactgggtgttcaaggcccttacacccttgtcccacccccagcagctcaccatggctttaaaacatgctgtcttagatcaggagaaactcgggcactccctaagtccactctagttgtggacttttccccattgaccctcacctgaataagggactttggaattctgcttctctttcacaactttgcttttaggttgaaggcaaaaccaactctctactacacaggcctgataactctgtacgaggcttctctaacccctagtgtcttttttttcttcacctcacttgtggcagcttccctgaacactcatcccccatcagatgatgggagtgggaagaataaaatgcagtgaaaccct

SEQ ID NO: 265965 - DNA, 2221 bp, Artificial Sequence
  derived and/or modified sequence
gcagcctcagaaggtgtgagcagtggccacgagaggcaggctggctgggacatgaggttggcagagggcaggcaagctggcccttggtgggcctcgtcctgagcactcggaggcactcctatgcttggaaagctcgctatgctgctgtgggtccagcaggcgctgctcgccttgctcctccccacactcctggcacagggagaagccaggaggagccgaaacaccaccaggcccgctctgctgaggctgtcggattaccttttgaccaactacaggaagggtgtgcgccccgtgagggactggaggaagccaaccaccgtatccattgacgtcattgtctatgccatcctcaacgtggatgagaagaatcaggtgctgaccacctacatctggtaccggcagtactggactgatgagtttctccagtggaaccctgaggactttgacaacatcaccaagttgtccatccccacggacagcatctgggtcccggacattctcatcaatgagttcgtggatgtggggaagtctccaaatatcccgtacgtgtatattcggcatcaaggcgaagttcagaactacaagccccttcaggtggtgactgcctgtagcctcgacatctacaacttccccttcgatgtccagaactgctcgctgaccttcaccagttggctgcacaccatccaggacatcaacatctctttgtggcgcttgccagaaaaggtgaaatccgacaggagtgtcttcatgaaccagggagagtgggagttgctgggggtgctgccctactttcgggagttcagcatggaaagcagtaactactatgcagaaatgaagttctatgtggtcatccgccggcggcccctcttctatgtggtcagcctgctactgcccagcatcttcctcatggtcatggacatcgtgggcttctacctgccccccaacagtggcgagagggtctctttcaagattacactcctcctgggctactcggtcttcctgatcatcgtttctgacacgctgccggccactgccatcggcactcctctcattggtaaggcccctcctggcagcagagctcagtctggtgagaaacccgccccctcccacctcctgcatgtgtctcttgcctctgccctgggctgcacaggtgtctactttgtggtgtgcatggctctgctggtgataagtttggccgagaccatcttcattgtgcggctggtgcacaagcaagacctgcagcagcccgtgcctgcttggctgcgtcacctggttctggagagaatcgcctggctactttgcctgagggagcagtcaacttcccagaggcccccagccacctcccaagccaccaagactgatgactgctcagccatgggaaaccactgcagccacatgggaggaccccaggacttcgagaagagcccgagggacagatgtagccctcccccaccacctcgggaggcctcgctggcggtgtgtgggctgctgcaggagctgtcctccatccggcaattcctggaaaagcgggatgagatccgagaggtggcccgagactggctgcgcgtgggctccgtgctggacaagctgctattccacatttacctgctagcggtgctggcctacagcatcaccctggttatgctctggtccatctggcagtacgcttgagtgggtacagcccagtggaggagggggtacagtcctggttaggtggggacagaggatttctgcttaggcccctcaggacccagggaatgccagggacattttcaagacacagacaaagtcccgtgccctgtttccaatgccaattcatctcagcaatcacaagccaaggtctgaacccttccaccaaaaactgggtgttcaaggcccttacacccttgtcccacccccagcagctcaccatggctttaaaacatgctgtcttagatcaggagaaactcgggcactccctaagtccactctagttgtggacttttccccattgaccctcacctgaataagggactttggaattctgcttctctttcacaactttgcttttaggttgaaggcaaaaccaactctctactacacaggcctgataactctgtacgaggcttctctaacccctagtgtcttttttttcttcacctcacttgtggcagcttccctgaacactcatcccccatcagatgatgggagtgggaagaataaaatgcagtgaaaccctaaa

SEQ ID NO: 265966 - DNA, 1551 bp, Artificial Sequence
  derived and/or modified sequence
atgcttgggaagctggctatgctactgtgggtacagcaagccctcttggccctcttgctccctacactgttggcgcaaggagaagcgcgacgctctcggaataccacacgaccagctcttcttagactctctgactatctacttaccaactataggaagggggtacggcctgtgagggattggcggaagcctactacagtctccattgatgtaatagtctacgcaattctgaacgttgatgagaaaaaccaggtcctcacaacatacatttggtacagacaatactggaccgacgaattcctccagtggaacccagaagacttcgataacattacgaagctttcaatccccaccgattctatttgggtgcccgatatactgataaacgagtttgtggatgtggggaagtctcctaacattccgtatgtttacattaggcatcaaggggaagtgcaaaactacaaacccctgcaggtcgtgactgcatgtagtcttgacatttacaacttcccctttgatgtacagaattgctcactgacctttacatcatggctccacaccatccaggatatcaacatctcactctggaggttgcctgagaaagtgaagtctgatagaagtgtctttatgaaccagggcgaatgggaattactgggcgtgttgccttactttcgggagttctcaatggaaagctccaattactatgcggaaatgaagttttatgtggtgataagacgacgaccactcttttatgtggtaagtctgctgctgcctagtatctttctcatggtgatggacattgtcggattttatctccctcccaacagtggagagagggtcagcttcaagatcactctgttgctgggctactcagtgttcctcattatcgtaagtgatacattacccgctaccgccataggaacgcctctcattgggaaagcacccccgggctcaagggctcagtcaggcgaaaaacctgctccctcacacctgctgcacgtaagtcttgcaagcgccctcgggtgcaccggagtgtatttcgtagtgtgtatggccttactggttatctctttggccgaaactatctttattgttcgtcttgtgcacaaacaggatctccaacagcctgtgccagcatggcttcgccacttggtgctcgaaagaatagcatggcttctgtgtcttcgggaacaaagtacaagccagaggcctccagcaacgtcccaagcaaccaaaacggacgattgtagtgcgatgggtaaccattgttctcacatgggaggaccccaagacttcgaaaaatctcctagggatcgttgctccccgccgccacccccccgcgaggccagtctcgccgtgtgtggccttctgcaagagctctctagcatccgccagttcttagagaagagagatgagatccgtgaagtggcccgggactggctccgtgtggggtctgttttggataagctgctgtttcatatctacctgttagccgtgttagcgtatagtataactcttgttatgctgtggagtatctggcagtacgcttag

SEQ ID NO: 265967 - DNA, 1533 bp, Artificial Sequence
  derived and/or modified sequence
atgttgctgtgggttcagcaggcactcctggcacttttgttgcctactctgctggctcagggggaggcacgacgctccagaaacacaactcgccctgccctgctgcgactgagcgactaccttctcaccaattaccgcaagggggtgaggcccgtgcgagattggaggaaacccaccacagtctctatcgatgttatagtttacgccattctgaatgtggatgagaagaaccaggtattgacaacgtatatttggtaccgccaatactggactgatgagtttctgcagtggaaccctgaggattttgacaacatcaccaagctaagcattcccacagacagcatctgggtgccagatattctgatcaacgaattcgtcgatgttggtaagtcaccaaacatcccttatgtgtacattcgccaccaaggcgaggtacagaactataagccactgcaggttgtcaccgcctgttctttggacatctacaactttcccttcgacgtccagaattgctcattaacttttacctcctggctgcacactatacaggatatcaatatcagcctctggcgcctgcccgaaaaggtcaagtccgatcggtccgtctttatgaaccagggggagtgggaactgctgggagttttaccctactttagagagttttctatggagtcttctaactactacgctgagatgaagttttacgttgtaattcggaggcgaccccttttctacgtggtgtctctgttactgcccagcatctttttaatggtgatggatatagtcgggttttaccttccaccaaactctggagagcgcgtctctttcaagattacactgctgctaggatatagcgtctttttaatcatcgtttctgacacgctcccggcaaccgctattggaactcctcttatcggcaaagcgcctcctggatccagggctcagtccggagaaaagcctgcgcccagccacctcctccacgtctctctcgcatcggcactgggttgcactggtgtgtattttgtggtgtgtatggccttgctggtgattagcttagctgagacaatcttcattgtacgtctggttcacaaacaagatctccagcagccagttcccgcttggttacgccatctggtccttgaaaggattgcctggctgttgtgcttgcgggagcagtcaacttcgcagcgtccacccgcaaccagtcaggctactaaaaccgatgattgctctgcaatgggaaaccattgcagtcacatggggggcccccaggactttgagaagagtcctagggaccgatgttccccccccccccccccacgggaggcgagtctggccgtgtgtggattgcttcaggagcttagctctatccgccagttcctcgagaaaagagacgagattcgggaggtcgcacgcgactggctgcgtgtgggttctgttctggataagctactgtttcacatctacctactcgccgtcctggcctacagtattacactcgtaatgctttggtccatttggcaatatgcctag

SEQ ID NO: 265968 - DNA, 1551 bp, Artificial Sequence
  derived and/or modified sequence
atgctgggcaagctggccatgctgctgtgggtgcagcaggccctgctggccctgctgctgcccaccctgctggcccagggcgaggcccggcgcagcaggaacaccaccaggcctgccctgctgcggctgagtgactacctgctgaccaactacagaaaaggagtgcggcctgtgcgggactggaggaagcccaccaccgtgtccattgatgtgattgtgtatgccatcctgaatgtggatgagaagaaccaggtgctgaccacctacatctggtaccggcagtactggacagatgagttcctgcagtggaaccctgaggactttgacaacatcaccaagctgagcatccccacagacagcatctgggtgcctgacatcctgatcaatgaatttgtggatgtgggcaagagccccaacatcccctacgtgtacatccgccaccagggcgaggtgcagaactacaagcccctgcaggtggtgacagcctgcagcctggacatctacaacttcccctttgatgtgcagaactgcagcctgaccttcacctcctggctgcacaccatccaggacatcaacatcagcctgtggaggctgcctgagaaggtgaagagtgacagatctgtgttcatgaaccagggcgagtgggagctgctgggcgtgctgccctacttccgggagttctccatggagagcagcaactactatgcagagatgaagttctacgtggtgatcagaagaagacccctcttctacgtggtgtccctgctgctgcccagcatcttcctgatggtgatggacatcgtgggcttctacctgccccccaacagcggggagcgggtgtccttcaagatcaccctgctgctgggctacagcgtcttcctgatcatcgtgtctgacaccctgcctgccacagccatcggcacccccctgattggcaaggcccctcctggcagccgggcccagagcggggagaagccagcccccagccacctgctgcacgtgtccctggccagcgccctgggctgcacaggagtgtactttgtggtgtgcatggccctgctggtgatcagcctggccgagaccatcttcatcgtgcggctggtgcacaagcaggacctgcagcagcctgtgcctgcctggctgcggcacctggtgctggagagaattgcctggctgctgtgcctgcgggagcagagcaccagccagaggcccccagccaccagccaggccaccaagacagatgactgcagcgccatgggcaaccactgcagccacatgggcggcccccaggactttgagaagagcccccgggaccgctgcagccccccacctccaccccgggaggccagcctggccgtgtgtggcctgctgcaggagctgagcagcatccggcagttcctggagaagagagatgagatccgggaggtggcccgggactggctgcgggtgggctctgtgctggacaagctgctcttccacatctacctgctggccgtgctggcctacagcatcaccctggtgatgctgtggagcatctggcagtatgcctag

SEQ ID NO: 265969 - DNA, 1533 bp, Artificial Sequence
  derived and/or modified sequence
atgctgctgtgggtgcagcaggccctgctggccctgctgctgcccaccctgctggcccagggcgaggcccggcgcagcaggaacaccaccaggcctgccctgctgcggctgagtgactacctgctgaccaactacagaaaaggagtgcggcctgtgcgggactggaggaagcccaccaccgtgtccattgatgtgattgtgtatgccatcctgaatgtggatgagaagaaccaggtgctgaccacctacatctggtaccggcagtactggacagatgagttcctgcagtggaaccctgaggactttgacaacatcaccaagctgagcatccccacagacagcatctgggtgcctgacatcctgatcaatgaatttgtggatgtgggcaagagccccaacatcccctacgtgtacatccgccaccagggcgaggtgcagaactacaagcccctgcaggtggtgacagcctgcagcctggacatctacaacttcccctttgatgtgcagaactgcagcctgaccttcacctcctggctgcacaccatccaggacatcaacatcagcctgtggaggctgcctgagaaggtgaagagtgacagatctgtgttcatgaaccagggcgagtgggagctgctgggcgtgctgccctacttccgggagttctccatggagagcagcaactactatgcagagatgaagttctacgtggtgatcagaagaagacccctcttctacgtggtgtccctgctgctgcccagcatcttcctgatggtgatggacatcgtgggcttctacctgccccccaacagcggggagcgggtgtccttcaagatcaccctgctgctgggctacagcgtcttcctgatcatcgtgtctgacaccctgcctgccacagccatcggcacccccctgattggcaaggcccctcctggcagccgggcccagagcggggagaagccagcccccagccacctgctgcacgtgtccctggccagcgccctgggctgcacaggagtgtactttgtggtgtgcatggccctgctggtgatcagcctggccgagaccatcttcatcgtgcggctggtgcacaagcaggacctgcagcagcctgtgcctgcctggctgcggcacctggtgctggagagaattgcctggctgctgtgcctgcgggagcagagcaccagccagaggcccccagccaccagccaggccaccaagacagatgactgcagcgccatgggcaaccactgcagccacatgggcggcccccaggactttgagaagagcccccgggaccgctgcagccccccacctccaccccgggaggccagcctggccgtgtgtggcctgctgcaggagctgagcagcatccggcagttcctggagaagagagatgagatccgggaggtggcccgggactggctgcgggtgggctctgtgctggacaagctgctcttccacatctacctgctggccgtgctggcctacagcatcaccctggtgatgctgtggagcatctggcagtatgcctag

SEQ ID NO: 265970 - DNA, 1551 bp, Artificial Sequence
  derived and/or modified sequence
atgctgggcaagctggccatgctgctgtgggtgcagcaggccctgctggctctgcttttaccgacactactggctcaaggcgaggcccgccgttctcggaacacaaccagacctgcgttgctgcgcctatccgattacctcctcactaattacaggaagggtgtgcgaccagtccgggactggcggaagcccactaccgtgagcatagacgtgattgtctatgccatcctgaacgtggacgaaaagaaccaagtgctcacaacttacatctggtaccgacagtattggacagacgaatttctgcaatggaatccggaggactttgacaatatcaccaaactatccatccctaccgattcaatctgggttcccgacatattaatcaacgaattcgttgatgtaggaaaaagtcctaacatcccttacgtctatataagacaccagggtgaggtgcagaattacaagccgctgcaggtggtcacagcatgtagtctcgatatctataattttcccttcgacgtgcagaactgttcccttacctttacttcttggcttcataccatccaggacattaatattagcctctggaggctcccggaaaaggtgaaatctgatcggtcagtgttcatgaatcagggggagtgggagctattgggagtgctaccttatttcagagaattcagcatggaaagcagtaactactatgcagaaatgaaattctacgtggtgatcaggagaaggccactattttacgtagtttctctccttttgccctcaatcttccttatggtgatggatatcgtcggattctacctgccaccaaatagcggggagcgggtcagtttcaaaattacccttctgctaggctatagtgtgttcttaatcatcgtctctgataccttgcccgctacggctatcgggacgcctctgattggaaaggctcctccggggtcacgtgctcaatccggggaaaaacccgcgccatcccacctgctccatgtatcactggcaagcgctctcggctgcaccggagtttatttcgtcgtgtgcatggccctgctcgtcatcagcctcgccgagaccatcttcatcgttaggctggtacacaaacaggatctgcaacagcccgtgcccgcttggctgcggcaccttgtgctcgagaggatcgcatggctgttgtgcctgagggaacagtcgaccagtcaaaggcctcctgcaacatcgcaagcgacaaagacggatgactgtagtgctatgggcaatcattgttcgcacatggggggccctcaggacttcgaaaaaagcccaagggatagatgcagtccgcctccgccaccaagagaggcttcgcttgccgtgtgcggtctgctccaggagctgtcctcgatccggcaatttctcgaaaaacgggatgagatacgcgaagtcgcccgtgattggctacgagtggggtccgtgctggataagctcctcttccatatatacctgttagctgttctggcctactccatcactttagttatgctctggtcaatctggcagtacgcatag

SEQ ID NO: 265971 - DNA, 1533 bp, Artificial Sequence
  derived and/or modified sequence
atgctgctgtgggtgcagcaggccctgctggccctgctgctgcccacactgctagcgcagggcgaggctcgacgttcgaggaatacaacccgccctgccctgctgcggctttccgactacctgctgactaattacaggaagggcgtgcgcccggtgagagactggcggaaacccacaacagtatccatcgatgtgatcgtatatgccattcttaacgtggacgagaaaaatcaagtcctgactacgtatatatggtaccgccagtactggacagatgagttcctacagtggaatccagaggattttgataacataacaaaactgagtatccctactgactcaatctgggttcccgacattctcattaatgagtttgtggacgtggggaaaagccctaatattccgtacgtctacatacggcatcaaggagaggttcagaactacaagccgttacaggtagtgaccgcctgtagtcttgacatctacaatttcccgttcgacgtccaaaactgctctcttaccttcacctcctggctgcacacaatccaggatattaacatctccttgtggagactccccgagaaagtaaagtccgataggtcagtgtttatgaatcagggggaatgggagttgttgggggtgctgccctactttagagagttctccatggagagtagtaactactacgccgaaatgaaattctacgtggttatacggagacgacctctgttttatgtagtgtcgctgctgttaccttccattttccttatggtaatggacatcgtgggtttttacttaccaccaaatagtggcgagcgggtatctttcaagattactttgctcctcgggtactctgtatttttgatcattgtaagcgacactctccccgcgacagcaatcggcacacctctgattggcaaagctcccccaggaagtagggcacagagcggggagaagcccgcccctagtcacctgttgcacgtgtcactcgcttctgcccttgggtgcaccggagtgtacttcgtggtctgcatggctctactggttatctcactggctgagaccatctttattgttcggctggttcacaagcaggatcttcagcagcctgtgcctgcctggcttaggcacttagtgctcgaaagaatagcctggctgctttgtctcagggaacagagcacaagccaaaggcccccggccaccagtcaggctacaaagacagacgattgttccgcaatggggaaccactgctcccatatgggaggccctcaggactttgagaaatcaccaagagaccgatgttctcccccccctcctcctagagaggcaagcttggcagtttgcggattgttgcaggagctgtcaagcattagacagttcttggaaaagcgggatgaaattagggaggtcgcgcgtgattggctgcgagtgggcagcgtgctcgataaactgttgtttcatatttaccttctggccgtattggcctactccattaccctcgtaatgctctggtctatttggcagtacgcatag

SEQ ID NO: 265972 - DNA, 1551 bp, Artificial Sequence
  derived and/or modified sequence
atgctgggcaaactggctatgctgctttgggtacagcaggctctgcttgccctgctgctaccaacactgctggcccagggtgaagctagaaggtctcgaaatacaactaggcccgctttgttgagattgtctgattacctgctaaccaactatagaaaaggcgtacgaccggtgcgggactggagaaagcccactacggtgtccatcgatgtgattgtgtatgccatcttgaacgtcgacgagaagaaccaagtgctcaccacgtacatatggtatcgtcagtactggacagacgagttcctacagtggaacccagaagacttcgataatattactaaactctctatcccaacagattcaatatgggtgccagatatattgatcaacgaatttgtagatgtaggcaagtcgccaaacatcccttatgtgtacattagacatcagggcgaagtccagaattataagcccctgcaggtggttactgcatgttccctggatatctacaattttccattcgatgtgcagaactgcagtctaacattcacaagttggctccacacaatccaggacatcaacatcagcctgtggcggctccctgagaaagtcaagtccgataggagcgtctttatgaatcagggagaatgggagctgctgggtgtattgccctattttcgggaattttctatggagagttctaactattacgcagagatgaaattttatgtcgtcatccgtcgcagaccattgttttacgttgttagcctactactgccatctatctttttgatggttatggacattgtaggattctatctgcctccaaacagcggggaacgcgtgtctttcaagatcaccttgttgctgggttattccgtttttttgatcatcgtcagtgacaccctgccagccacagcgattggtacccccctcatcggaaaggcccctccagggtcgagggcgcagagcggggaaaaacctgccccatcccaccttctccatgtctctcttgcttcagctctgggctgtacaggtgtctacttcgttgtctgtatggctttgctggttatcagcctggccgaaactatttttatagtgagactggtccataagcaggatttacaacaaccggtccctgcgtggcttagacacctggtgttggaacggatcgcctggttactgtgcctacgcgagcagagcacatcccagcggcctccagcaacaagccaagctacaaagacagacgattgctccgccatgggcaaccactgcagccatatggggggaccgcaggattttgaaaagtcacccagagatcggtgtagcccccctccccctcctcgggaggccagcctcgccgtctgcggacttctccaggaactctctagcataagacaattcctggagaaacgggacgagattagggaagttgccagagattggctcagggtggggtcagttttggataagcttctgttccacatttatcttctcgctgttctggcctacagtatcacactggtcatgctgtggagtatctggcaatatgcatag

SEQ ID NO: 265973 - DNA, 1533 bp, Artificial Sequence
  derived and/or modified sequence
atgctgctgtgggtgcaacaggcactgctcgcactgttgttgcctacccttcttgcacagggcgaggccagacgctctagaaacaccaccaggcctgccctgctgcggctgagcgattacctcctgaccaattacaggaagggggtcagacctgtacgtgactggcggaaacctaccacggtgtctatcgacgtaatagtttatgccatcctgaacgtggatgagaagaatcaggttctgacaacctatatctggtaccgccagtattggacagatgagtttctccagtggaatcccgaagactttgataacataactaagctgtccatcccgaccgattctatttgggtcccggacatactcattaatgagtttgtggacgtcggaaagagtcccaatatcccgtacgtgtacattcggcaccagggggaggtgcagaactataagcccttgcaagtagtgacagcctgcagcctcgacatttacaactttccctttgacgtgcaaaactgcagtctgaccttcacttcttggttgcacacaatccaagatattaacatctctctatggaggctgcccgaaaaagtgaagtctgacaggtcagtatttatgaaccagggggagtgggagctgctgggcgtgctaccctacttccgcgagttttccatggagtcatcaaattactacgctgagatgaaattctacgtggtgattcggagaagaccactgttttatgtcgtttccctgctgctgccatccatctttcttatggtcatggacattgtgggcttctaccttcccccaaatagcggtgaaagggtgtcttttaaaattaccctactgcttggatatagcgtttttctgatcatcgtgtcagatacgctccctgcgaccgcgataggtacccctcttataggtaaggccccacccggaagcagggcacagtctggcgaaaaacctgcgccatcccacttactgcatgtctcgctagcttctgctttgggttgcacgggtgtctacttcgttgtttgtatggctctcctagtgatcagtctggccgagacgatattcatcgtgagactggttcataagcaggatctacagcagcctgtgcctgcttggctgcgccatttggtgctcgaacggatcgcttggttgctctgtctacgagaacagtcaacgagccagagaccgccagctacctctcaggcaactaaaaccgatgattgcagtgctatgggcaatcactgctcccatatgggcggaccacaggactttgagaagtctccaagggacaggtgtagtcctccgcctccaccaagagaagcatctctggccgtgtgcgggctgctccaggaactatcctctatccgccagttcctagaaaaaagggacgaaatcagggaggtggcgcgagactggctgagagttggtagtgtgcttgataaactgttgttccacatctacctgctggccgttcttgcctactctataaccttggtcatgctgtggtctatctggcaatatgcctag

SEQ ID NO: 265974 - protein, 424 aa, Artificial Sequence
  derived and/or modified sequence
MSDHGDVSLPPEDRVRALSQLGSAVEVNEDIPPRRYFRSGVEIIRMASIYSEEGNIEHAFILYNKYITLFIEKLPKHRDYKSAVIPEKKDTVKKLKEIAFPKAEELKAELLKRYTKEYTEYNEEKKKEAEELARNMAIQQELEKEKQRVAQQKQQQLEQEQFHAFEEMIRNQELEKERLKIVQEFGKVDPGLGGPLVPDLEKPSLDVFPTLTVSSIQPSDCHTTVRPAKPPVVDRSLKPGALSNSESIPTIDGLRHVVVPGRLCPQFLQLASANTARGVETCGILCGKLMRNEFTITHVLIPKQSAGSDYCNTENEEELFLIQDQQGLITLGWIHTHPTQTAFLSSVDLHTHCSYQMMLPESVAIVCSPKFQETGFFKLTDHGLEEISSCRQKGFHPHSKDPPLFCSCSHVTVVDRAVTITDLR

SEQ ID NO: 265975 - protein, 163 aa, Artificial Sequence
  derived and/or modified sequence
MSDHGDVSLPPEDRVRALSQLGSAVEVNEDIPPRRYFRSGVEIIRMASIYSEEGNIEHAFILYNKYITLFIEKLPKHRDYKSAVIPEKKDTVKKLKEIAFPKAEELKAELLKRYTKEYTEYNEEKKKEAEELARNMAIQQELEKEKQRVAQQKQQQLEQEQFH

SEQ ID NO: 265976 - protein, 137 aa, Artificial Sequence
  derived and/or modified sequence
MSDHGDVSLPPEDRVRALSQLGSAVEVNEDIPPRRYFRSGVEIIRMASIYSEEGNIEHAFILYNKYITLFIEKLPKHRDYKSAVIPEKKDTVKKLKEIAFPKAEELKAELLKRYTKEYTEYNEEKKKEAEELARNMA

SEQ ID NO: 265977 - DNA, 1275 bp, Artificial Sequence
  derived and/or modified sequence
atgagcgaccacggcgacgtgagcctgccccccgaggacagagtgagagccctgagccagctgggcagcgccgtggaggtgaacgaggacatcccccccagaagatacttcagaagcggcgtggagatcatcagaatggccagcatctacagcgaggagggcaacatcgagcacgccttcatcctgtacaacaagtacatcaccctgttcatcgagaagctgcccaagcacagagactacaagagcgccgtgatccccgagaagaaggacaccgtgaagaagctgaaggagatcgccttccccaaggccgaggagctgaaggccgagctgctgaagagatacaccaaggagtacaccgagtacaacgaggagaagaagaaggaggccgaggagctggccagaaacatggccatccagcaggagctggagaaggagaagcagagagtggcccagcagaagcagcagcagctggagcaggagcagttccacgccttcgaggagatgatcagaaaccaggagctggagaaggagagactgaagatcgtgcaggagttcggcaaggtggaccccggcctgggcggccccctggtgcccgacctggagaagcccagcctggacgtgttccccaccctgaccgtgagcagcatccagcccagcgactgccacaccaccgtgagacccgccaagccccccgtggtggacagaagcctgaagcccggcgccctgagcaacagcgagagcatccccaccatcgacggcctgagacacgtggtggtgcccggcagactgtgcccccagttcctgcagctggccagcgccaacaccgccagaggcgtggagacctgcggcatcctgtgcggcaagctgatgagaaacgagttcaccatcacccacgtgctgatccccaagcagagcgccggcagcgactactgcaacaccgagaacgaggaggagctgttcctgatccaggaccagcagggcctgatcaccctgggctggatccacacccaccccacccagaccgccttcctgagcagcgtggacctgcacacccactgcagctaccagatgatgctgcccgagagcgtggccatcgtgtgcagccccaagttccaggagaccggcttcttcaagctgaccgaccacggcctggaggagatcagcagctgcagacagaagggcttccacccccacagcaaggacccccccctgttctgcagctgcagccacgtgaccgtggtggacagagccgtgaccatcaccgacctgagatag

SEQ ID NO: 265978 - DNA, 1275 bp, Artificial Sequence
  derived and/or modified sequence
atgagcgatcacggggacgtgagcctgccacctgaggaccgcgtgagggcccttagtcagctgggcagtgcagtggaagttaatgaggatatcccaccacgacgatactttcggtctggcgtagagataatccgtatggcaagcatatactcggaggaaggtaacattgaacacgcttttatcctgtataacaaatacattacgctgttcatcgagaagctgcccaagcaccgggactacaagagtgccgtgatccctgaaaagaaggacacagttaagaagctgaaggaaatagcatttcctaaagcagaggagcttaaagcagaactgctcaagcgttacacgaaagagtatactgaatataacgaggaaaagaagaaagaagccgaggagctcgctagaaacatggccatccaacaagaactcgaaaaagaaaagcaaagggtggcacagcagaaacagcagcaactggaacaggaacagtttcacgctttcgaagagatgatccggaatcaagagttggagaaggaaagattgaagatcgtacaggagtttgggaaggtggatcccggcttaggagggcctctcgttcctgatctggaaaaaccgtctctggacgtgttccccactttaaccgtgagcagtattcaaccaagcgactgtcatactacagtacggcccgcaaagcctccggtggtggatagaagtctgaagcccggcgcgctgagcaattcagagtctatcccaaccattgacggccttcgacatgttgtcgtccctggtaggctctgcccccagtttttacaattagcttccgcaaacacagctcggggggtagaaacgtgcgggatcctttgtgggaagctgatgcgcaacgaattcaccattacgcatgttctaattccgaaacagagcgccggcagcgattactgtaatacggaaaacgaggaggagctctttctgatacaggatcagcagggtctgatcacgcttggctggatccacacccaccctactcaaaccgctttcctgtcaagcgttgaccttcacacgcactgtagctaccagatgatgctgcccgaatctgtagccatcgtttgcagcccaaagtttcaggagacaggcttcttcaaactgacagaccacggcctggaggaaattagtagctgccgccagaaggggtttcaccctcacagcaaagaccccccactgttttgctcgtgttcccacgtcactgtggtggaccgggcagttactatcactgacttgaggtag

SEQ ID NO: 265979 - DNA, 1275 bp, Artificial Sequence
  derived and/or modified sequence
atgtccgaccacggggacgttagcctccctccagaggatcgggttcgggccctgtcacagcttggatccgctgttgaagtgaacgaggacattcctccccgccgctacttcaggtctggcgtggaaatcatccgcatggcttccatttattcagaggaggggaatatcgagcacgccttcattctttataataaatatatcacactgttcattgagaagctccctaagcatcgtgactacaaatccgctgtgatccctgagaagaaggacacggtcaagaaactcaaggagatcgccttccctaaggccgaagaactcaaggctgagctgctaaagcgctatactaaagagtacactgagtacaacgaggagaaaaaaaaagaggcggaggagctggcgcgaaacatggcgattcagcaggaattagaaaaggaaaagcaaagagtcgctcagcagaagcaacagcagttagagcaagagcaattccatgcatttgaggagatgattcggaatcaagagctcgaaaaagaaaggttgaaaatcgtccaggaatttggaaaagtcgaccccgggttgggcgggcccctggtacctgatctggagaagcctagcctggatgttttccccactctaactgtcagctctatccagccctccgattgtcataccaccgtgagacccgccaagccccccgtggtggatagatccctgaaacccggcgccctgtccaacagtgagagcattccgaccatcgacgggctgcgtcatgtcgtcgtgcctggtcgcttgtgtccacagttcctccagcttgctagcgcaaataccgcgcgaggtgtcgagacttgcggcattttatgcggaaagcttatgcggaacgagttcaccatcacccacgttctcatccctaaacagtccgccgggtctgactactgcaacactgaaaacgaagaggagctgttcctcattcaggatcaacaaggcctgatcactctggggtggatccacacccatccaacacagaccgccttcttgagtagtgtcgatttgcatacacactgtagttaccagatgatgcttcccgagtcagtggctattgtctgtagtccgaaatttcaagagaccgggttcttcaagcttaccgaccatgggctcgaggagatctcatcctgcagacaaaaagggtttcaccctcacagtaaggatccgcccctcttctgcagctgtagtcatgtcactgtagtggacagagctgttacaattactgacctgcggtag

SEQ ID NO: 265980 - DNA, 1275 bp, Artificial Sequence
  derived and/or modified sequence
atgtcagaccatggagatgtgtctctcccaccggaggatagagtcagggctcttagtcagctaggctctgcggtggaggtaaacgaggacattccacccagacggtactttcggtccggcgtcgagattattcgcatggcatccatttactctgaggaagggaacatcgagcatgctttcatcctgtacaacaagtatatcacactgttcatagaaaagctgccgaagcatagagactacaaatccgcggtgatacccgagaagaaagacacagtgaaaaaactgaaggagatcgcctttcccaaagccgaagaactgaaagcagaactgctcaaaagatatacaaaggaatataccgaatacaacgaagaaaagaaaaaggaagccgaggaactggcccgaaacatggcaatacagcaggagctggagaaggagaagcaaagagtggctcagcaaaagcagcagcagctcgaacaggagcagttccacgctttcgaggagatgatccgaaaccaggaactcgagaaggaacgcttgaaaatcgtgcaagaatttgggaaggttgacccggggctgggagggccccttgtacccgatctggaaaagccatccttagatgtcttccccacgttgaccgtgagcagtattcaaccctccgactgtcacactaccgtgcgtccggccaaaccccccgtggtcgatagaagcctcaaaccaggcgctttgtcgaattccgagtcgatccccacaatcgacggcctgcggcacgttgtggtccccgggaggctttgcccccagtttctacagctagccagtgccaatacagctagaggggtggagacctgcggtatcctctgcggtaagctgatgaggaatgaatttacaataactcacgtgctgatcccgaaacagagcgcaggctccgactactgcaatactgagaatgaggaggaactctttctcattcaggatcagcagggccttatcaccctaggctggattcacacacaccccacacagactgctttcctcagtagcgtagacctgcacacacattgctcctaccagatgatgctgcccgagtcagtcgcaatcgtgtgttcgcctaaatttcaagagaccgggttctttaaactgaccgatcacggcttagaggaaatatcatcttgtaggcaaaagggcttccacccccatagtaaagacccaccactgttctgtagctgctcccacgtcaccgtggttgacagagctgtgacaattacggacctccggtag

SEQ ID NO: 265981 - DNA, 1275 bp, Artificial Sequence
  derived and/or modified sequence
atgtcagaccatggtgacgtttccttgcctccagaggatcgagtgagggctctgagccagctgggatcggcggtcgaggtcaacgaggacatcccacccaggcgctacttccggagtggagttgagattatccgcatggcctccatttatagtgaagagggaaatattgagcacgcatttatcttgtataacaagtacatcactttgttcattgagaagctccccaagcatagagactataaatcggctgtgatccccgagaaaaaggacaccgtgaagaagctgaaagaaatcgctttcccaaaggcagaagaacttaaagccgagctgcttaagcgatacactaaggagtacactgaatataatgaagaaaagaagaaagaagctgaggagctggctcgcaacatggccatccagcaggaactggagaaagaaaaacagcgcgtggcgcaacagaaacagcagcagctggaacaggagcagtttcacgcgtttgaggaaatgatccggaatcaggagttggagaaggagcgactaaagatcgtccaggaattcggtaaggttgatcctgggctgggcggaccgctcgttccagacctggagaagccttcccttgatgtatttccaacgcttactgttagtagcattcagccgtcagattgccacactactgtgcgccccgccaaaccccccgtcgtggacagatcactaaagccaggggccttgtctaacagcgaatctattccaaccattgatggcctcaggcatgtggtagtgcccggcagattgtgtccgcagttcctgcaattggccagcgccaataccgcccgcggcgtggagacgtgtggtatcctgtgtgggaagttaatgaggaacgagtttaccatcactcacgtgctgattccaaagcagagcgccggctccgattactgtaataccgagaacgaggaggagctcttcctgattcaggaccagcagggcctgattaccctaggttggatacatacccatcccacgcagaccgcctttctctcctctgtggatttgcacacccactgcagctatcagatgatgctccccgagtccgttgctatcgtatgctcaccgaaatttcaagaaacaggctttttcaaactgacagatcatgggcttgaagaaataagttcttgccggcagaaaggcttccaccctcactccaaggacccccctttgttctgttcctgctcccacgtgacagtggtggatcgcgcagttaccattactgaccttagatag

SEQ ID NO: 265982 - DNA, 1275 bp, Artificial Sequence
  derived and/or modified sequence
atgtctgaccatggagatgtgtccctgcccccagaggacagagtgcgggccctgagccagctgggcagcgctgtggaggtgaatgaagacatccccccccggcgctacttccgctctggagtggagatcatccgcatggccagcatctacagcgaggagggcaacatcgagcacgccttcatcctgtacaacaagtacatcaccctcttcatcgagaagctgcccaagcaccgggactacaagtctgctgtgattcctgagaagaaggacacagtgaagaagctgaaggagatcgccttccccaaggccgaggagctgaaggccgagctgctgaagcgctacaccaaggagtacacagagtacaatgaggagaagaagaaggaggccgaggagctggccaggaacatggccatccagcaggagctggagaaggagaagcagagggtggcccagcagaagcagcagcagctggagcaggagcagttccacgcctttgaggagatgatccggaaccaggagctggagaaggagcggctgaagatcgtgcaggagtttgggaaggtggaccccggcctgggcggccccctggtgcctgacctggagaagcccagcctggatgtgttccccaccctgactgtgagcagcatccagcccagcgactgccacaccaccgtgcggcctgccaagccccctgtggtggacaggagcctgaagccaggggccctgagcaacagcgagagcatccccaccattgatggcctgcggcacgtggtggtgcccggccgcctgtgcccccagttcctgcagctggccagcgccaacacagcccggggcgtggagacctgtggcatcctgtgtgggaagctgatgagaaatgagttcaccatcacccacgtgctgatccccaagcagagcgctggcagtgactactgcaacacagaaaatgaggaggagctgttcctgatccaggaccagcagggcctcatcaccctgggctggatccacacccaccccacccagacagccttcctgagctctgtggacctgcacacccactgcagctaccagatgatgctgcctgagagcgtggccatcgtgtgcagccccaagttccaggagaccggcttcttcaagctgacagaccacggcctggaggagatcagcagctgccggcagaagggcttccacccccacagcaaggaccccccactcttctgcagctgcagccacgtgacagtggtggacagagctgtgaccatcacagacctgaggtag

SEQ ID NO: 265983 - DNA, 1275 bp, Artificial Sequence
  derived and/or modified sequence
atgagcgaccacggcgacgtgagcctgccccccgaggaccgggtgcgtgccctgagccagctcggttctgctgtggaggtcaacgaagacattccacctcgtaggtacttcagatctggggttgagatcatccggatggcatctatttattctgaggagggcaatatcgagcacgcttttatactgtataacaagtatatcactctttttatagagaaattacctaagcatagggattacaagagcgcggtcattcctgagaagaaggacaccgttaagaaactgaaggaaatagctttcccaaaggctgaggagcttaaggccgaacttctcaaacgttacaccaaggaatacactgaatacaacgaggagaaaaagaaagaggctgaagaactggcaagaaacatggctattcagcaggagttggaaaaggaaaaacaaagagtggcccaacagaagcaacagcagctggaacaggagcagtttcacgcatttgaggagatgattcggaaccaggaactcgagaaagagagactcaagattgtacaggaattcggaaaggtagatccaggacttggcggacctctggtacccgatctggaaaaaccttccctagatgtattccctacactcactgtctcatcaatccagcccagcgactgccacactacggttcggcctgcaaaaccccctgtggttgaccggagcttgaaacccggtgctctctccaattccgaatcaattcccacgattgatggcttgagacacgttgtcgtgccaggcaggctctgtcctcagttcctgcagctcgcctctgcaaatacagcgaggggagtcgaaacctgtggcatcctgtgtgggaaattaatgaggaatgagtttaccatcacacatgtgttgatacctaagcaaagcgccgggagtgactactgtaatacagaaaacgaagaagaactgtttctgatacaggaccagcaagggctcatcacactcggctggatccacactcatcctactcaaaccgcattcctatcttctgtggatcttcacacacattgctcctaccagatgatgctgcccgaaagtgtagccattgtatgctctcccaagttccaagagacagggttttttaagttgaccgatcatggtctcgaagagatcagctcctgtcggcaaaaagggtttcacccgcactcaaaggatccacccctgttttgtagctgttctcatgtgaccgtagtcgacagggctgtcaccatcaccgatcttagatag

SEQ ID NO: 265984 - DNA, 1275 bp, Artificial Sequence
  derived and/or modified sequence
atgagcgaccacggcgacgtgagcctgccccccgaggaccgggtgcgagcactgtctcagctggggagtgcggtggaagtgaatgaagacataccacccaggcgatactttagatcaggagtggagatcatacggatggcatcaatatactctgaagagggcaacattgaacacgcatttattttatacaacaaatacatcacactgtttattgagaagcttcccaagcaccgcgactacaagagcgccgtgatccccgagaagaaagacacagtcaagaaactgaaagagattgcatttccaaaggcagaggagctgaaggctgagcttctgaagagatacaccaaggagtatacagaatataacgaagaaaaaaaaaaggaggcagaggagctagcccgcaacatggccatccagcaagagttagaaaaagaaaaacaaagggtggcccagcagaagcagcaacaactcgaacaggaacagttccacgcctttgaggagatgattcggaaccaggaactggagaaggagaggttgaaaatcgtccaggagttcggaaaggtcgatcctgggctcggaggacctctagtcccagaccttgagaaacccagcctcgatgtgttcccgacgctgaccgtgtcttccatacagccttctgattgccatactaccgtgaggccagcaaagcctcctgtggtggacaggtcgctgaagccaggtgcgctgtcaaactcggaatcaatcccaacaattgacggtctgaggcacgttgtggtgccgggacgcctctgcccccagttcttgcaactggccagcgctaataccgcgcgcggagtggaaacgtgtggcattctatgtggcaagctgatgaggaacgaatttactattacacatgtgttgatcccaaaacagagtgcgggctccgactattgtaacaccgagaatgaggaggaactatttcttattcaggaccagcagggcctgatcactctcggctggatccatacccacccaacacagaccgcattcctgtccagcgtggacttacatacacattgtagttatcagatgatgctccctgaatctgtcgcgattgtatgttcaccaaagttccaggaaacgggatttttcaagctcactgatcatggactggaggaaatatcgagttgtcgccagaagggctttcacccccactccaaagatcctccgctcttctgcagttgttcccacgttaccgtggtggatagggcagtgaccatcactgatttgcgctag

SEQ ID NO: 265985 - DNA, 1275 bp, Artificial Sequence
  derived and/or modified sequence
atgagcgaccacggcgacgtgagcctgccccccgaggaccgggtgcgagccctttcccagctcggctcagctgtcgaggtgaacgaggacataccgcctcggcgatattttcgatccggtgtggagattatccggatggccagtatctatagcgaagagggcaacatcgaacatgcttttatcctgtataacaaatacattaccctcttcatagaaaagctaccaaaacatcgagactataagagtgccgttataccagaaaagaaagacacagtgaaaaaattgaaggaaatcgccttcccgaaagctgaggaattaaaggccgagctgctaaagcggtacactaaagaatacaccgaatacaatgaggagaagaaaaaggaagccgaggagctcgccaggaatatggccatacagcaggagctggagaaggaaaagcagcgagtcgcccagcagaagcaacagcaactggagcaggagcagttccatgcatttgaagaaatgattagaaaccaggagctcgaaaaggagcggttgaaaattgtacaggagttcggcaaagtcgaccctggcctcggaggcccacttgtgccagatctagaaaagccttctcttgacgtctttccaaccctgacagtgagctcaatccagccaagcgattgtcacaccactgtccgcccggctaagccaccagtggttgaccgatcacttaaacccggcgccctgagcaatagcgagagtatcccaaccatagacggtctaagacatgtggttgtgcctggtcggttgtgcccacagttcttacaattggcgtcggcaaatacggcccgtggcgttgaaacatgcgggatcctgtgtggcaaactaatgcggaatgagttcacgatcacccatgtactcattcctaagcagagcgctggaagcgactactgtaacaccgagaacgaagaggagcttttcctaatacaggatcagcaggggttgattacgctcggctggatacacacgcatcccacccagaccgctttcctatcctccgtggatctccatacccactgctcttaccagatgatgctgccagagtctgtggccattgtgtgctcccccaaatttcaggagacagggttcttcaagttaactgaccatggcttagaggaaatttcttcttgccgccagaaaggatttcatccccattccaaagaccccccccttttctgctcctgctctcacgtgactgtggtggatcgggccgttaccattaccgatctcaggtag

SEQ ID NO: 265986 - DNA, 1275 bp, Artificial Sequence
  derived and/or modified sequence
atgagcgaccacggcgacgtgagcctgccccccgaggaccgggtgagggccctgtcccagctgggcagtgctgtcgaggttaacgaggatatccctccaagacgctactttcgtagtggcgtggaaattatccggatggcttcaatttacagcgaggagggaaacatcgaacatgcgtttattctgtacaataagtacattacgctgtttatcgagaaactgcctaaacatagagactacaaaagtgcagtgataccagaaaagaaggataccgtgaagaaactcaaggagatcgccttccctaaggcagaggaactgaaggcggagctgcttaaacgctacaccaaggaatataccgaatataatgaagaaaaaaagaaagaggctgaagaactggccaggaatatggccatccaacaggagctcgaaaaagaaaaacagcgtgttgcccagcagaagcagcagcagctggagcaagagcagttccacgcctttgaggagatgataaggaaccaggaactcgagaaagagaggttaaagattgtccaagagttcggcaaggtcgaccccggtttggggggtcctcttgtccctgacctcgaaaagccctctctggacgtgttccccacactgacagtttcctcaattcagccatccgattgccacacaactgtgagacctgctaagccgcctgtggtagacagatctttaaaacctggcgccctgagcaactctgagtctatacccactattgacggacttcggcacgtcgtcgttccagggaggctgtgcccacaattccttcagcttgcctcggccaataccgctagaggtgtggaaacctgtggtattctgtgcgggaaacttatgcgcaatgagttcaccataacacacgtgctgatccccaaacagtccgcagggtccgattattgtaacacagaaaatgaggaggagctgttcctcattcaagatcagcagggcctgatcacacttggctggattcatacccaccccacacagacggctttcctctccagtgtagacctccacacgcattgttcataccagatgatgcttccggaaagtgttgcaattgtgtgcagccctaaattccaagagaccgggtttttcaaattgaccgaccacggacttgaggaaatctctagctgtcgccagaaaggctttcacccccactctaaggatccgcctctgttttgctcctgttctcacgtcactgttgtggatcgcgccgtgacaattaccgacctgcgttag

SEQ ID NO: 265987 - DNA, 1275 bp, Artificial Sequence
  derived and/or modified sequence
atgagcgaccatggcgatgtgagcctcccgcctgaagatagagtccgcgctctgagtcagctgggatcagcagtcgaggttaacgaagatatcccccctaggaggtacttccgcagtggcgtcgaaattatccggatggcttcaatctactcggaggaaggtaatattgaacacgcctttattttgtacaacaagtacatcaccctcttcatagagaagcttcccaaacatcgtgactataaaagcgctgtgattccagaaaagaaggacacagttaaaaaattgaaggaaatcgcgtttccaaaggctgaggaactaaaggcagagttactgaagcgatatactaaggagtataccgagtataatgaggagaagaaaaaggaagccgaagagctcgcccgtaacatggcgatacaacaggagctggagaaggagaaacagagggtggcccagcagaagcaacagcagctggagcaagagcagtttcatgcattcgaggagatgatacgaaatcaagagcttgaaaaggagagattgaagatcgttcaggagttcggtaaagtcgaccccggactggggggaccattagtaccagaccttgagaagccgtcattggacgtatttccaactctcacggtcagctcaattcagcccagcgattgtcacaccacagtgaggcctgcaaagcctcctgtggtggaccgatcactgaaacccggagctctttccaacagtgagagcatccccacgatcgatggacttagacacgtggtggtgccaggacgcctgtgcccacagttccttcagctggctagcgccaacacggcacgcggagtggagacttgcgggatcctgtgcgggaaacttatgaggaacgagttcactattacccacgtgctgatcccaaagcagtccgcagggtctgattattgcaatacagagaacgaagaggagctgtttcttatccaggatcagcagggcctaatcacactgggttggattcatacacaccctacccagactgcctttctatctagcgtggacctgcacacccactgttcctaccagatgatgctgcccgagtcagttgcaattgtctgcagtccaaaattccaggagacgggcttctttaaattgaccgatcacggattagaggagatttcgtcgtgcagacagaagggcttccatccccattccaaggaccctcctctgttctgcagctgctcacatgtaaccgtggtggatcgcgcagttacaatcacagatctccggtag

SEQ ID NO: 265988 - DNA, 1275 bp, Artificial Sequence
  derived and/or modified sequence
atgagcgaccatggagacgtgtccctgccacccgaagatagagtgagggccctctcacagcttgggtccgcagtggaggtgaacgaggacatcccccctaggcgatacttccgctctggagtggaaataattcgtatggcgagtatttactccgaggagggtaacattgagcacgcattcattctatataacaagtacatcacactctttatcgagaaactgcccaagcatcgggactataagtcagctgtgatcccagagaaaaaggacaccgtaaaaaagcttaaggaaattgcatttccaaaagctgaagaactcaaagccgaactgctcaagagatacacaaaggaatataccgaatacaatgaagagaagaaaaaagaggccgaagagctggccaggaatatggctatacaacaggaactggaaaaggagaaacagagagtggcacagcagaagcagcagcaactggagcaggagcagttccatgcctttgaggaaatgataagaaatcaggagttggaaaaagagcgcctcaaaattgtccaggagtttgggaaagtcgaccccggtcttggcggacctttggttccggacctcgaaaaaccatccctcgacgtgtttccaactctgacagtgagtagtattcagcccagtgactgtcataccactgtcagaccagccaaaccccctgtggttgataggtccctgaagcccggagctctaagtaacagtgaatccatcccaacgatcgacgggctgcgccacgtagtggtgcctgggaggctgtgcccccagttcctgcaactagcttccgcaaataccgcgagaggtgtggagacgtgcgggatcctctgcggcaagttaatgcgcaatgaatttactattacacacgtgttgatccctaaacagtccgcagggagcgattattgtaacactgagaacgaagaagaattgttcttaattcaagaccaacaagggctaatcacgctagggtggatccatacgcacccgacacagacagcttttcttagtagcgttgacctgcatacacactgctcctaccagatgatgctgccagaatccgtggcgattgtgtgtagtccaaaatttcaggaaactggatttttcaagcttaccgatcatggattagaggaaatctcctcttgccgccagaaggggtttcacccccactctaaagatccaccgctgttttgctcttgctcacacgtgacggtcgtagatagagccgtgaccataacggacctgagatag

SEQ ID NO: 265989 - DNA, 1275 bp, Artificial Sequence
  derived and/or modified sequence
atgagtgaccacggcgacgtttccctaccccctgaagaccgagtaagggcactgagccagctgggctccgctgtggaagtgaatgaggacatcccccctcgtagatactttaggagcggcgtggaaatcataaggatggcctccatttattcggaggaagggaatatcgagcatgccttcatcctgtacaataagtatatcaccttgttcattgaaaagctgccgaaacaccgcgactacaaatctgcggttatccctgagaagaaagacaccgtgaaaaagctcaaagaaatagcattccctaaagcagaagagctgaaggcagaattattgaagagatatactaaagagtacacagaatataatgaagagaagaagaaggaggccgaggaattggccagaaacatggccatccaacaggaactggagaaggagaagcaacgagtggctcagcagaagcagcaacagctggaacaggagcaattccacgctttcgaggagatgatcagaaatcaggaactggagaaggagcgactcaagattgtgcaggagttcggcaaagtcgaccctggtcttggcggtcccttggtaccagacctcgagaagcccagcctcgacgtgttccccaccctcaccgtctcatccatccagcctagcgattgtcacactactgtccggccagccaagcctcccgtggtggacaggagtctaaaaccaggggctctgagtaatagtgaatcaattccaacaattgacgggctgcgccacgtcgtggtgcccggaagactgtgtcctcagttccttcaactagcaagcgccaacaccgctcggggagtcgaaacctgcggcatcctctgcggtaagctcatgcggaatgaattcactattacccacgttctaatccctaagcagagtgccggttcagactactgcaacactgaaaatgaggaggaattattcctgatacaggatcaacaaggcctaattacgctgggatggattcacacacatcccactcagacggcttttctttcttctgtggatctgcatacacattgctcgtaccagatgatgcttccggagtccgtggctatcgtatgctcccctaagtttcaggagaccggctttttcaagctgacagaccatggattagaagagatcagttcctgtagacaaaaggggtttcaccctcactccaaagacccgcctcttttctgctcctgctcccatgtgaccgtcgtcgatcgtgcggtgacaatcaccgacttgagatag

SEQ ID NO: 265990 - DNA, 1275 bp, Artificial Sequence
  derived and/or modified sequence
atgtctgatcacggcgatgtaagcctcccccctgaggaccgcgtgcgggctctgtcccagctcggttccgctgttgaggtcaacgaggatatccctcctcgacgatacttccgctcaggcgtggagattattcgcatggcaagtatctatagcgaggaaggtaatattgagcacgccttcatcctgtataacaagtatattacactctttattgaaaagctacctaaacaccgcgactataagagcgcggtgattccagaaaaaaaggacacagtcaagaagctgaaagagatagcgttccccaaagccgaggaacttaaggccgagctgctcaagagatacaccaaggagtacaccgagtacaatgaggaaaagaaaaaagaggcagaagaactggcaaggaacatggcaatacaacaggaactcgagaaggagaagcaacgcgtggcccagcagaagcagcagcagctggagcaagagcaatttcatgcattcgaggagatgatacggaaccaggaactagagaaagaaaggcttaagatcgtgcaagagttcggcaaggttgacccgggactgggaggacctcttgttccggacctggagaaaccatccttagatgtttttcctaccttaactgtgtccagcattcagccgagcgactgtcacacaactgtccgtcctgccaaaccacccgttgtcgacaggagcctcaagccaggcgcattatctaactccgaaagcatccctaccattgacggcttgcgacacgtggtagtgccaggtagattgtgcccacagtttctccagctggcgtctgcgaacacagccaggggcgtcgagacctgtggaatcctgtgtggaaaactgatgagaaacgaatttactataacacatgtactgatcccaaagcaatcagcgggttccgattactgcaacactgagaatgaagaagagctatttctcatacaggatcagcagggcctcataacacttggttggatccatacccacccgacgcagaccgctttcttgagcagtgtggatctacacactcattgctcctatcagatgatgcttccggaatcagtcgccattgtgtgtagtcctaaattccaagaaaccggcttcttcaagctgacagatcacggactggaggaaatttccagctgcagacaaaaggggtttcacccacattcaaaggacccccctttgttttgctcctgctctcacgtcaccgtggtagatagggccgtgacaataaccgatctcagatag

SEQ ID NO: 265991 - DNA, 1949 bp, Artificial Sequence
  derived and/or modified sequence
acgtttccggaacctccgggtgtcatccgcggggaaagaacttggtcctgatgtctgaccatggagatgtgagcctcccgcccgaagaccgggtgagggctctctcccagctgggtagtgcggtagaggtgaatgaagacattccaccccgtcggtacttccgctctggagttgagattatccgaatggcatccatttactctgaggaaggcaacattgaacatgccttcatcctctataacaagtatatcacgctctttattgagaaactaccaaaacatcgagattacaaatctgctgtcattcctgaaaagaaagacacagtaaagaaattaaaggagattgcatttcccaaagcagaagagctgaaggcagagctgttaaaacgatataccaaagaatatacagaatataatgaagaaaagaagaaggaagcagaggaattggcccggaacatggccatccagcaagagctggaaaaggaaaaacagagggtagcacaacagaagcagcagcaattggaacaggaacagttccatgccttcgaggagatgatccggaaccaggagctagaaaaagagcgactgaaaattgtacaggagtttgggaaggtagaccctggcctaggtggcccgctagtgcctgacttggagaagccctccttagatgtgttccccaccttaacagtctcatccatacagccttcagactgtcacacaactgtaaggccagctaagccacctgtggtggacaggtccttgaaacctggagcactgagcaactcagaaagtattcccacaatcgatggattgcgccatgtggtggtgcctgggcggctgtgcccacagtttctccagttagccagtgccaacactgcccggggagtggagacatgtggaattctctgtggaaaactgatgaggaatgaatttaccattacccatgttctcatccccaagcaaagtgctgggtctgattactgcaacacagagaacgaagaagaacttttcctcatacaggatcagcagggcctcatcacactgggctggattcatactcaccccacacagaccgcgtttctctccagtgtcgacctacacactcactgctcttaccagatgatgttgccagagtcagtagccattgtttgctcccccaagttccaggaaactggattctttaaactaactgaccatggactagaggagatttcttcctgtcgccagaaaggatttcatccacacagcaaggatccacctctgttctgtagctgcagccacgtgactgttgtggacagagcagtgaccatcacagaccttcgatgagcgtttgagtccaacaccttccaagaacaacaaaaccatatcagtgtactgtagccccttaatttaagctttctagaaagctttggaagtttttgtagatagtagaaaggggggcatcacctgagaaagagctgattttgtatttcaggtttgaaaagaaataactgaacatattttttaggcaagtcagaaagagaacatggtcacccaaaagcaactgtaactcagaaattaagttactcagaaattaagtagctcagaaattaagaaagaatggtataatgaacccccatatacccttccttctggattcaccaattgttaacatttttttcctctcagctatccttctaatttctctctaatttcaatttgtttatatttacctctgggctcaataagggcatctgtgcagaaatttggaagccatttagaaaatcttttggattttcctgtggtttatggcaatatgaatggagcttattactggggtgagggacagcttactccatttgaccagattgtttggctaacacatcccgaagaatgattttgtcaggaattattgttatttaataaatatttcaggatatttttcctctacaataaagtaacaattaactt

SEQ ID NO: 265992 - DNA, 6691 bp, Artificial Sequence
  derived and/or modified sequence
ggtggggcagggcctccgagcgtggttggactttgaaggggatcggccgccgtgagtgtggggcctgcagcctactctccccgagtcccctgcccggcctgcctcgctcgaggcacccgacggcttctgtctccgcgggctggcgcctgaccagccaggcccagcggttccccgcctactgcatttgaaagatcccgaaaaccctggatgattgtgcctggggttggcaagttcgtcttgagtgccttcaagaagggttcctcaagcagttgtcgatagagccctccctactgtatacgccccctccgctcattcctgctacttcctttctcctcctcgtatttccccctcggtcctttacgccgcctttccccctcatttgcagatgctgcatcccctttttggaattgctcaaccaggtggtaaccggcgccgcttcctggccttgggaggtggttcctttcttaacccacaagaacctctcccaagagaacttggtcctgatgtctgaccatggagatgtgagcctcccgcccgaagaccgggtgagggctctctcccagctgggtagtgcggtagaggtgaatgaagacattccaccccgtcggtacttccgctctggagttgagattatccgaatggcatccatttactctgaggaaggcaacattgaacatgccttcatcctctataacaagtatatcacgctctttattgagaaactaccaaaacatcgagattacaaatctgctgtcattcctgaaaagaaagacacagtaaagaaattaaaggagattgcatttcccaaagcagaagagctgaaggcagagctgttaaaacgatataccaaagaatatacagaatataatgaagaaaagaagaaggaagcagaggaattggcccggaacatggccatccagcaagagctggaaaaggaaaaacagagggtagcacaacagaagcagcagcaattggaacaggaacagttccatgccttcgaggagatgatccggaaccaggagctagaaaaagagcgactgaaaattgtacaggagtttgggaaggtagaccctggcctaggtggcccgctagtgcctgacttggagaagccctccttagatgtgttccccaccttaacagtctcatccatacagccttcagactgtcacacaactgtaaggccagctaagccacctgtggtggacaggtccttgaaacctggagcactgagcaactcagaaagtattcccacaatcgatggattgcgccatgtggtggtgcctgggcggctgtgcccacagtttctccagttagccagtgccaacactgcccggggagtggagacatgtggaattctctgtggaaaactgatgaggaatgaatttaccattacccatgttctcatccccaagcaaagtgctgggtctgattactgcaacacagagaacgaagaagaacttttcctcatacaggatcagcagggcctcatcacactgggctggattcatactcaccccacacagaccgcgtttctctccagtgtcgacctacacactcactgctcttaccagatgatgttgccagagtcagtagccattgtttgctcccccaagttccaggaaactggattctttaaactaactgaccatggactagaggagatttcttcctgtcgccagaaaggatttcatccacacagcaaggatccacctctgttctgtagctgcagccacgtgactgttgtggacagagcagtgaccatcacagaccttcgatgagcgtttgagtccaacaccttccaagaacaacaaaaccatatcagtgtactgtagccccttaatttaagctttctagaaagctttggaagtttttgtagatagtagaaaggggggcatcacctgagaaagagctgattttgtatttcaggtttgaaaagaaataactgaacatattttttaggcaagtcagaaagagaacatggtcacccaaaagcaactgtaactcagaaattaagttactcagaaattaagtagctcagaaattaagaaagaatggtataatgaacccccatatacccttccttctggattcaccaattgttaacatttttttcctctcagctatccttctaatttctctctaatttcaatttgtttatatttacctctgggctcaataagggcatctgtgcagaaatttggaagccatttagaaaatcttttggattttcctgtggtttatggcaatatgaatggagcttattactggggtgagggacagcttactccatttgaccagattgtttggctaacacatcccgaagaatgattttgtcaggaattattgttatttaataaatatttcaggatatttttcctctacaataaagtaacaattaacttatgtttttgtgcttcagagtgatccatttgatcaagcattgtataaacaggttaaaaaaaaggtatggttgttttggaaaggtgaaggaaaaatggaatttgagatatactgacactgatggtgtgtcccagttcacttttaattactccttgttttttatctgcctgttgccatcttccagaggtgttgtgaagtcatctctgttcttttggtgctgtctcaaatgggtcaaccattcacttcctccttatgccctccatgcttttggctgaggataatgaagcctttgtttggagtaccaggttacactccaataaatgattacatttcccagccaccccaccctaccaatttcattgtgttggctgttcttttctgactaaggcaatacctaggaaaacgcttgaagcagcaattgttactgcaattttctgtgagctgagcctggtgttctaggtggcctagaaataatggtgtcatttgtgacacctcgagtgagggcaggagagtaaatactttggctaggagaagagtgatttattctttatcagaattctaggtgggggagggagaatctgtgaatgcataaagttttcttcatttttaaattttgtctcagtctttattgcttaggttagtggtccttgaacttgtcccctgaaagagcccagttctctatattctttttcttctcttgggttcttaattccccatatagtggaaattccttctttgctgttttggtatgggtgggtctgggggccagctgggcttggacaagccatttcctgctgcagcccagagcagcctggctgttccaccttgctctaaacagtcctgaaattgcccagtcctctgcttttgggaaatccatccccttcttcccattctttgtctaccacttagcttagggctttcttaccttttatttcgactgtagccgttggcttttaccaagtctctttgtttttagcatttcttcattccagtctgttctgcacactttgatcaggagaagcttctcacattccagccatgttcatgttttctctcttgctcaaaaacctgcaatagcttcccattgctgaaaatctaaatttagcttttagtcagaactttccacttaaagttcttacccctggctatatattcaaatatctagggagcaatttaaaaaatactgatgcctgtgttctaccccccaccaattaaagctgaatctctagggtggagcctcagatgttgtttctgcatttgtctttcaagctgctagaattctcaagtacaaccagggttgacaaccactgcattggtctttgatacctaagaattgtgagctctcttatccgtctctgcccaccaaagacattcagccaggtcaacaacatatcatacgttgcaaccacattgatcacagactgatcaccaaactgctatattttcttttctcttcctctaggcacaagatatcttagtggctagatgggtgcaggaaatcagtctgtagatccctcttcatatctgctgcagcctagccactgcagaggcactctgcataggatggtctaagtgtctctgtcttcatcttacctctgtggaggagacgtggaatcaagccagcccacaagccctgagactggataggccggagagaaagaggagtagccagagcggtcgggaaaagaggaaaggaatactgtgggtaaaagggacaaagaccacgcaacctgaggaaagacattgtattgaaagggtaatgactatttggctaaagggactgactcctgggttcccgaggctcaaagaccaggagacttttccactcttgcaagctgcacaagtaccatacttagtgttctgggctgagaggggagacaaaagcatcgtcaggttgccaaacaatgtcccagttgccctgggaggcacaaacctaccaaagtgccataggccaggtgcagagagaatcagaggagctgatttgcttggggtcagagcagagctgggttttttcagatgatcactttcacatactccttgttaaatgggaccaaaggggaagaagaagaaacccttaagcttttgtaatattgtcttgggtaccagataccataaaaggcagcatgagagaaacattcccttgggccagtgtcatggtggattttcttgcttgagaggcaaggatttcagctttcatttggtaccacagaatttaaaattgtaagtgcctatcccttttgactgttgatggcttctttggggttttagttaccccagttgaaagagaaatttttcatattggggttgagaagaatggaggctattaggagcaaagctttaatgagtgaaagtctggtgaatcctgcaattttgatatgtttccagtggattttgagaacacagttttaggaccagagtagatgttgttccctagaaaatagagtcagctattgatattgtgcctcccatccctcatatctcagtgttttaaccccacctgagtttggagaccagtttgtccaaggatctttcaaacatgtgagcccagagtagaacttctgagtcaaggatcatgtctttttctgaggagctttgcttggggcactggaaatcctgtttagatcaggactattggaatattatcctctccaggggaagtgccaggttgaacatttaaggctttgcttctaggcccagctatacattcaccagcaaatcacttaacttcctaaatttctttaaaatctgtaaaatgggatcagtctaatatgcctacctcaaatgatgacagaatgacatctatatgcatatgaggcctacgttagttgaaagatgctataaagatataagggatttgttacttgtctttcttgaaatgttacagttggggtgcggttgcttctatcttctggacctctgcccattcagcatacagctagaggaatctttgggcagatccacattctttagcactagctaggctttgactccaaagctatctggtctaccttgatgttctgagcaggaaaactgaggacctcaagaaccattccaaatttctactcattctccctaagacccagagcagacccaggacctaaagaaattacatcatctctattttcccttggctccagcccactcttgtttgaacctcccacttttgttgttccaactacttcttgagatgaaggaagggcagaacattggccctcttcactgaagtcttcaccccttaatccagggttcaatttttagttcaccttagcctgtttgagattagaagctgggccttaacttacaggtgtgtccggcatcattcaatcagcctgttagatccagaatccagcactgtgacgctacataaccatgggctctgtccttccagttcctttagtgccttccctcactggtaggttcactctgagggcttccttccttgaactccagtggcaactatagtctgtttcccacaatttgttgtgtgtgttttttgttgttttgcagcgttttcatattgtcttttatgtaagtcatgtttctgaactatcgtataaatttcattagggtaagaatcatgtttgctttatgcactgtgtaacatgccttgcagtcagtataggcacttaaccttattgatcagttgttccttggtgttgaataatgtgttaggtagccaggtggacctgtgtcctagcctggagaagctctatgtcaccttgtaggaagccatctgaatttgactcagcatcatatgctgggcctgtgctgcacttgagctttctttccagccgccaggagggatggttgtcctggccaacagcgaatttaatgggtggtcaaaagaagatgtgcctgcatagaaggctgaaagagggagctggaagtaggaggagacaaggagatagtgacaccagtatcttgtcacagaaatcaaggaaggcaacagtttaaaggaggggagggagatcagtggtgccaactggctcagaagaggtttgctgggttaaatctcaagatgagcccatgagatctggtggttagcagaggcctttcctgacaaccccattttaagcacctcttccccatcactctatctcatcactgttactgtctgtgtagccctgtcatgagctaaaatcatcctgtttgtttattgctagcttatgtgtctaaagtatactccttgagaacagcaactttgtctttttcacctttgtactgagtcccctgacatggaataagatatgaataaatgcacagacttgtccaaaatcatccaattaataaa

SEQ ID NO: 265993 - DNA, 2088 bp, Artificial Sequence
  derived and/or modified sequence
gggaagggtcccgggaacgtggtggggcagggcctccgagcgtggttggactttgaaggggatcggccgccatgctgcatcccctttttggaattgctcaaccaggtggtaaccggcgccgcttcctggccttgggaggtggttcctttcttaacccacaagaacctctcccaagagaacttggtcctgatgtctgaccatggagatgtgagcctcccgcccgaagaccgggtgagggctctctcccagctgggtagtgcggtagaggtgaatgaagacattccaccccgtcggtacttccgctctggagttgagattatccgaatggcatccatttactctgaggaaggcaacattgaacatgccttcatcctctataacaagtatatcacgctctttattgagaaactaccaaaacatcgagattacaaatctgctgtcattcctgaaaagaaagacacagtaaagaaattaaaggagattgcatttcccaaagcagaagagctgaaggcagagctgttaaaacgatataccaaagaatatacagaatataatgaagaaaagaagaaggaagcagaggaattggcccggaacatggccatccagcaagagctggaaaaggaaaaacagagggtagcacaacagaagcagcagcaattggaacaggaacagttccatgccttcgaggagatgatccggaaccaggagctagaaaaagagcgactgaaaattgtacaggagtttgggaaggtagaccctggcctaggtggcccgctagtgcctgacttggagaagccctccttagatgtgttccccaccttaacagtctcatccatacagccttcagactgtcacacaactgtaaggccagctaagccacctgtggtggacaggtccttgaaacctggagcactgagcaactcagaaagtattcccacaatcgatggattgcgccatgtggtggtgcctgggcggctgtgcccacagtttctccagttagccagtgccaacactgcccggggagtggagacatgtggaattctctgtggaaaactgatgaggaatgaatttaccattacccatgttctcatccccaagcaaagtgctgggtctgattactgcaacacagagaacgaagaagaacttttcctcatacaggatcagcagggcctcatcacactgggctggattcatactcaccccacacagaccgcgtttctctccagtgtcgacctacacactcactgctcttaccagatgatgttgccagagtcagtagccattgtttgctcccccaagttccaggaaactggattctttaaactaactgaccatggactagaggagatttcttcctgtcgccagaaaggatttcatccacacagcaaggatccacctctgttctgtagctgcagccacgtgactgttgtggacagagcagtgaccatcacagaccttcgatgagcgtttgagtccaacaccttccaagaacaacaaaaccatatcagtgtactgtagccccttaatttaagctttctagaaagctttggaagtttttgtagatagtagaaaggggggcatcacctgagaaagagctgattttgtatttcaggtttgaaaagaaataactgaacatattttttaggcaagtcagaaagagaacatggtcacccaaaagcaactgtaactcagaaattaagttactcagaaattaagtagctcagaaattaagaaagaatggtataatgaacccccatatacccttccttctggattcaccaattgttaacatttttttcctctcagctatccttctaatttctctctaatttcaatttgtttatatttacctctgggctcaataagggcatctgtgcagaaatttggaagccatttagaaaatcttttggattttcctgtggtttatggcaatatgaatggagcttattactggggtgagggacagcttactccatttgaccagattgtttggctaacacatcccgaagaatgattttgtcaggaattattgttatttaataaatatttcaggatatttttcctctacaataaagtaacaattaactt

SEQ ID NO: 265994 - DNA, 1649 bp, Artificial Sequence
  derived and/or modified sequence
tttccggaacctccgggtgtcatccgcggggaaagaacttggtcctgatgtctgaccatggagatgtgagcctcccgcccgaagaccgggtgagggctctctcccagctgggtagtgcggtagaggtgaatgaagacattccaccccgtcggtacttccgctctggagttgagattatccgaatggcatccatttactctgaggaaggcaacattgaacatgccttcatcctctataacaagtatatcacgctctttattgagaaactaccaaaacatcgagattacaaatctgctgtcattcctgaaaagaaagacacagtaaagaaattaaaggagattgcatttcccaaagcagaagagctgaaggcagagctgttaaaacgatataccaaagaatatacagaatataatgaagaaaagaagaaggaagcagaggaattggcccggaacatggccatccagcaagagctggaaaaggaaaaacagagggtagcacaacagaagcagcagcaattggaacaggaacagttccatgccttcgaggagatgatccggaaccaggagctagaaaaagagcgactgaaaattgtacaggagtttgggaaggtagaccctggcctaggtggcccgctagtgcctgacttggagaagccctccttagatgtgttccccaccttaacagtctcatccatacagccttcagactgtcacacaactgtaaggccagctaagccacctgtggtggacaggtccttgaaacctggagcactgagcaactcagaaagtattcccacaatcgatggattgcgccatgtggtggtgcctgggcggctgtgcccacagtttctccagttagccagtgccaacactgcccggggagtggagacatgtggaattctctgtggaaaactgatgaggaatgaatttaccattacccatgttctcatccccaagcaaagtgctgggtctgattactgcaacacagagaacgaagaagaacttttcctcatacaggatcagcagggcctcatcacactgggctggattcatactcaccccacacagaccgcgtttctctccagtgtcgacctacacactcactgctcttaccagatgatgttgccagagtcagtagccattgtttgctcccccaagttccaggaaactggattctttaaactaactgaccatggactagaggagatttcttcctgtcgccagaaaggatttcatccacacagcaaggatccacctctgttctgtagctgcagccacgtgactgttgtggacagagcagtgaccatcacagaccttcgatgagcgtttgagtccaacaccttccaagaacaacaaaaccatatcagtctcaccaagatggaggaacagagcccatggcccacttactacatggattcccactttacagtggagaaggagcttgcagtaaccacaaaagtttctgtataagcaaatttagggaattgaacttcagacagtgtggttgtctccttacttatgaacttgggaatacttacttaggtaacaactaacatcagaggtttttgatctgtagcctttctttctgtccataattagctaatagcttctgctgtacaaacacaaaccattccctgtccaagaaaatta

SEQ ID NO: 265995 - protein, 222 aa, Artificial Sequence
  derived and/or modified sequence
MDSFKVVLEGPAPWGFRLQGGKDFNVPLSISRLTPGGKAAQAGVAVGDWVLSIDGENAGSLTHIEAQNKIRACGERLSLGLSRAQPVQSKPQKASAPAADPPRYTFAPSVSLNKTARPFGAPPPADSAPQQNGQPLRPLVPDASKQRLMENTEDWRPRPGTGQSRSFRILAHLTGTEFMQDPDEEHLKKSREKYVLELQSPRYTRLRDWHHQRSAHVLNVQS

SEQ ID NO: 265996 - protein, 287 aa, Artificial Sequence
  derived and/or modified sequence
MDSFKVVLEGPAPWGFRLQGGKDFNVPLSISRLTPGGKAAQAGVAVGDWVLSIDGENAGSLTHIEAQNKIRACGERLSLGLSRAQPVQSKPQKASAPAADPPRYTFAPSVSLNKTARPFGAPPPADSAPQQNGQPLRPLVPDASKQRLMENTEDWRPRPGTGQSRSFRILAHLTGTEFMQDPDEEHLKKSRPYRPQPYQPPALGCGPCVCRALCPGQNEHSADPAQPAGHAHAAAEPHLHCAGSCRRGARRGQQQRQDSRVSPVPQGHPGPLPGGAGPRVPPGGVCV

SEQ ID NO: 265997 - DNA, 669 bp, Artificial Sequence
  derived and/or modified sequence
atggacagcttcaaggtggtgctggagggccccgccccctggggcttcagactgcagggcggcaaggacttcaacgtgcccctgagcatcagcagactgacccccggcggcaaggccgcccaggccggcgtggccgtgggcgactgggtgctgagcatcgacggcgagaacgccggcagcctgacccacatcgaggcccagaacaagatcagagcctgcggcgagagactgagcctgggcctgagcagagcccagcccgtgcagagcaagccccagaaggccagcgcccccgccgccgacccccccagatacaccttcgcccccagcgtgagcctgaacaagaccgccagacccttcggcgcccccccccccgccgacagcgccccccagcagaacggccagcccctgagacccctggtgcccgacgccagcaagcagagactgatggagaacaccgaggactggagacccagacccggcaccggccagagcagaagcttcagaatcctggcccacctgaccggcaccgagttcatgcaggaccccgacgaggagcacctgaagaagagcagagagaagtacgtgctggagctgcagagccccagatacaccagactgagagactggcaccaccagagaagcgcccacgtgctgaacgtgcagagctag

SEQ ID NO: 265998 - DNA, 864 bp, Artificial Sequence
  derived and/or modified sequence
atggacagcttcaaggtggtgctggagggccccgccccctggggcttcagactgcagggcggcaaggacttcaacgtgcccctgagcatcagcagactgacccccggcggcaaggccgcccaggccggcgtggccgtgggcgactgggtgctgagcatcgacggcgagaacgccggcagcctgacccacatcgaggcccagaacaagatcagagcctgcggcgagagactgagcctgggcctgagcagagcccagcccgtgcagagcaagccccagaaggccagcgcccccgccgccgacccccccagatacaccttcgcccccagcgtgagcctgaacaagaccgccagacccttcggcgcccccccccccgccgacagcgccccccagcagaacggccagcccctgagacccctggtgcccgacgccagcaagcagagactgatggagaacaccgaggactggagacccagacccggcaccggccagagcagaagcttcagaatcctggcccacctgaccggcaccgagttcatgcaggaccccgacgaggagcacctgaagaagagcagaccctacagaccccagccctaccagccccccgccctgggctgcggcccctgcgtgtgcagagccctgtgccccggccagaacgagcacagcgccgaccccgcccagcccgccggccacgcccacgccgccgccgagccccacctgcactgcgccggcagctgcagaagaggcgccagaagaggccagcagcagagacaggacagcagagtgagccccgtgccccagggccaccccggccccctgcccggcggcgccggccccagagtgccccccggcggcgtgtgcgtgtag

SEQ ID NO: 265999 - DNA, 522 bp, Artificial Sequence
  derived and/or modified sequence
atggacagcttcaaggtggtgctggagggccccgccccctggggcttcagactgcagggcggcaaggacttcaacgtgcccctgagcatcagcagactgacccccggcggcaaggccgcccaggccggcgtggccgtgggcgactgggtgctgagcatcgacggcgagaacgccggcagcctgacccacatcgaggcccagaacaagatcagagcctgcggcgagagactgagcctgggcctgagcagagcccagcccgtgcagagcaagccccagaaggccagcgcccccgccgccgacccccccagatacaccttcgcccccagcgtgagcctgaacaagaccgccagacccttcggcgcccccccccccgccgacagcgccccccagcagaacggccagcccctgagacccctggtgcccgacgccagcaagcagagactgatggagaacaccgaggactggagacccagacccggcaccggccagagcagaagcttcagaatcctggcccacctgtag

SEQ ID NO: 266000 - DNA, 273 bp, Artificial Sequence
  derived and/or modified sequence
atggacagcttcaaggtggtgctggagggccccgccccctggggcttcagactgcagggcggcaaggacttcaacgtgcccctgagcatcagcagactgacccccggcggcaaggccgcccaggccggcgtggccgtgggcgactgggtgctgagcatcgacggcgagaacgccggcagcctgacccacatcgaggcccagaacaagatcagagcctgcggcgagagactgagcctgggcctgagcagagcccagcccgtgcagagcaagtag

SEQ ID NO: 266001 - DNA, 669 bp, Artificial Sequence
  derived and/or modified sequence
atggacagcttcaaagtagttctggagggtccagcaccctggggttttagactgcaaggaggcaaagattttaatgtaccgctgtcgatatctcggttgacacccggcggaaaagcggcgcaggccggcgtggcggtgggcgactgggtgctgtccatagacggtgagaatgctggaagtctgacgcatatcgaagcccaaaacaaaattcgtgcgtgcggagaaagactttcccttgggctgtcccgggcacagccggtccaaagtaaacctcagaaggcttcagcacctgctgccgatcctccccggtacacattcgcgccaagtgtttcccttaacaaaaccgctaggccctttggcgctccaccacccgccgactccgcgccacagcaaaacggccagcctttgcgccctcttgttcccgatgcatctaagcagagattgatggaaaacaccgaagattggcggccaaggccaggtacaggtcagagtcggtcttttcgaattctggcgcatctgacaggtaccgagtttatgcaggatcctgatgaggaacatctgaaaaaatcacgcgagaagtacgttttggagctgcagagtccaagatacactcggctgagggactggcaccaccaacgatcagctcacgtattgaatgtgcagtcgtag

SEQ ID NO: 266002 - DNA, 864 bp, Artificial Sequence
  derived and/or modified sequence
atggattcattcaaggtcgtactggaagggccagcaccgtggggttttagactacagggcggcaaggactttaatgtaccactcagtattagccggctcacccccggaggaaaggctgcccaagcaggcgtcgccgtaggagactgggtattgtccatagacggagagaatgcaggtagcctaacacacattgaagcacagaataaaatccgcgcatgtggagaaaggctgtcgcttggcttatccagggcccaaccagtccagagcaaacctcagaaggctagcgccccggccgcagatccacctcgatacacgtttgcgccatccgtgtcactcaataagacagcaagacctttcggagcccctcccccagctgatagcgccccgcagcagaacggtcagcctctaagaccgctagttcccgatgcatccaagcagcggctgatggagaacaccgaggactggcgcccccgacccgggaccggccagagcagatctttccggatattggcgcacctgaccggaacagagttcatgcaagaccccgacgaggagcacctaaaaaagtcccgaccttacaggcctcagccttaccagcctccagcacttgggtgcgggccgtgtgtctgcagagctctttgcccagggcagaacgagcactctgcggatcccgcccagcctgctggccatgctcatgccgctgccgagcctcacttgcactgtgccggctcatgccgaaggggcgctcgtcgcggacagcaacagcgacaggacagtcgcgtctcaccagtgccacaggggcatcccggaccattacccggcggggccgggcctcgggttcctccagggggggtgtgtgtgtag

SEQ ID NO: 266003 - DNA, 522 bp, Artificial Sequence
  derived and/or modified sequence
atggacagctttaaagtagttctcgaaggtcctgctccctggggattccgcctgcaaggcgggaaagacttcaatgtgccccttagtatctcccggctcactcccgggggtaaggcggcacaggccggagtagctgtaggcgattgggtgctgagtatcgatggagagaacgctggcagtttaactcatatcgaggcccagaacaagatccgggcttgtggcgagcgattgtcccttggcctgtctagagcccagcccgtccagagtaaacctcagaaagccagcgcccctgctgccgatccccccaggtatacctttgctccatcggtgtctctcaataagactgccaggccttttggcgcaccgccacctgcggacagtgcacctcagcagaacgggcagcctttacgccccctggtgcctgacgcctccaagcagagattaatggagaacacagaggattggagaccaagaccggggacagggcagtcccggagcttcaggattttagcccacctctag

SEQ ID NO: 266004 - DNA, 273 bp, Artificial Sequence
  derived and/or modified sequence
atggacagcttcaaggtggtgctagaagggcctgcgccttggggtttcaggttgcagggcggaaaggacttcaacgtacccctctctatttcaagactcactcctgggggcaaagctgcccaggctggtgtagctgttggagactgggtgttgagcattgacggagaaaatgccggaagcctcacccacatcgaagcacaaaataagatcagggcttgtggcgaaaggttgagtcttggcttgtcacgggctcagcccgttcagagtaagtag

SEQ ID NO: 266005 - DNA, 669 bp, Artificial Sequence
  derived and/or modified sequence
atggacagcttcaaggtggtgctggagggccctgccccctggggcttccggctgcagggcggcaaggacttcaacgtgcccctgagcatcagccggctgaccccaggcggcaaggccgcccaggccggcgtggccgtgggggactgggtgctgagcattgatggagaaaatgccggcagcctgacccacatcgaggcccagaacaagatccgggcctgtggggagcggctgagcctgggcctgagccgggcccagcctgtgcagagcaagccccagaaggccagcgccccagctgctgaccccccacgctacacctttgcccccagcgtgtccctgaacaagacagcccggccctttggagcccctcctcctgctgacagcgccccccagcagaatggccagcccctgcggcccctggtgcctgatgccagcaagcagaggctgatggagaacacagaggactggaggcccaggcctggcaccggccagagccgctccttccgcatcctggcccacctgaccggcacagagttcatgcaggaccctgatgaggagcacctgaagaagagccgggagaagtatgtgctggagctgcagagcccccgctacacccggctgcgggactggcaccaccagaggtctgcccacgtgctgaatgtgcagagctag

SEQ ID NO: 266006 - DNA, 864 bp, Artificial Sequence
  derived and/or modified sequence
atggacagcttcaaggtggtgctggagggccctgccccctggggcttccggctgcagggcggcaaggacttcaacgtgcccctgagcatcagccggctgaccccaggcggcaaggccgcccaggccggcgtggccgtgggggactgggtgctgagcattgatggagaaaatgccggcagcctgacccacatcgaggcccagaacaagatccgggcctgtggggagcggctgagcctgggcctgagccgggcccagcctgtgcagagcaagccccagaaggccagcgccccagctgctgaccccccacgctacacctttgcccccagcgtgtccctgaacaagacagcccggccctttggagcccctcctcctgctgacagcgccccccagcagaatggccagcccctgcggcccctggtgcctgatgccagcaagcagaggctgatggagaacacagaggactggaggcccaggcctggcaccggccagagccgctccttccgcatcctggcccacctgaccggcacagagttcatgcaggaccctgatgaggagcacctgaagaagagccggccctaccggccccagccctaccagcccccagccctgggctgcggcccctgtgtgtgccgggccctgtgccccggccagaatgagcacagcgctgaccctgcccagcctgctggccacgcccatgctgctgctgagccccacctgcactgtgccggcagctgccggcggggggcccggcggggccagcagcagaggcaggacagccgggtgtcccctgtgccccagggccaccctggccccctgcctggaggagctggcccccgggtgcccccaggcggcgtgtgtgtgtag

SEQ ID NO: 266007 - DNA, 522 bp, Artificial Sequence
  derived and/or modified sequence
atggacagcttcaaggtggtgctggagggccctgccccctggggcttccggctgcagggcggcaaggacttcaacgtgcccctgagcatcagccggctgaccccaggcggcaaggccgcccaggccggcgtggccgtgggggactgggtgctgagcattgatggagaaaatgccggcagcctgacccacatcgaggcccagaacaagatccgggcctgtggggagcggctgagcctgggcctgagccgggcccagcctgtgcagagcaagccccagaaggccagcgccccagctgctgaccccccacgctacacctttgcccccagcgtgtccctgaacaagacagcccggccctttggagcccctcctcctgctgacagcgccccccagcagaatggccagcccctgcggcccctggtgcctgatgccagcaagcagaggctgatggagaacacagaggactggaggcccaggcctggcaccggccagagccgctccttccgcatcctggcccacctgtag

SEQ ID NO: 266008 - DNA, 273 bp, Artificial Sequence
  derived and/or modified sequence
atggacagcttcaaggtggtgctggagggccctgccccctggggcttccggctgcagggcggcaaggacttcaacgtgcccctgagcatcagccggctgaccccaggcggcaaggccgcccaggccggcgtggccgtgggggactgggtgctgagcattgatggagaaaatgccggcagcctgacccacatcgaggcccagaacaagatccgggcctgtggggagcggctgagcctgggcctgagccgggcccagcctgtgcagagcaagtag

SEQ ID NO: 266009 - DNA, 669 bp, Artificial Sequence
  derived and/or modified sequence
atggacagcttcaaggtggtgctggagggccccgccccctggggctttcgactccaggggggcaaggacttcaatgttcccctgtcaatcagtcgactcacgccagggggcaaggcagcccaggccggagtggctgtcggcgactgggtgttatcaattgacggagagaatgcagggtcacttacgcacatcgaggctcagaacaaaattagagcctgcggcgaacgtttgtcactgggtcttagccgggcccaacctgtgcagtctaaacctcaaaaagcttcagctccggccgctgaccctcccaggtatacttttgccccatctgtatctcttaataaaaccgcgcgaccattcggggccccaccgcctgccgactctgctccacagcagaacggccagccacttcgccctctcgtgcctgatgccagcaaacagcgtctaatggagaataccgaagattggcgccctaggcccggaacaggacaaagtaggagtttccgtattctcgcccatctaaccgggacagagtttatgcaagatcccgacgaggagcacttaaagaaaagccgtgaaaagtacgtgctggaactccagagtccgaggtacacacggctgagagactggcatcaccagcgctcagctcacgtcctcaacgtccagagttag

SEQ ID NO: 266010 - DNA, 864 bp, Artificial Sequence
  derived and/or modified sequence
atggacagcttcaaggtggtgctggagggccccgccccctggggctttagactgcaagggggtaaagatttcaatgtcccgctctctatatctcgccttacacccggtggtaaggcggcgcaagccggcgttgctgttggcgactgggtactctccatcgacggagagaacgcagggtctctgacacacattgaagcccagaacaagatcagagcctgcggagaaaggctgtccttgggcctgtctcgagcccaacccgtccagtcaaagccccaaaaagctagcgctccggcagccgacccacctagatatacctttgccccgtctgtgagcctcaataagacagcaagacctttcggcgccccacccccagcagattcggcgccccaacagaacggacagcctctgaggccactggttcccgatgcatccaagcagcggctgatggagaatacagaggactggcgccctcgccccggcacggggcagtcacggtccttcagaattttagcacacttgacgggcacagaattcatgcaggatcccgacgaggaacacctgaaaaaaagcaggccttaccgtccacagccataccagcccccagccctgggatgtggaccatgtgtttgtagggccctgtgtcccgggcaaaatgagcattccgccgaccccgcccaaccagccggacatgcccacgctgccgcagagccacacctgcactgcgctgggagttgcagaagaggagcccgccgggggcaacagcagaggcaggattcccgggtgtcccccgttccacaagggcacccaggaccgctgccaggtggcgccggccccagggtgccccctgggggggtgtgcgtgtag

SEQ ID NO: 266011 - DNA, 522 bp, Artificial Sequence
  derived and/or modified sequence
atggacagcttcaaggtggtgctggagggccccgccccctggggctttcgcctccaggggggcaaagatttcaatgtgcccttgtcgataagtagactcactcccggtgggaaggcggcgcaggccggggtggccgtaggggactgggtcctgagcattgacggtgagaacgcgggatccctcacccacattgaagcgcagaacaagataagggcctgcggcgagagactctccttgggcttgagtagggcacagcccgtgcaatccaagccgcagaaggcatctgctccagccgcggacccccctagatacaccttcgcaccttctgtgtccctgaacaagactgcaaggccttttggcgccccacctcccgctgactccgctccccagcaaaacggccagcccctgcggccccttgtccccgatgcatcgaagcagaggctgatggagaatacagaagactggcgtcccagacctggaacgggacaatccagatctttccggattctggctcacctctag

SEQ ID NO: 266012 - DNA, 273 bp, Artificial Sequence
  derived and/or modified sequence
atggacagcttcaaggtggtgctggagggccccgccccctggggctttcgattgcaaggagggaaggattttaatgtgcctcttagcattagccgcctcacgcctgggggaaaagccgcccaggctggtgtggccgtgggcgactgggtcctgtcaattgacggagagaacgcagggagcttgacgcacattgaagctcagaacaagattcgggcctgcggcgagcggttaagcctcgggctctctagggcccagcccgttcaaagcaagtag

SEQ ID NO: 266013 - DNA, 669 bp, Artificial Sequence
  derived and/or modified sequence
atggactcatttaaagtggtcctggaaggcccagccccatggggtttccggctgcagggaggcaaagacttcaacgtccctctctcgatctctcgcctgacacccggaggcaaagcggcacaggccggtgtggcagtgggggactgggtcttgtcaatcgatggggagaatgcgggttccctgacccacattgaggcccagaataagattagagcatgcggcgaaaggttatccctgggcctgagtagggcacaaccagtccaaagcaagcctcagaaggcctcagcccctgccgctgatcctccaagatacaccttcgcgccatcagtgtctctgaacaagaccgctcgaccattcggagccccaccgccagccgactctgcaccccagcagaatggtcaacccttaagacctttggtgccggacgcttccaagcagaggttgatggagaataccgaggactggagaccaaggccaggcaccgggcagtctcgctctttcaggatcctggctcacctaacaggcaccgaattcatgcaagacccggatgaagaacatctcaagaagagcagagaaaagtacgttttagaactccagtccccacgttacacgaggctgagagattggcaccaccagcggtctgctcacgtactgaatgtccaatcatag

SEQ ID NO: 266014 - DNA, 864 bp, Artificial Sequence
  derived and/or modified sequence
atggactcattcaaagtggtgctggaaggacctgccccttggggtttcagactgcagggaggtaaggacttcaatgtgcccctatccatcagtcgactcacacctggaggcaaggcagcgcaagcaggcgtggctgtgggcgattgggtactgtccatcgacggggaaaatgccggaagtttgacccacattgaagcccagaataaaattcgggcttgtggagagcgactaagcctcggtctttctagagcacagccagtgcagagtaaaccccagaaggcctctgccccagctgctgatccacctcgctatactttcgcaccgagtgtatctttgaacaaaaccgctcgcccattcggcgctcctcctcccgctgactcagcgcctcagcagaatggccagcccttgaggccacttgtgccagacgccagtaaacaaaggctcatggagaacaccgaagactggcgcccaagacccggaacagggcagtcccgttccttcaggattctagctcacttaacgggtaccgagtttatgcaggatcctgacgaggaacatctcaagaagagccggccataccgccctcagccataccaaccgccagctttgggatgcgggccttgtgtgtgcagagccctatgtcccggacagaacgagcacagcgccgatcccgcacagcctgcgggacacgctcacgcagcagcggagccccatttgcactgtgctggatcatgcaggcggggagctcgaagaggacagcagcagagacaggattctagagtttctccggttccccagggtcatccaggaccattgccgggaggagcgggtcctagggtgccgccaggtggtgtgtgcgtatag

SEQ ID NO: 266015 - DNA, 522 bp, Artificial Sequence
  derived and/or modified sequence
atggactcatttaaggtagtcctggaggggcctgcaccttgggggtttaggctgcagggcggaaaggatttcaacgttcctttgtcaataagccgccttacaccaggcggaaaggccgcacaggctggtgtagctgtgggggattgggttttatccattgacggggagaacgccggatcccttacccatattgaagcccagaataaaattcgcgcatgtggggaacggctcagcctgggactttctcgggctcaacccgtgcaaagcaagccacagaaggcttccgcgccagcagcagatcctcccagatacacatttgccccatccgtaagcctgaataaaacggccaggccttttggcgcaccgcctcctgccgactccgcaccacagcagaatggccagcctttgaggcctttggtgcccgatgcttcgaaacagcgattaatggagaataccgaggattggaggccacgccctggcactggccaaagccgctccttcaggatcctggctcacctgtag

SEQ ID NO: 266016 - DNA, 273 bp, Artificial Sequence
  derived and/or modified sequence
atggattcttttaaggtcgtgctcgaaggacctgcgccttggggcttcaggctgcaaggcggtaaggactttaatgtccctctgtcgatttctcgcctgacccctggcggtaaggcagcccaggccggtgtcgctgtaggagattgggtgctgagcattgacggcgagaatgccggttccctgacccacattgaagctcagaacaaaatacgagcctgcggagagaggctatcacttggcctatccagggcgcagcccgtccagtctaagtag

SEQ ID NO: 266017 - DNA, 977 bp, Artificial Sequence
  derived and/or modified sequence
ctccctggagcccgacgcagagcagcgccctggccgggccaagcaggagccggcatcatggattccttcaaagtagtgctggaggggccagcaccttggggcttccggctgcaagggggcaaggacttcaatgtgcccctctccatttcccggctcactcctgggggcaaagcggcgcaggccggagtggccgtgggtgactgggtgctgagcatcgatggcgagaatgcgggtagcctcacacacatcgaagctcagaacaagatccgggcctgcggggagcgcctcagcctgggcctcagcagggcccagccggttcagagcaaaccgcagaaggcctccgcccccgccgcggaccctccgcggtacacctttgcacccagcgtctccctcaacaagacggcccggccctttggggcgcccccgcccgctgacagcgccccgcagcagaatggacagccgctccgaccgctggtcccagatgccagcaagcagcggctgatggagaacacagaggactggcggccgcggccggggacaggccagtcgcgttccttccgcatccttgcccacctcacaggcaccgagttcatgcaagacccggatgaggagcacctgaagaaatcaagggaaaagtatgtcctggagctgcagagcccacgctacacccgcctccgggactggcaccaccagcgctctgcccacgtgctcaacgtgcagtcgtagcccggccctctccagccggctgccctctctgcctccctctttctgttcctcctgcccagggcacccccttagtgcctccagcttctgcctacctcaccccccctttcgtgcccctggcctgagcctcctgctggcctggccctggccgcccacctgggttcatctgacactgccttccctctttgccctgtggtactgctgtctgccaggtctgtgctgccttgggcatggaataaacattctcagccctg

SEQ ID NO: 266018 - DNA, 759 bp, Artificial Sequence
  derived and/or modified sequence
ggggaggccgcgccagtttagtccctcggcccacccctggttgcaaagaacctcaagcctggattcaggcacccctcaccgttccagtcccaaggggaggggggctgctcctgtctttccaaagtgaggtccgccagccagcagcccaggccagcctgacaaaatacctgcctcctatggcttgggcgtgctcaggggctgcccgtgcctgcctggcccctgtccaaggagccggcatcatggattccttcaaagtagtgctggaggggccagcaccttggggcttccggctgcaagggggcaaggacttcaatgtgcccctctccatttcccggctcactcctgggggcaaagcggcgcaggccggagtggccgtgggtgactgggtgctgagcatcgatggcgagaatgcgggtagcctcacacacatcgaagctcagaacaagatccgggcctgcggggagcgcctcagcctgggcctcagcagggcccagccggttcagagcaaaccgcagaaggcctccgcccccgccgcggaccctccgcggtacacctttgcacccagcgtctccctcaacaagacggcccggccctttggggcgcccccgcccgctgacagcgccccgcagcagaatggacagccgctccgaccgctggtcccagatgccagcaagcagcggctgatggagaacacagaggactggcggccgcggccggggacaggccagtcgcgttccttccgcatccttgcccacctca

SEQ ID NO: 266019 - DNA, 636 bp, Artificial Sequence
  derived and/or modified sequence
ccggcccctgactcacccggccgcccgaggctccaggctggcttggggggaggccgcgccagtttagtccctcggcccacccctggttgcaaagaacctcaagcctggattcaggcacccctcaccgttccagtcccaaggggaggggggctgctcctgtctttccaaagtgaggtccgccagccagcagcccaggccagcctgacaaaatacctgcctcctatggcttgggcgtgctcaggggctgcccgtgcctgcctggcccctgtccaaggctggtatcctgagctggcccggcctgcctgcctgcccgcccaccatgctggccactcaccttctcttctctcctctcaggagccggcatcatggattccttcaaagtagtgctggaggggccagcaccttggggcttccggctgcaagggggcaaggacttcaatgtgcccctctccatttcccggctcactcctgggggcaaagcggcgcaggccggagtggccgtgggtgactgggtgctgagcatcgatggcgagaatgcgggtagcctcacacacatcgaagctcagaacaagatccgggcctgcggggagcgcctcagcctgggcctcagcagggcccagccggttcagagcaaac

SEQ ID NO: 266020 - DNA, 810 bp, Artificial Sequence
  derived and/or modified sequence
atgtataaggaaacggtttactccgcattcaatttgctaatgcactaccctccgccatcaggagcaggccagcaccctcagccacagccccccttacacaaagctaaccagcccccgcatggtgtcccccagctatctttgtacgagcactttaacagcccgcacccaaccccagcacctgccgacatctcccagaagcaggtgcacagacccttgcaaactcccgatctgtccgggttctatagcttgacgagtggcagtatgggacaactgcctcataccgtttcatggttcactcatccttcattaatgctaggtagtggagtgcccggccaccctgcggctatccctcatcccgctatcgttcctccatccgggaagcaagagctccagccctttgacaggaatctaaagacacaggccgaaagcaaagctgagaaagaggccaagaaacccacaatcaaaaagcctctgaacgccttcatgttatatatgaaggaaatgcgcgccaaggtcatagccgagtgcactctgaaggaatccgccgctattaaccaaattctggggaggcgctggcacgccttaagcagagaggaacaagcaaagtactacgagctggcccggaaggagcgccagcttcatatgcagctgtatccgggctggagtgctcgggataattatgggaaaaagaagcgtcgttcacgagagaagcaccaggagagcacgaccggaggaaagcggaatgcatttgggacctatcctgaaaaggcagcggctcccgctcccttcctcccgatgactgttctttag

SEQ ID NO: 266021 - DNA, 810 bp, Artificial Sequence
  derived and/or modified sequence
atgtacaaggagaccgtgtacagcgccttcaacctgctgatgcactaccccccacccagcggggccggccagcacccccagccccagccccccctgcacaaggccaaccagcccccccacggcgtgccccagctgagcctgtatgagcacttcaacagcccccaccccaccccagccccagctgacatcagccagaagcaggtgcaccggcccctgcagaccccagacctgagcggcttctacagcctgaccagcggctccatgggccagctgccccacacagtgtcctggttcacccaccccagcctgatgctgggcagcggcgtgcccggccaccctgctgccatcccccacccagccatcgtgcccccatctgggaagcaggagctgcagccctttgacaggaacctgaagacccaggccgagagcaaggccgagaaggaggccaagaagcccaccatcaagaagcccctgaatgccttcatgctgtacatgaaggagatgagggccaaggtgattgctgaatgtaccctgaaggagagcgctgccatcaaccagatcctgggccgccgctggcacgccctgagccgggaggagcaggccaagtactatgagctggccaggaaggagcggcagctgcacatgcagctgtacccaggctggagcgcccgggacaactacggcaagaagaagaggaggagccgggagaagcaccaggagagcaccactggaggcaagagaaatgccttcggcacctacccagagaaggccgccgccccagcccccttcctgcccatgacagtgctgtag

SEQ ID NO: 266022 - DNA, 810 bp, Artificial Sequence
  derived and/or modified sequence
atgtacaaggagaccgtgtacagcgccttcaacctgctgatgcactatcccccccctagcggcgccggccagcacccacagccacagcctcccctgcataaggccaaccagcccccacacggcgtccctcagctgtcgttatacgagcatttcaatagcccccatccaacaccagcacccgctgatatttcccagaaacaggtgcatcggcccctgcagaccccagatctctccggcttttattccctgaccagcgggagcatggggcaactgccacatacggtaagctggtttacccacccctctttaatgctgggtagcggcgtccctggacaccccgcggctatcccccaccctgccatcgtgccccctagcgggaagcaggagttacagcctttcgatcgcaacttaaaaacccaagcagagagcaaagccgaaaaagaggcaaagaaacctaccattaaaaaacctcttaacgctttcatgttgtatatgaaagagatgagagccaaggtgatagcagaatgtaccctgaaggagagtgctgccatcaaccagattttgggacgaagatggcacgccctttctcgagaagaacaggccaaatattatgagttagcccggaaagagcgacaactgcacatgcagctctacccaggatggagtgccagggataactacggcaagaagaagcgacggtcaagggaaaaacaccaggaatccactactggcggtaagcgaaacgcttttggcacctacccagaaaaggccgctgccccagcaccctttctgccaatgacagtgctatag

SEQ ID NO: 266023 - DNA, 810 bp, Artificial Sequence
  derived and/or modified sequence
atgtacaaggaaactgtttactctgctttcaacctactgatgcactacccacccccaagtggagccggacagcacccccagcctcagccccctctgcacaaagccaaccagcccccacacggtgtgccccagctctctctgtacgagcactttaactcacctcatcccacaccagctcccgctgatatttctcaaaagcaggtccaccgccctctgcaaacccctgatctgagcggtttctactccctaacttctgggagtatggggcagcttcctcatacagtgagctggttcacccatcctagcttgatgctgggatcaggagtgcccggacacccagcagccataccgcatcccgcaattgttccaccatccggcaagcaggaacttcagccatttgatcggaatctcaaaacgcaagccgagagtaaagcagaaaaggaagcaaagaagccgaccattaaaaaacccctcaacgctttcatgctttacatgaaagaaatgagggcaaaagtgatcgcggaatgcactctaaaagagagcgcagctataaaccagatcctggggaggcgctggcacgccttgtctcgggaggagcaggcaaagtactacgagctagcgagaaaggagcgccagctccatatgcagctgtacccaggctggtccgccagagataattacggcaaaaagaaaaggcgaagccgagaaaagcatcaggagagcaccactggtggcaaaaggaatgctttcgggacgtaccctgaaaaagcagccgctcccgctccattccttcctatgaccgtcctgtag

SEQ ID NO: 266024 - DNA, 810 bp, Artificial Sequence
  derived and/or modified sequence
atgtacaaggagaccgtgtacagcgccttcaacctgctgatgcactaccccccccccagcggcgccggccagcacccccagccccagccccccctgcacaaggccaaccagcccccccacggcgtgccccagctgagcctgtacgagcacttcaacagcccccaccccacccccgcccccgccgacatcagccagaagcaggtgcacagacccctgcagacccccgacctgagcggcttctacagcctgaccagcggcagcatgggccagctgccccacaccgtgagctggttcacccaccccagcctgatgctgggcagcggcgtgcccggccaccccgccgccatcccccaccccgccatcgtgccccccagcggcaagcaggagctgcagcccttcgacagaaacctgaagacccaggccgagagcaaggccgagaaggaggccaagaagcccaccatcaagaagcccctgaacgccttcatgctgtacatgaaggagatgagagccaaggtgatcgccgagtgcaccctgaaggagagcgccgccatcaaccagatcctgggcagaagatggcacgccctgagcagagaggagcaggccaagtactacgagctggccagaaaggagagacagctgcacatgcagctgtaccccggctggagcgccagagacaactacggcaagaagaagagaagaagcagagagaagcaccaggagagcaccaccggcggcaagagaaacgccttcggcacctaccccgagaaggccgccgcccccgcccccttcctgcccatgaccgtgctgtag

SEQ ID NO: 266025 - protein, 337 aa, Artificial Sequence
  derived and/or modified sequence
MSLEQEEETQPGRLLGRRDAVPAFIEPNVRFWITERQSFIRRFLQWTELLDPTNVFISVESIENSRQLLCTNEDVSSPASADQRIQEAWKRSLATVHPDSSNLIPKLFRPAAFLPFMAPTVFLSMTPLKGIKSVILPQVFLCAYMAAFNSINGNRSYTCKPLERSLLMAGAVASSTFLGVIPQFVQMKYGLTGPWIKRLLPVIFLVQASGMNVYMSRSLESIKGIAVMDKEGNVLGHSRIAGTKAVRETLASRIVLFGTSALIPEVFTYFFKRTQYFRKNPGSLWILKLSCTVLAMGLMVPFSFSIFPQIGQIQYCSLEEKIQSPTEETEIFYHRGV

SEQ ID NO: 266026 - protein, 178 aa, Artificial Sequence
  derived and/or modified sequence
MAPTVFLSMTPLKGIKSVILPQVFLCAYMAAFNSINGNRSYTCKPLERSLLMAGAVASSTFLGVIPQFVQMKYGLTGPWIKRLLPVIFLVQASGMNVYMSRSLESIKGIAVMDKEGNVLGHSRIAGTKAVRETLASRIVLFGTSALIPEVFTYFFKRTQYFRKNPGSLWILKLSCTVL

SEQ ID NO: 266027 - protein, 63 aa, Artificial Sequence
  derived and/or modified sequence
MAPTVFLSMTPLKGIKSVILPQVFLCAYMAAFNSINGNRSYTCKPLERSLLMAGAVASSTFLG

SEQ ID NO: 266028 - DNA, 1014 bp, Artificial Sequence
  derived and/or modified sequence
atgagcctggagcaggaggaggagacccagcccggcagactgctgggcagaagagacgccgtgcccgccttcatcgagcccaacgtgagattctggatcaccgagagacagagcttcatcagaagattcctgcagtggaccgagctgctggaccccaccaacgtgttcatcagcgtggagagcatcgagaacagcagacagctgctgtgcaccaacgaggacgtgagcagccccgccagcgccgaccagagaatccaggaggcctggaagagaagcctggccaccgtgcaccccgacagcagcaacctgatccccaagctgttcagacccgccgccttcctgcccttcatggcccccaccgtgttcctgagcatgacccccctgaagggcatcaagagcgtgatcctgccccaggtgttcctgtgcgcctacatggccgccttcaacagcatcaacggcaacagaagctacacctgcaagcccctggagagaagcctgctgatggccggcgccgtggccagcagcaccttcctgggcgtgatcccccagttcgtgcagatgaagtacggcctgaccggcccctggatcaagagactgctgcccgtgatcttcctggtgcaggccagcggcatgaacgtgtacatgagcagaagcctggagagcatcaagggcatcgccgtgatggacaaggagggcaacgtgctgggccacagcagaatcgccggcaccaaggccgtgagagagaccctggccagcagaatcgtgctgttcggcaccagcgccctgatccccgaggtgttcacctacttcttcaagagaacccagtacttcagaaagaaccccggcagcctgtggatcctgaagctgagctgcaccgtgctggccatgggcctgatggtgcccttcagcttcagcatcttcccccagatcggccagatccagtactgcagcctggaggagaagatccagagccccaccgaggagaccgagatcttctaccacagaggcgtgtag

SEQ ID NO: 266029 - DNA, 1014 bp, Artificial Sequence
  derived and/or modified sequence
atgtcgctggaacaggaggaggaaacacagcctggcagactcctcggccgccgggatgccgtaccagcgttcattgagccaaatgttagattttggatcaccgagcggcagtcctttattaggagatttcttcagtggactgagctgctggaccctaccaacgtgttcatctccgttgagagcatcgagaattctagacagctcctttgtacaaatgaggacgtgagctcacctgcgagcgccgaccagcggattcaggaagcttggaagcggtcccttgccaccgtgcaccccgactcgagcaacctaatacccaaactcttcagacctgccgcgttcttgcccttcatggccccgacggtgttccttagtatgaccccactgaaagggatcaaaagcgtcatcctgcctcaggtatttctgtgcgcttatatggccgctttcaattccattaatggaaatcgctcctatacatgcaagccactcgagcggtcgttgctgatggccggagcggtcgccagtagtactttcctcggggtcattccccagtttgtgcagatgaagtacgggctgaccggaccgtggatcaaaaggcttctgcctgtcattttcctggttcaggcctcagggatgaacgtgtacatgagtcgaagtctagaatctataaagggcattgccgtgatggataaagagggtaacgtactgggccacagcaggattgccggaacaaaggctgtcagagagacattagcttctagaatagtgctgttcggtaccagtgccctgattccagaggtatttacttatttcttcaagaggacccagtatttccgaaagaaccccgggtccctgtggattcttaaactgtcatgtacagttctggccatgggcctaatggttcccttctctttttcaatattcccacagattggccagattcaatattgttccttagaagaaaaaattcagagccctacggaagagaccgagattttctatcaccgcggggtctag

SEQ ID NO: 266030 - DNA, 1014 bp, Artificial Sequence
  derived and/or modified sequence
atgagcctggagcaggaggaggagacccagcccggccgcctgctgggcagaagagatgctgtgcctgccttcatcgagcccaacgtgcgcttctggatcacagagcggcagagcttcatccgccgcttcctgcagtggacagagctgctggaccccaccaacgtgttcatctctgtggagagcattgagaacagccggcagctgctgtgcaccaatgaagatgtgagcagccctgccagcgctgaccagaggatccaggaggcctggaagaggagcctggccaccgtgcacccagacagcagcaacctgatccccaagctgttccggcctgctgccttcctgcccttcatggcccccaccgtcttcctgtccatgacccccctgaagggcatcaagagcgtcatcctgccccaggtgttcctgtgtgcctacatggccgccttcaacagcatcaatggaaacagaagctacacctgcaagcccctggagaggagcctgctgatggccggggctgtggccagcagcaccttcctgggcgtcatcccccagtttgtgcagatgaagtatggcctgaccggcccctggatcaagaggctgctgcctgtgatcttcctggtgcaggccagcggcatgaatgtgtacatgagccgcagcctggagagcatcaagggcattgctgtgatggacaaggagggcaatgtgctgggccacagcagaattgctggcaccaaggctgtgcgggagaccctggccagccgcatcgtgctgtttggcaccagcgccctgatccctgaggtgttcacctacttcttcaagaggacccagtacttcaggaagaaccctggcagcctgtggatcctgaagctgagctgcaccgtgctggccatgggcctgatggtgcccttctccttcagcatcttcccccagatcggccagatccagtactgcagcctggaggagaagatccagagccccacagaggagacagagatcttctaccaccggggcgtgtag

SEQ ID NO: 266031 - DNA, 1014 bp, Artificial Sequence
  derived and/or modified sequence
atgagcctggagcaggaggaggagacccagcccggccggctgctgggaaggcgagatgcagtcccagcgtttatcgagccgaatgtgaggttctggattacggagcggcagtccttcattcggcgctttctccaatggactgagctgctcgacccaaccaatgtcttcattagtgtcgaaagcatagagaatagcaggcagctactgtgcaccaatgaggatgtcagttctccagcttctgcggatcagcgcattcaagaagcctggaaaagatctctggcgacagtgcatccagactcgtcaaatttgatacccaagctgttccgaccagcggcctttctcccttttatggcgccaactgtgtttctgagtatgactcctctgaagggtattaaatcagttattctcccacaagttttcctttgcgcgtacatggctgcctttaacagcatcaacggtaaccggagctacacatgtaagcccctcgagagaagcctactgatggccggcgctgtggcttcaagtacgtttctgggcgtgattccacagttcgtgcaaatgaagtatgggctgacgggaccatggatcaagcgtctgctcccggtgatattcctggtgcaagcttccggtatgaacgtgtacatgtcccggagtctggagagcataaagggaattgccgtgatggacaaagaggggaacgtgctggggcatagccggattgcaggaacaaaggcggtacgggagaccttggcttcacgaatcgtgctctttggtacctcggccttaattcctgaagtgttcacctatttctttaagagaactcagtattttaggaagaatccaggctcactctggattctgaaactcagttgcacagtgttggccatgggattaatggttcctttcagtttcagtattttcccacaaatcggccaaattcagtattgctctcttgaagagaagatccagtccccaacggaggagaccgaaatcttttaccaccgaggtgtctag

SEQ ID NO: 266032 - DNA, 1014 bp, Artificial Sequence
  derived and/or modified sequence
atgagtctggaacaagaggaagaaactcaaccagggaggctgctcgggaggcgggacgctgtgccagcgttcattgagcctaacgtgagattttggattaccgaacgacagtcctttatcaggcgctttttgcagtggactgaactgttggaccccaccaacgtgtttatctccgtcgagtctatcgaaaactccagacagctgctgtgtaccaacgaagatgtcagcagtcctgctagcgcagatcaacgtattcaggaggcctggaaacgctcgcttgcaacagtacatccagattcgtccaacctgatacctaagttatttagacccgctgcctttctcccgttcatggcacctaccgtgtttttgagcatgactcctctgaagggtattaagtctgtcatcctcccccaggtgttcctgtgcgcctacatggccgcttttaactctattaatggaaatcgaagttacacttgcaagccattggaacggagcctgttgatggcgggagccgtagcatcttcaaccttcctcggcgtgatcccccagttcgtgcaaatgaagtatggattgacaggcccttggattaagaggctcctaccagtgattttcctagttcaggcgagcggaatgaatgtttacatgagcagatcactggagtccatcaaaggcatcgctgtgatggacaaagaaggtaatgtgttggggcattcgcggatcgcgggaacaaaagccgtgagggagacgcttgcgtccaggatcgtccttttcgggacctccgctctgattccagaggtttttacttatttcttcaaaagaactcagtattttcgaaagaaccccggtagcctttggatcctgaaactttcctgcaccgtgctagccatgggattgatggttccttttagcttctccattttcccccagatcggtcaaatccagtactgctccctggaagagaagatacagagcccaacagaggagacagaaattttctatcatagaggggtgtag

SEQ ID NO: 266033 - DNA, 1363 bp, Artificial Sequence
  derived and/or modified sequence
gccactctaaccagcgcaaaatgtccctggaacaggaggaggaaacgcaacctgggcggctcctaggacgcagagacgccgtccccgccttcattgagcccaacgtgcgcttctggatcaccgagcgccaatcctttattcgacgatttcttcaatggacagaattattagatcctacaaatgtgttcatttcagttgaaagtatagaaaactcgaggcaactattgtgcacaaatgaagatgtttccagccctgcctcggcggaccaaaggatacaagaagcttggaagcggagtcttgcaacagtgcatcccgacagcagcaacctgatccccaagctttttcgacctgcagcgttcctgcctttcatggcacccacggtatttttgtcaatgacgccactgaaagggatcaagtccgtgattttacctcaggttttcctctgtgcctacatggcagcgttcaacagcatcaatggaaacagaagttacacttgtaagccactagaaagatcattactaatggcgggagccgttgcttcttcaactttcttaggagtaatccctcagtttgtccagatgaagtatggcctgactggcccttggattaaaagactcttacctgtgatcttcctcgtgcaagccagtggaatgaatgtctacatgtcccgaagtcttgaatccattaaggggattgcggtcatggacaaggaaggcaatgtcctgggtcattccagaattgctgggacaaaggctgttagagaaacgctagcatccagaatagtgctgtttgggacctcagctctgattcctgaagtcttcacctacttttttaaaaggacccagtatttcaggaaaaacccagggtcattgtggattttgaaactgtcttgtactgtcctggcaatgggactgatggtgccattttcttttagtatatttccacagattggacagatacagtactgtagtcttgaagagaaaattcagtctccaacagaagaaacagaaatcttttatcacagaggggtgtaggcgtgagttttaggtgaatttatgtggttcctgcttgaaaaccttcccctctccaggttcggtttagagaactttgccacaggtcttctggggaccccagaggtgtctgtgctgacaaggcgacttcagattccatactgagatcgttcccaggctggcgtctctggggtttttaaggctggctggagaagacagtgggagggtgccccgtctgacacccctggggttgctgagggaacggttggagtggggatcggcctgcgaaaggatactgtgaaatcactaattaactaataaacctgtctcaagttgaggatttgaagaaagaa

SEQ ID NO: 266034 - DNA, 1133 bp, Artificial Sequence
  derived and/or modified sequence
gtgcgcttctggatcaccgagcgccaagtacggcccgggcccggcgcgactaggggcagggagggggcgggccgggccgcgtggagtcgggctgacccgggtgaccttggccaggccacgtgggcgccccctgtctccgtttcctcctctcggagttgtgccgggaacgcgcaccaccggccttcaccccttagggcgcggcaggggacgcaggggaaatcgaagctgccagatgcccacgaccacaacgtcaccctccagattgccctctcggaggggcccagtccgcgcaggtggctgctccctactgcctgagctgtggctgagcagcagattggggagaaacaggctctcgcaccttgtcctttattcgacgatttcttcaatggacagaattattagatcctacaaatgtgttcatttcagttgaaagtatagaaaactcgaggcaactattgtgcacaaatgaagatgtttccagccctgcctcggcggaccaaaggatacaagaagcttggaagcggagtcttgcaacagtgcatcccgacagcagcaacctgatccccaagctttttcgacctgcagcgttcctgcctttcatggcacccacggtatttttgtcaatgacgccactgaaagggatcaagtccgtgattttacctcaggttttcctctgtgcctacatggcagcgttcaacagcatcaatggaaacagaagttacacttgtaagccactagaaagatcattactaatggcgggagccgttgcttcttcaactttcttaggagtaatccctcagtttgtccagatgaagtatggcctgactggcccttggattaaaagactcttacctgtgatcttcctcgtgcaagccagtggaatgaatgtctacatgtcccgaagtcttgaatccattaaggggattgcggtcatggacaaggaaggcaatgtcctgggtcattccagaattgctgggacaaaggctgttagagaaacgctagcatccagaatagtgctgtttgggacctcagctctgattcctgaagtcttcacctacttttttaaaaggacccagtatttcaggaaaaacccagggtcattgtggattttgaaactgtcttgtactgtcctg

SEQ ID NO: 266035 - protein, 215 aa, Artificial Sequence
  derived and/or modified sequence
MDNQGVIYSDLNLPPNPKRQQRKPKGNKNSILATEQEITYAELNLQKASQDFQGNDKTYHCKDLPSAPEKLIVGILGIICLILMASVVTIVVIPSRHCGHCPEEWITYSNSCYYIGKERRTWEESLLACTSKNSSLLSIDNEEEMKFLSIISPSSWIGVFRNSSHHPWVTMNGLAFKHEIKDSDNAELNCAVLQVNRLKSAQCGSSIIYHCKHKL

SEQ ID NO: 266036 - DNA, 648 bp, Artificial Sequence
  derived and/or modified sequence
atggataatcagggcgtcatctatagtgacctgaacttgcctccaaacccaaaaaggcagcagcggaagcccaaaggcaataagaactcaattctcgccacggaacaggagatcacatacgctgagttgaatcttcaaaaggcctctcaggattttcaggggaacgataagacttatcactgcaaagatctgccttccgccccagagaagctcatagtaggcatcctggggataatctgtttgatattaatggcctctgtggtgacaatcgtggtcatcccttctagacattgcgggcattgccctgaagaatggatcacttactcaaattcatgttactatattggaaaagaaagaagaacttgggaggaaagcttgttggcttgcaccagtaagaattcctccctcctgagtatcgacaacgaagaggagatgaagtttctctctatcattagcccttcctcttggattggggtgttccggaactcatctcaccacccatgggtcactatgaatggcctggccttcaagcatgaaattaaggattccgataatgctgaattgaattgtgcagtcttgcaggtcaatagactcaagtctgcccagtgcggttcctcgatcatctaccactgcaagcacaaactgtag

SEQ ID NO: 266037 - DNA, 648 bp, Artificial Sequence
  derived and/or modified sequence
atggataaccagggggttatttacagcgacctgaatttgcctcccaacccgaagagacagcaaaggaaaccaaaggggaataaaaactctatcctggccacggagcaggagatcacatacgctgagctaaatctgcaaaaagcaagccaagacttccaggggaacgacaagacatatcactgtaaggatttgccctcagcccctgagaagctgatcgttggcatactcggcataatttgcctcatcctgatggcgagcgtcgtgacaatcgttgtcatacccagcaggcactgtggacactgcccggaggaatggatcacctatagcaacagttgctattacattgggaaggagaggcgaacttgggaggaaagcctgctcgcatgtactagcaagaactcctctcttctcagcatagacaatgaggaagaaatgaagtttctgagcatcatcagccctagtagctggatcggcgtgtttcgcaatagctctcaccacccttgggtgaccatgaacggcttagctttcaagcacgagattaaagatagcgacaacgccgagctgaactgcgccgttctgcaggtaaaccgcctcaaatctgcccagtgcgggagttctataatctaccactgtaagcataaactatag

SEQ ID NO: 266038 - DNA, 1332 bp, Artificial Sequence
  derived and/or modified sequence
gcaggcattgtttgttcttgtcttggatttatgcctttaaatttcaccttttattacacagctatagcaggcctttttatgagactaacctggcctctccactaaaggatgtgtgactttctggggacagaagagtacagtccctgacatcacacactgcagagatggataaccaaggagtaatctactcagacctgaatctgcccccaaacccaaagaggcagcaacgaaaacctaaaggcaataaaaactccattttagcaactgaacaggaaataacctatgcggaattaaaccttcaaaaagcttctcaggattttcaagggaatgacaaaacctatcactgcaaagatttaccatcagctccagagaagctcattgttgggatcctgggaattatctgtcttatcttaatggcctctgtggtaacgatagttgttattccctcacgtcattgtggccattgtcctgaggagtggattacatattccaacagttgttactacattggtaaggaaagaagaacttgggaagagagtttgctggcctgtacttcgaagaactccagtctgctttctatagataatgaagaagaaatgaaatttctgtccatcatttcaccatcctcatggattggtgtgtttcgtaacagcagtcatcatccatgggtgacaatgaatggtttggctttcaaacatgagataaaagactcagataatgctgaacttaactgtgcagtgctacaagtaaatcgacttaaatcagcccagtgtggatcttcaataatatatcattgtaagcataagctttagaggtaaagcgtttgcatttgcagtgcatcagataaattgtatatttcttaaaatagaaatatattatgattgcataaatcttaaaatgaattatgttatttgctctaataagaaaattctaaatcaattattgaaacaggatacacacaattactaaagtacagacatcctagcatttgtgtcgggctcattttgctcaacatggtatttgtggttttcagcctttctaaaagttgcatgttatgtgagtcagcttataggaagtaccaagaacagtcaaacccatggagacagaaagtagaatagtggttgccaatgtctgagggaggttgaaataggagatgacctctaactgatagaacgttactttgtgtcgtgatgaaaactttctaaatttcagtagtggtgatggttgtaactctgcgaatatactaaacatcattgatttttaatcattttaagtgcatgaaatgtatgctttgtacacgacacttcaataaagctatccagaaaaaaaaaa

SEQ ID NO: 266039 - DNA, 1559 bp, Artificial Sequence
  derived and/or modified sequence
gcatgccccagaggtacagatgtatatgtctcccaggaagtctctgtgggtgaaggactgatctcaagttgtggctgacactagttaaagccaagttagagggctgtttcagggtctacattgagactacagttgatatgcctacctcctgagacactagtgtgtgagtctcctcctgggcccctgggcaaatggttttggcagcatgaccaaggcctaaatggggctgaaggcaagcacaggaggatgggtcccttttcaggtctggagatggaatcactgttgctatagcaggcctttttatgagactaacctggcctctccactaaaggatgtgtgactttctggggacagaagagtacagtccctgacatcacacactgcagagatggataaccaaggagtaatctactcagacctgaatctgcccccaaacccaaagaggcagcaacgaaaacctaaaggcaataaaaactccattttagcaactgaacaggaaataacctatgcggaattaaaccttcaaaaagcttctcaggattttcaagggaatgacaaaacctatcactgcaaagatttaccatcagctccagagaagctcattgttgggatcctgggaattatctgtcttatcttaatggcctctgtggtaacgatagttgttattccctcacgtcattgtggccattgtcctgaggagtggattacatattccaacagttgttactacattggtaaggaaagaagaacttgggaagagagtttgctggcctgtacttcgaagaactccagtctgctttctatagataatgaagaagaaatgaaatttctgtccatcatttcaccatcctcatggattggtgtgtttcgtaacagcagtcatcatccatgggtgacaatgaatggtttggctttcaaacatgagataaaagactcagataatgctgaacttaactgtgcagtgctacaagtaaatcgacttaaatcagcccagtgtggatcttcaataatatatcattgtaagcataagctttagaggtaaagcgtttgcatttgcagtgcatcagataaattgtatatttcttaaaatagaaatatattatgattgcataaatcttaaaatgaattatgttatttgctctaataagaaaattctaaatcaattattgaaacaggatacacacaattactaaagtacagacatcctagcatttgtgtcgggctcattttgctcaacatggtatttgtggttttcagcctttctaaaagttgcatgttatgtgagtcagcttataggaagtaccaagaacagtcaaacccatggagacagaaagtagaatagtggttgccaatgtctgagggaggttgaaataggagatgacctctaactgatagaacgttactttgtgtcgtgatgaaaactttctaaatttcagtagtggtgatggttgtaactctgcgaatatactaaacatcattgatttttaatcattttaagtgcatgaaatgtatgctttgtacacgacacttcaataaagctatccagaaaaaaaaaaaaa

SEQ ID NO: 266040 - DNA, 648 bp, Artificial Sequence
  derived and/or modified sequence
atggacaaccagggcgtcatctacagcgacctgaacctgccccccaaccccaagaggcagcagaggaagcccaagggcaacaagaacagcatcctggccacagagcaggagatcacctatgcagagctgaacctgcagaaggccagccaggacttccagggcaatgacaagacctaccactgcaaggacctgcccagcgcccctgagaagctgattgtgggcatcctgggcatcatctgcctgatcctgatggcctctgtggtgaccatcgtggtgatccccagccgccactgcggccactgcccagaggagtggatcacctacagcaacagctgctactacatcggcaaggagaggaggacctgggaggagagcctgctggcctgcaccagcaagaacagcagcctgctgagcattgacaatgaggaggagatgaagttcctgagcatcatcagccccagctcctggattggagtcttcaggaacagcagccaccacccctgggtgaccatgaatggcctggccttcaagcatgagatcaaggacagcgacaatgctgagctgaactgtgctgtgctgcaggtgaaccggctgaagagcgcccagtgtggcagcagcatcatctaccactgcaagcacaagctgtag

SEQ ID NO: 266041 - DNA, 648 bp, Artificial Sequence
  derived and/or modified sequence
atggacaaccagggcgtgatctacagcgacctgaacctgccccccaaccctaagcgccagcagcgtaaacctaaaggcaacaaaaactcgattctggcgacagagcaagagattacctatgcggaactgaatttgcaaaaagccagtcaggatttccagggcaatgacaagacatatcactgcaaggaccttccctctgctccagaaaagcttatcgtgggtattcttggcataatttgtttaattcttatggcttctgtggtgactattgtcgtgattcccagccgccattgtggccattgccctgaagagtggataacctacagcaacagctgctactatatcggcaaggaacggcgtacatgggaggaatcattgctggcctgcacatctaagaatagtagtctgctcagtattgataatgaagaggagatgaagttcctgagcattatcagcccctccagttggatcggcgtctttagaaatagttctcaccacccctgggtcacgatgaacgggctggcttttaaacatgagataaaggactctgacaatgctgaattgaattgcgccgtgcttcaagtgaaccgcctcaagagtgcccagtgcgggtccagcataatctaccattgtaagcataagctgtag

SEQ ID NO: 266042 - DNA, 648 bp, Artificial Sequence
  derived and/or modified sequence
atggacaaccagggcgtgatctacagcgacctgaacctgccccccaatcccaagcggcagcaacggaaacccaaaggcaacaaaaatagtatcctggccactgagcaggagatcacatacgctgaacttaatttgcagaaagcctctcaggattttcagggcaatgataagacatatcattgtaaagatctgccctccgcaccagaaaagctgattgtgggcatccttgggatcatttgcttaattttgatggcgagcgtggtcacaatcgtggtgatccctagtaggcattgcggtcactgccccgaggagtggatcacctatagtaattcatgttattacatcgggaaagagaggcgcacttgggaagagagcctgcttgcctgcaccagcaaaaacagcagcctgctatccattgacaatgaggaagaaatgaagtttttatccataatctctccttcgtcatggataggagtgttccgcaactcttcacatcacccttgggtaactatgaacggtttggcctttaagcacgaaattaaggactccgataatgctgaactgaactgcgccgttctgcaggtcaaccgtttgaagtcagcgcagtgtgggtcaagcatcatctatcactgcaaacataaactatag

SEQ ID NO: 266043 - DNA, 648 bp, Artificial Sequence
  derived and/or modified sequence
atggacaaccagggtgtgatctatagcgacctgaacctgcctcccaatcccaaaagacagcagcgcaaaccaaaagggaataagaattccatcttagccactgaacaggaaatcacctacgcggaactcaatctccagaaagcctcacaggatttccaggggaacgacaagacctaccactgtaaagacctgccttcagccccagagaagctcatcgtgggaatactgggaattatctgcttaatcttgatggcctctgtggtaacaatagtagtcattccgtccagacattgtgggcattgccccgaagaatggatcacctacagcaacagctgttattatattgggaaagaacgcagaacctgggaggaatccctgcttgcgtgtacctccaagaattcatctttattaagcattgataacgaagaagaaatgaaattcctttccattattagccctagttcatggatcggagtgttcaggaactcttcccaccacccgtgggtgactatgaatggcctggcatttaagcacgagatcaaggattcagacaacgccgagttaaattgtgctgtgctccaagtgaatagactaaagagtgcacagtgtggcagctcaatcatttaccactgtaagcataagctgtag

SEQ ID NO: 266044 - DNA, 648 bp, Artificial Sequence
  derived and/or modified sequence
atggataaccagggagtgatttattcagatctgaacctgcctcctaatccaaagcggcaacagagaaaacccaaaggcaacaagaacagtattcttgcaactgagcaagagataacgtacgcggaactgaaccttcaaaaagccagtcaggatttccagggcaatgataagacttaccattgtaaggatctcccatcggccccagagaagctcatagtgggaattctgggaattatctgtctgatcctgatggcgtccgttgtcacaatcgtggttataccctcaagacactgcggtcactgccccgaagaatggattacctattccaacagttgttactatatcggtaaggagcggagaacgtgggaggaatccctcctcgcctgtacctccaagaactctagtctgctttcaattgacaatgaggaagagatgaagttcctgtccatcatcagcccaagcagctggattggcgtcttccggaacagctcccaccatccttgggttaccatgaatggactggcctttaaacacgagatcaaggacagtgacaatgctgaactaaactgtgccgttctccaggtcaataggctgaagtccgcccagtgtggaagtagtatcatttatcattgtaaacacaaactgtag

SEQ ID NO: 266045 - DNA, 648 bp, Artificial Sequence
  derived and/or modified sequence
atggacaaccagggcgtgatctacagcgacctgaacctgccccccaaccccaagagacagcagagaaagcccaagggcaacaagaacagcatcctggccaccgagcaggagatcacctacgccgagctgaacctgcagaaggccagccaggacttccagggcaacgacaagacctaccactgcaaggacctgcccagcgcccccgagaagctgatcgtgggcatcctgggcatcatctgcctgatcctgatggccagcgtggtgaccatcgtggtgatccccagcagacactgcggccactgccccgaggagtggatcacctacagcaacagctgctactacatcggcaaggagagaagaacctgggaggagagcctgctggcctgcaccagcaagaacagcagcctgctgagcatcgacaacgaggaggagatgaagttcctgagcatcatcagccccagcagctggatcggcgtgttcagaaacagcagccaccacccctgggtgaccatgaacggcctggccttcaagcacgagatcaaggacagcgacaacgccgagctgaactgcgccgtgctgcaggtgaacagactgaagagcgcccagtgcggcagcagcatcatctaccactgcaagcacaagctgtag

SEQ ID NO: 266046 - protein, 233 aa, Artificial Sequence
  derived and/or modified sequence
MDNQGVIYSDLNLPPNPKRQQRKPKGNKNSILATEQEITYAELNLQKASQDFQGNDKTYHCKDLPSAPEKLIVGILGIICLILMASVVTIVVIPSTLIQRHNNSSLNTRTQKARHCGHCPEEWITYSNSCYYIGKERRTWEESLLACTSKNSSLLSIDNEEEMKFLSIISPSSWIGVFRNSSHHPWVTMNGLAFKHEIKDSDNAELNCAVLQVNRLKSAQCGSSIIYHCKHKL

SEQ ID NO: 266047 - DNA, 702 bp, Artificial Sequence
  derived and/or modified sequence
atggataaccagggtgtcatttattctgacctgaacctgcctccaaatcccaagcgacagcagaggaagcccaaaggcaacaagaattccattttggccacagagcaagaaatcacatatgcagaacttaacttacaaaaggctagccaggactttcaggggaatgataaaacataccattgtaaggatttgccaagcgcccctgagaagcttattgtcggcattcttggcattatttgtctgatactgatggcgagtgttgtgacgattgtggtcattccatcaacattaattcagcgccataacaacagctcacttaacaccagaacacaaaaggcacggcattgtgggcactgccctgaggaatggattacctactcaaacagttgctactatatcggaaaagaaaggcgcacatgggaggaatcactcctggcatgcacgtccaaaaattcgtccttactcagcatcgacaacgaggaggagatgaagtttctgtccatcatctccccctcatcgtggatcggtgttttccgcaattccagccatcacccctgggtaacaatgaacggacttgctttcaagcacgagataaaggactcggataatgccgaattaaattgcgccgtcttgcaggtcaatagactgaagtctgcccaatgtggaagttccatcatctatcactgtaagcataaactctag

SEQ ID NO: 266048 - DNA, 702 bp, Artificial Sequence
  derived and/or modified sequence
atggacaatcagggtgtgatttactccgacctgaacctgccccctaatcctaagcgccaacagaggaaacccaaaggtaacaagaatagtattttggcgacagagcaagaaataacatacgctgagttgaatttacagaaagccagccaagatttccaggggaacgacaaaacttaccattgcaaagacttgccttccgcccctgagaagctaatagtgggtatactggggattatctgtttgatcttaatggcaagcgttgtgaccatcgtagttatccccagtactctaatccagagacacaacaatagttcccttaacacaagaacgcagaaagccaggcattgtggccattgccccgaagaatggatcacttatagtaattcatgctattacatcggcaaagaacggcgaacatgggaagaatctctgctggcctgtacttccaaaaattcgagtctgctctcaatagataacgaggaggaaatgaaatttctttccataataagcccctcatcctggatcggagtgtttcgaaacagcagtcatcacccatgggtcactatgaacggcctggcttttaagcacgagataaaggacagcgacaatgccgagctaaattgcgcagttttacaagtaaatcgactgaaatcagcacagtgtgggagctccatcatttaccactgtaaacataaactgtag

SEQ ID NO: 266049 - DNA, 1407 bp, Artificial Sequence
  derived and/or modified sequence
gggcagtctgcgaagattgcaggcattgtttgttcttgtcttggatttatgcctttaaatttcaccttttattacacagctatagcaggcctttttatgagactaacctggcctctccactaaaggatgtgtgactttctggggacagaagagtacagtccctgacatcacacactgcagagatggataaccaaggagtaatctactcagacctgaatctgcccccaaacccaaagaggcagcaacgaaaacctaaaggcaataaaaactccattttagcaactgaacaggaaataacctatgcggaattaaaccttcaaaaagcttctcaggattttcaagggaatgacaaaacctatcactgcaaagatttaccatcagctccagagaagctcattgttgggatcctgggaattatctgtcttatcttaatggcctctgtggtaacgatagttgttattccctctacattaatacagaggcacaacaattcttccctgaatacaagaactcagaaagcacgtcattgtggccattgtcctgaggagtggattacatattccaacagttgttactacattggtaaggaaagaagaacttgggaagagagtttgctggcctgtacttcgaagaactccagtctgctttctatagataatgaagaagaaatgaaatttctgtccatcatttcaccatcctcatggattggtgtgtttcgtaacagcagtcatcatccatgggtgacaatgaatggtttggctttcaaacatgagataaaagactcagataatgctgaacttaactgtgcagtgctacaagtaaatcgacttaaatcagcccagtgtggatcttcaataatatatcattgtaagcataagctttagaggtaaagcgtttgcatttgcagtgcatcagataaattgtatatttcttaaaatagaaatatattatgattgcataaatcttaaaatgaattatgttatttgctctaataagaaaattctaaatcaattattgaaacaggatacacacaattactaaagtacagacatcctagcatttgtgtcgggctcattttgctcaacatggtatttgtggttttcagcctttctaaaagttgcatgttatgtgagtcagcttataggaagtaccaagaacagtcaaacccatggagacagaaagtagaatagtggttgccaatgtctgagggaggttgaaataggagatgacctctaactgatagaacgttactttgtgtcgtgatgaaaactttctaaatttcagtagtggtgatggttgtaactctgcgaatatactaaacatcattgatttttaatcattttaagtgcatgaaatgtatgctttgtacacgacacttcaataaagctatccagaaaaaaaaaaaaa

SEQ ID NO: 266050 - DNA, 1598 bp, Artificial Sequence
  derived and/or modified sequence
gcatgccccagaggtacagatgtatatgtctcccaggaagtctctgtgggtgaaggactgatctcaagttgtggctgacactagttaaagccaagttagagggctgtttcagggtctacattgagactacagttgatatgcctacctcctgagacactagtgtgtgagtctcctcctgggcccctgggcaaatggttttggcagcatgaccaaggcctaaatggggctgaaggcaagcacaggaggatgggtcccttttcaggtctggagatggaatcactgttgctatagcaggcctttttatgagactaacctggcctctccactaaaggatgtgtgactttctggggacagaagagtacagtccctgacatcacacactgcagagatggataaccaaggagtaatctactcagacctgaatctgcccccaaacccaaagaggcagcaacgaaaacctaaaggcaataaaaactccattttagcaactgaacaggaaataacctatgcggaattaaaccttcaaaaagcttctcaggattttcaagggaatgacaaaacctatcactgcaaagatttaccatcagctccagagaagctcattgttgggatcctgggaattatctgtcttatcttaatggcctctgtggtaacgatagttgttattccctctacattaatacagaggcacaacaattcttccctgaatacaagaactcagaaagcacgtcattgtggccattgtcctgaggagtggattacatattccaacagttgttactacattggtaaggaaagaagaacttgggaagagagtttgctggcctgtacttcgaagaactccagtctgctttctatagataatgaagaagaaatgaaatttctgtccatcatttcaccatcctcatggattggtgtgtttcgtaacagcagtcatcatccatgggtgacaatgaatggtttggctttcaaacatgagataaaagactcagataatgctgaacttaactgtgcagtgctacaagtaaatcgacttaaatcagcccagtgtggatcttcaataatatatcattgtaagcataagctttagaggtaaagcgtttgcatttgcagtgcatcagataaattgtatatttcttaaaatagaaatatattatgattgcataaatcttaaaatgaattatgttatttgctctaataagaaaattctaaatcaattattgaaacaggatacacacaattactaaagtacagacatcctagcatttgtgtcgggctcattttgctcaacatggtatttgtggttttcagcctttctaaaagttgcatgttatgtgagtcagcttataggaagtaccaagaacagtcaaacccatggagacagaaagtagaatagtggttgccaatgtctgagggaggttgaaataggagatgacctctaactgatagaacgttactttgtgtcgtgatgaaaactttctaaatttcagtagtggtgatggttgtaactctgcgaatatactaaacatcattgatttttaatcattttaagtgcatgaaatgtatgctttgtacacgacacttcaataaagctatcc

SEQ ID NO: 266051 - DNA, 702 bp, Artificial Sequence
  derived and/or modified sequence
atggacaaccagggcgtcatctacagcgacctgaacctgccccccaaccccaagaggcagcagaggaagcccaagggcaacaagaacagcatcctggccacagagcaggagatcacctatgcagagctgaacctgcagaaggccagccaggacttccagggcaatgacaagacctaccactgcaaggacctgcccagcgcccctgagaagctgattgtgggcatcctgggcatcatctgcctgatcctgatggcctctgtggtgaccatcgtggtgatccccagcaccctcatccagaggcacaacaacagcagcctgaacaccaggacccagaaggcccggcactgcggccactgcccagaggagtggatcacctacagcaacagctgctactacatcggcaaggagaggaggacctgggaggagagcctgctggcctgcaccagcaagaacagcagcctgctgagcattgacaatgaggaggagatgaagttcctgagcatcatcagccccagctcctggattggagtcttcaggaacagcagccaccacccctgggtgaccatgaatggcctggccttcaagcatgagatcaaggacagcgacaatgctgagctgaactgtgctgtgctgcaggtgaaccggctgaagagcgcccagtgtggcagcagcatcatctaccactgcaagcacaagctgtag

SEQ ID NO: 266052 - DNA, 702 bp, Artificial Sequence
  derived and/or modified sequence
atggacaaccagggcgtgatctacagcgacctgaacctgccccccaatccaaagcgccagcagaggaagccaaaagggaataagaattccatcctggcgaccgaacaggaaataacctatgcggagctgaacctccagaaagcatcccaggattttcaagggaatgacaaaacctaccactgcaaggatcttccgagtgccccggaaaaactaatagtaggtatcctgggaattatctgtttaatccttatggcttcagtcgtgaccattgtggttatcccttcaactctgattcagcgccataataacagcagcctgaacacgaggacacagaaggcaaggcactgtgggcattgtcccgaggaatggattacttactcaaacagctgctattacatagggaaggagcggcgcacatgggaagagtctttactcgcttgcacaagcaagaattcatccttattgtccatagataatgaagaggagatgaaattcttgagtatcattagccccagctcctggattggggtttttaggaattccagccatcatccctgggttaccatgaacggcctcgcctttaagcatgagattaaagattccgataatgcggagcttaactgtgctgtactgcaggtgaacagattgaaaagcgcccagtgtgggagctcgatcatctaccactgtaagcacaagttgtag

SEQ ID NO: 266053 - DNA, 702 bp, Artificial Sequence
  derived and/or modified sequence
atggacaaccagggcgtgatctacagcgacctgaacctgccccccaatcccaaacgtcagcaacgcaagccgaagggcaataagaactccatcctggctacggagcaagagatcacgtatgctgagctgaacctgcaaaaagcgagccaagactttcagggtaacgacaaaacatatcactgcaaagacctcccgagtgcacctgagaaactgatcgtcggaatcctgggtataatatgtctgattctcatggcctccgttgtgaccatcgtcgttatcccttcaactctcatccaaaggcataataactctagtttaaatactcgcacacagaaagctcggcactgcgggcactgccctgaagagtggatcacctactctaattcatgctactacatcgggaaagaacggcgcacttgggaggagtcactcctggcctgtacatctaaaaattcaagtcttttatcgatcgacaacgaagaggagatgaaatttttgagtattataagcccatcatcatggataggtgtctttaggaactcaagccaccacccttgggttacaatgaatggcctggccttcaaacatgagattaaagacagtgacaatgcggaactcaactgtgcggtgctgcaagtgaataggctcaagagcgctcagtgcggaagtagcattatctatcactgcaaacacaaactatag

SEQ ID NO: 266054 - DNA, 702 bp, Artificial Sequence
  derived and/or modified sequence
atggataaccagggcgtgatctattcggacttgaacctccctccgaaccctaaaaggcaacagcggaaacccaagggaaataagaacagcattttggcaacagaacaggagatcacatatgctgagctcaaccttcaaaaggcgtcccaagactttcagggtaatgacaagacttatcattgcaaagatctgccaagtgccccagagaagttaatcgtgggcattttaggaatcatctgtttgattcttatggcaagtgtggtgaccatcgtagttatcccaagcacactaatccaacggcacaacaacagttccctgaatactcggacacagaaagccagacattgtggacattgtccagaggaatggatcacctattcaaattcctgttactatataggtaaggagaggcggacatgggaagagtcactgctcgcttgtacgtcaaagaattcctcactcctgagcatcgataacgaggaagaaatgaagttcctgtccatcatctctcccagctcctggatcggagtgttccggaatagctcccatcatccctgggtgactatgaacgggctggcatttaagcatgagatcaaggactctgacaatgccgagctcaattgtgcagtgctacaggtgaatcggctcaagagcgcgcagtgcggctccagcattatctatcattgcaaacacaaactttag

SEQ ID NO: 266055 - DNA, 702 bp, Artificial Sequence
  derived and/or modified sequence
atggacaaccagggcgtgatttactccgacctgaatctcccgccaaatcctaagaggcagcagagaaaacctaaagggaataagaatagcatcctggctaccgaacaggagatcacctatgcggagctaaacctgcagaaggcctcccaagattttcagggcaacgacaagacgtatcattgcaaggaccttccctcagcgcctgaaaagctgatagtaggaatcctgggaattatctgcctaatactcatggcatctgtggtgacgattgtggtcatcccatccacattaatccaaaggcataacaacagctccctcaacacccggactcagaaggctagacactgtgggcactgtccggaagaatggataacgtattcaaattcctgttactacattggcaaagaaagaaggacttgggaagagtctctgctggcctgcacaagcaagaactcaagccttctgtcaatcgataatgaggaggagatgaagtttcttagcatcatctcccccagttcttggatcggggtgttcaggaattcatctcatcacccatgggtaacaatgaatggcctggcattcaagcacgagattaaggactccgataacgcggagcttaattgtgccgtgctgcaggtgaaccgactgaagtccgcccagtgtggatcctctatcatttatcattgtaaacataagctgtag

SEQ ID NO: 266056 - DNA, 702 bp, Artificial Sequence
  derived and/or modified sequence
atggacaaccagggcgtgatctacagcgacctgaacctgccccccaaccccaagagacagcagagaaagcccaagggcaacaagaacagcatcctggccaccgagcaggagatcacctacgccgagctgaacctgcagaaggccagccaggacttccagggcaacgacaagacctaccactgcaaggacctgcccagcgcccccgagaagctgatcgtgggcatcctgggcatcatctgcctgatcctgatggccagcgtggtgaccatcgtggtgatccccagcaccctgatccagagacacaacaacagcagcctgaacaccagaacccagaaggccagacactgcggccactgccccgaggagtggatcacctacagcaacagctgctactacatcggcaaggagagaagaacctgggaggagagcctgctggcctgcaccagcaagaacagcagcctgctgagcatcgacaacgaggaggagatgaagttcctgagcatcatcagccccagcagctggatcggcgtgttcagaaacagcagccaccacccctgggtgaccatgaacggcctggccttcaagcacgagatcaaggacagcgacaacgccgagctgaactgcgccgtgctgcaggtgaacagactgaagagcgcccagtgcggcagcagcatcatctaccactgcaagcacaagctgtag

SEQ ID NO: 266057 - protein, 722 aa, Artificial Sequence
  derived and/or modified sequence
MAQWNQLQQLDTRYLEQLHQLYSDSFPMELRQFLAPWIESQDWAYAASKESHATLVFHNLLGEIDQQYSRFLQESNVLYQHNLRRIKQFLQSRYLEKPMEIARIVARCLWEESRLLQTAATAAQQGGQANHPTAAVVTEKQQMLEQHLQDVRKRVQDLEQKMKVVENLQDDFDFNYKTLKSQGDMQDLNGNNQSVTRQKMQQLEQMLTALDQMRRSIVSELAGLLSAMEYVQKTLTDEELADWKRRQQIACIGGPPNICLDRLENWITSLAESQLQTRQQIKKLEELQQKVSYKGDPIVQHRPMLEERIVELFRNLMKSAFVVERQPCMPMHPDRPLVIKTGVQFTTKVRLLVKFPELNYQLKIKVCIDKDSGDVAALRGSRKFNILGTNTKVMNMEESNNGSLSAEFKHLTLREQRCGNGGRANCDASLIVTEELHLITFETEVYHQGLKIDLETHSLPVVVISNICQMPNAWASILWYNMLTNNPKNVNFFTKPPIGTWDQVAEVLSWQFSSTTKRGLSIEQLTTLAEKLLGPGVNYSGCQITWAKFCKENMAGKGFSFWVWLDNIIDLVKKYILALWNEGYIMGFISKERERAILSTKPPGTFLLRFSESSKEGGVTFTWVEKDISGKTQIQSVEPYTKQQLNNMSFAEIIMGYKIMDATNILVSPLVYLYPDIPKEEAFGKYCRPESQEHPEADPGSAAPYLKTKFICVTPFIDAVWK

SEQ ID NO: 266058 - DNA, 2169 bp, Artificial Sequence
  derived and/or modified sequence
atggcccagtggaaccagctgcagcagctggacaccagatacctggagcagctgcaccagctgtacagcgacagcttccccatggagctgagacagttcctggccccctggatcgagagccaggactgggcctacgccgccagcaaggagagccacgccaccctggtgttccacaacctgctgggcgagatcgaccagcagtacagcagattcctgcaggagagcaacgtgctgtaccagcacaacctgagaagaatcaagcagttcctgcagagcagatacctggagaagcccatggagatcgccagaatcgtggccagatgcctgtgggaggagagcagactgctgcagaccgccgccaccgccgcccagcagggcggccaggccaaccaccccaccgccgccgtggtgaccgagaagcagcagatgctggagcagcacctgcaggacgtgagaaagagagtgcaggacctggagcagaagatgaaggtggtggagaacctgcaggacgacttcgacttcaactacaagaccctgaagagccagggcgacatgcaggacctgaacggcaacaaccagagcgtgaccagacagaagatgcagcagctggagcagatgctgaccgccctggaccagatgagaagaagcatcgtgagcgagctggccggcctgctgagcgccatggagtacgtgcagaagaccctgaccgacgaggagctggccgactggaagagaagacagcagatcgcctgcatcggcggcccccccaacatctgcctggacagactggagaactggatcaccagcctggccgagagccagctgcagaccagacagcagatcaagaagctggaggagctgcagcagaaggtgagctacaagggcgaccccatcgtgcagcacagacccatgctggaggagagaatcgtggagctgttcagaaacctgatgaagagcgccttcgtggtggagagacagccctgcatgcccatgcaccccgacagacccctggtgatcaagaccggcgtgcagttcaccaccaaggtgagactgctggtgaagttccccgagctgaactaccagctgaagatcaaggtgtgcatcgacaaggacagcggcgacgtggccgccctgagaggcagcagaaagttcaacatcctgggcaccaacaccaaggtgatgaacatggaggagagcaacaacggcagcctgagcgccgagttcaagcacctgaccctgagagagcagagatgcggcaacggcggcagagccaactgcgacgccagcctgatcgtgaccgaggagctgcacctgatcaccttcgagaccgaggtgtaccaccagggcctgaagatcgacctggagacccacagcctgcccgtggtggtgatcagcaacatctgccagatgcccaacgcctgggccagcatcctgtggtacaacatgctgaccaacaaccccaagaacgtgaacttcttcaccaagccccccatcggcacctgggaccaggtggccgaggtgctgagctggcagttcagcagcaccaccaagagaggcctgagcatcgagcagctgaccaccctggccgagaagctgctgggccccggcgtgaactacagcggctgccagatcacctgggccaagttctgcaaggagaacatggccggcaagggcttcagcttctgggtgtggctggacaacatcatcgacctggtgaagaagtacatcctggccctgtggaacgagggctacatcatgggcttcatcagcaaggagagagagagagccatcctgagcaccaagccccccggcaccttcctgctgagattcagcgagagcagcaaggagggcggcgtgaccttcacctgggtggagaaggacatcagcggcaagacccagatccagagcgtggagccctacaccaagcagcagctgaacaacatgagcttcgccgagatcatcatgggctacaagatcatggacgccaccaacatcctggtgagccccctggtgtacctgtaccccgacatccccaaggaggaggccttcggcaagtactgcagacccgagagccaggagcaccccgaggccgaccccggcagcgccgccccctacctgaagaccaagttcatctgcgtgacccccttcatcgacgccgtgtggaagtag

SEQ ID NO: 266059 - DNA, 2169 bp, Artificial Sequence
  derived and/or modified sequence
atggcccagtggaaccagttacaacagctggatactcgctatctcgagcagctgcatcagctatactccgactcctttccaatggagctccgtcagtttttagctccgtggatagaatcccaagactgggcatatgcagcctcaaaggaatcgcacgccacactggtgtttcacaatctcctgggcgaaattgatcagcagtatagccgcttcctacaggagtccaatgtcctgtaccagcataaccttcgcaggattaagcaatttctccagtcccgttacctagagaagccgatggagattgcccgaatagtggcacgctgtctgtgggaggagagtaggctactccagaccgctgctacagcagcacaacagggcggacaggccaaccacccaacagcggccgtggtgacagagaagcagcaaatgcttgagcaacacctacaggacgtcagaaaaagggttcaggacctggagcaaaagatgaaagtggtcgagaatctgcaagacgatttcgatttcaattacaagaccctgaagtctcagggggacatgcaagaccttaacggaaataatcaaagcgtgacaagacagaaaatgcagcagcttgaacagatgttgacagccctggatcagatgcggcggagcatcgtatccgagttggccggcctactttctgctatggagtatgtccagaaaacgttaacagacgaggagcttgcagactggaaaaggcggcaacaaattgcttgtattggcggaccacccaatatttgcctcgaccgcctggagaactggattactagcctagcagagtcgcaactgcaaactaggcagcagatcaaaaagctggaagagcttcaacaaaaggtctcatataagggggacccaatagtacagcatcgtcctatgctggaggagaggattgttgagttatttcgtaatttgatgaagagcgcgttcgttgtcgagcgccaaccctgcatgccaatgcaccccgaccgaccgctggtgataaaaaccggggtgcagtttacaacaaaggttcgactgctggtgaagttccccgagcttaactaccagctaaaaataaaggtttgcattgacaaggatagcggagacgtggcggcattaagagggtcacgcaaattcaacattctcggcacaaatacgaaagtaatgaatatggaagagtcaaacaacggctccctaagtgctgagttcaaacatctcaccctgagagagcagagatgtggtaacggggggagagcgaattgcgacgcaagtctgattgtgacagaagaattacatctaatcacatttgaaacggaagtgtatcaccagggactcaagattgatcttgagactcacagcctccccgtcgtcgtgatttccaatatttgccagatgccaaatgcttgggcgagtatcttatggtataatatgctaactaacaaccccaagaatgttaacttcttcaccaaacctcctattgggacctgggaccaggtcgctgaagtgctctcttggcagtttagctcaaccacgaagagaggactttctattgaacagcttacgaccttggctgaaaaacttttaggtcccggggtaaattactccggatgtcagatcacctgggccaaattttgtaaagagaacatggccggaaaggggttctcattttgggtctggctcgataatattatcgatctcgtaaaaaagtatattctggctctatggaacgaaggctatatcatgggctttattagcaaggagagggagcgagctattctgagcacaaagcctcctggaacatttctcctccgctttagtgagtccagtaaggaaggcggcgttactttcacctgggtcgagaaagatatctcgggtaagactcagatccagagcgttgagccttacaccaagcagcagctaaacaatatgtcgttcgctgaaattatcatgggctacaagattatggacgccacaaacattttagtatcccccctggtgtacctgtacccagacatacctaaggaggaagccttcggtaagtattgtcgcccagagagtcaagagcaccctgaggcagaccccggcagtgcagctccgtacctgaagaccaagtttatttgtgtcacccctttcattgatgccgtgtggaaatag

SEQ ID NO: 266060 - DNA, 2169 bp, Artificial Sequence
  derived and/or modified sequence
atggcccagtggaaccagctgcagcagctggacacccgctacctggagcagctgcaccagctgtacagcgacagcttccccatggagctgcggcagttcctggccccctggattgagagccaggactgggcctatgctgccagcaaggagagccacgccaccctggtgttccacaacctgctgggggagattgaccagcagtacagccgcttcctgcaggagagcaatgtgctgtaccagcacaacctgcggcgcatcaagcagttcctgcagagccgctacctggagaagcccatggagatcgcccgcatcgtggcccgctgcctgtgggaggagagccggctgctgcagacagctgccacagctgcccagcagggcggccaggccaaccaccccacagctgctgtggtgacagagaagcagcagatgctggagcagcacctgcaggatgtgaggaagagggtgcaggacctggagcagaagatgaaggtggtggagaacctgcaggatgactttgacttcaactacaagaccctgaagagccagggcgacatgcaggacctgaatggaaacaaccagagcgtgacccggcagaagatgcagcagctggagcagatgctgacagccctggaccagatgaggaggagcatcgtgtctgagctggccggcctgctgagcgccatggagtatgtgcagaagaccctgacagatgaggagctggccgactggaagaggcggcagcagatcgcctgcatcggcggcccccccaacatctgcctggaccggctggagaactggatcaccagcctggccgagagccagctgcagacccggcagcagatcaagaagctggaggagctgcagcagaaggtgtcctacaagggggaccccatcgtgcagcaccggcccatgctggaggagagaattgtggagctgttcaggaacctgatgaagagcgcctttgtggtggagcggcagccctgcatgcccatgcacccagaccggcccctggtgatcaagacaggagtgcagttcaccaccaaggtgcggctgctggtgaagtttcctgagctgaactaccagctgaagatcaaggtgtgcatcgacaaggacagcggagatgtggccgccctgcggggcagcaggaagttcaacatcctgggcaccaacaccaaggtgatgaacatggaggagagcaacaacggcagcctgtctgctgagttcaagcacctgaccctgcgggagcagagatgtggaaatggaggccgggccaactgtgatgccagcctgattgtgacagaggagctgcacctgatcacctttgaaacagaggtgtaccaccagggcctgaagattgacctggagacccacagcctgcctgtggtggtgatcagcaacatctgccagatgcccaatgcctgggccagcatcctgtggtacaacatgctgaccaacaaccccaagaatgtgaacttcttcaccaagccacccatcggcacctgggaccaggtggccgaggtgctgtcctggcagttcagcagcaccaccaagaggggcctgagcattgagcagctgaccaccctggccgagaagctgctgggccctggggtgaactacagcggctgccagatcacctgggccaagttctgcaaggagaacatggccggcaagggcttctccttctgggtgtggctggacaacatcatcgacctggtgaagaagtacatcctggccctgtggaatgaaggctacatcatgggcttcatcagcaaggagcgggagcgggccatcctgagcaccaagcccccaggcaccttcctgctgcgcttcagcgagagcagcaaggagggcggcgtgaccttcacctgggtggagaaggacatcagcggcaagacccagatccagagcgtggagccctacaccaagcagcagctgaacaacatgagctttgctgagatcatcatgggctacaagatcatggatgccaccaacatcctggtgagccccctggtgtacctgtacccagacatccccaaggaggaggccttcggcaagtactgcaggcctgagagccaggagcaccctgaggccgaccccggcagcgctgccccctacctgaagaccaagttcatctgtgtgacccccttcattgatgctgtgtggaagtag

SEQ ID NO: 266061 - DNA, 2169 bp, Artificial Sequence
  derived and/or modified sequence
atggcccagtggaaccagctgcagcagctggacacccggtacctggagcagctgcaccagttgtactccgattcttttcctatggagctgagacaattcctcgccccttggatcgagtctcaagattgggcttacgccgcttccaaggaaagccacgccacactcgtgttccacaatttgctcggagaaatagaccaacagtattccagatttctccaggagtcaaatgtattatatcaacacaacctgcgccgaattaaacagttcttacaaagtcgatatctagagaaacccatggaaattgcacggatcgtcgcgagatgtctctgggaggaatctcgcctcctccagacagccgccacagctgctcagcagggtggtcaggctaaccaccctactgctgcagtggtaaccgagaaacagcaaatgttggagcagcaccttcaggacgtgagaaagagagtgcaggacctggaacaaaagatgaaggttgtggaaaatttacaggacgacttcgactttaattacaagaccctcaagagccagggagacatgcaagatctaaatgggaataatcagtctgtgaccagacagaagatgcagcaacttgagcagatgctaacagccctggatcagatgcgcagatccattgtctctgagttagctggcttgctttcagctatggaatacgtgcagaagacactgaccgacgaagaattggcggactggaaacggagacagcagatagcctgcattgggggccccccaaacatctgtctagatagactagagaactggatcacatcactggccgaatcacagctccagacaagacagcagatcaaaaaacttgaggagttacaacagaaggtttcctacaaaggagatcccatcgttcagcataggcccatgctcgaggaacggatcgttgaacttttccgtaacctcatgaagagcgctttcgtagtagaacggcagccttgcatgcctatgcatcctgatcgacctttggttatcaaaaccggcgtgcagttcacaacaaaggtacgactgttggttaaatttccagagctcaattatcagctcaaaataaaagtgtgcatcgataaagacagtggcgatgtggccgctttaaggggcagtcgcaagttcaatatcctcggaactaacaccaaagtcatgaacatggaggaatctaataatggttctctaagtgctgagttcaaacacctcacactgcgcgagcagcgctgtggaaacggcggcagagcaaactgcgatgcatccctgatcgtgacagaagagctgcatctgattaccttcgagaccgaggtttaccatcagggcctcaagatcgacctggagacccatagcctgcccgttgtcgtcatcagcaacatttgtcagatgccaaatgcttgggcgtccattctctggtataatatgctcaccaataatcccaaaaacgtgaacttctttaccaagccccccatcggcacttgggaccaggtagctgaggtgttgagttggcagtttagtagtaccaccaaacggggcctgtctatcgagcagcttacaacgttagccgagaaactgctaggccccggggtaaattacagtggttgtcagatcacctgggcgaaattctgcaaggaaaacatggcaggcaagggctttagtttttgggtctggctggataatatcatcgatctcgtgaaaaaatacatcttagctctttggaacgagggatacataatgggctttatctccaaagaaagggagagggctattctgtcaactaagcctccaggtacttttctgcttcgattctcagagtcctccaaggagggcggggtcacttttacctgggtcgagaaagatatctccgggaagacgcagatccagtccgtggaaccttatacaaaacagcagctcaataacatgagctttgccgaaatcatcatggggtataagatcatggatgctacaaatatccttgtgtctccactggtgtatctgtaccccgatatacccaaggaagaggctttcggcaagtattgtagaccagaatcacaggaacaccccgaagctgatccaggaagtgcagcaccctatctgaagaccaaattcatctgcgttacaccctttatcgacgccgtgtggaagtag

SEQ ID NO: 266062 - DNA, 2169 bp, Artificial Sequence
  derived and/or modified sequence
atggctcagtggaaccaactgcagcagcttgacacccggtatctggaacagctccatcaactgtacagtgactctttccccatggagctgaggcagttcttggccccttggatcgagtcacaagactgggcctacgctgcttccaaggaatctcacgcaacacttgtgtttcacaaccttttgggcgagatcgatcagcagtatagccgtttcctgcaagaatccaacgtgctttaccagcataacctacggaggatcaaacagttcttgcaatcaaggtatctggaaaaaccaatggagatcgcgcgaatcgttgccagatgtctatgggaggagtctcggctgttacaaacggctgccacagccgcacagcaaggcggacaggccaatcaccctacagccgctgtggtgacagaaaaacagcaaatgttagagcagcacctgcaggatgttcggaagcgagtgcaggatctcgaacagaagatgaaggtggtagaaaacctccaggacgactttgacttcaattacaagaccttgaagtcccagggcgatatgcaggatcttaatggcaacaaccagagcgtaacccgacagaaaatgcaacagctggaacagatgctcaccgcgctggaccagatgcggagatccatcgttagcgagctggctggtctgctttccgccatggagtacgttcagaagactcttacggacgaagaacttgcagattggaaacgcaggcagcagattgcgtgcattggcggtcctcccaatatctgcttggatcgacttgaaaactggatcacctctttagccgaaagtcaattgcagacgcgacagcaaatcaagaaactggaggaactgcaacagaaagtgagctataaaggcgacccgattgtccagcatcgtccaatgttagaggaaagaatagtggagcttttcagaaacctgatgaaaagcgcatttgtggttgagcgtcagccctgtatgcccatgcaccccgatcgccctctggtgattaagactggtgtgcaattcactaccaaagtgcgcctgctcgtaaaatttcctgagctcaactaccagttaaaaataaaagtgtgtatagacaaggatagcggtgacgtggcggcactgagaggaagccgcaagttcaacattctgggcactaacacaaaggtcatgaacatggaggagagcaataatggatccctgagtgctgagtttaaacacctgacactaagggaacagcggtgtggcaatggaggtagggctaattgcgacgcaagcctcatcgtgacggaagaactgcatctgatcactttcgagacagaagtgtatcatcagggacttaaaatagacttagagacccattccctaccggtcgtggtcatttccaatatttgccagatgcctaatgcgtgggctagcatcctgtggtacaatatgctcaccaataaccctaagaacgtgaattttttcactaagccaccaatagggacgtgggaccaggttgccgaagttctgagttggcagtttagttcaaccactaaaaggggactgagcatcgagcagctgacgactctcgccgaaaagttgctaggacccggagtgaactattctggctgccagatcacctgggctaagttctgtaaggagaacatggcaggaaagggattcagtttctgggtgtggcttgataatatcatcgatctggttaaaaaatatatattagctctgtggaatgagggatatattatgggatttatctccaaggagcgagaacgcgcaattctctcaacaaaacctcccggtacatttctactgcgcttttctgaaagttcgaaggagggtggcgtgacttttacttgggttgagaaggacatttccggaaaaacacaaatccagagtgttgagccatacaccaaacaacagttaaataacatgagctttgcagaaatcattatgggatataaaataatggatgccaccaacattctggtatctcccctggtgtatttataccctgatatccccaaggaagaagctttcggaaaatactgccggccagagtctcaagagcatcccgaagccgatcccggatctgccgcaccgtacctgaagacaaaatttatttgcgttacgccattcatcgacgcggtttggaaatag

SEQ ID NO: 266063 - DNA, 3319 bp, Artificial Sequence
  derived and/or modified sequence
gcagccgagggaacaagccccaaccggatcctggacaggcaccccggcttggcgctgtctctccccctcggctcggagaggcccttcggcctgagggagcctcgccgcccgtccccggcacacgcgcagccccggcctctcggcctctgccggagaaacagcaggatggcccaatggaatcagctacagcagcttgacacacggtacctggagcagctccatcagctctacagtgacagcttcccaatggagctgcggcagtttctggccccttggattgagagtcaagattgggcatatgcggccagcaaagaatcacatgccactttggtgtttcataatctcctgggagagattgaccagcagtatagccgcttcctgcaagagtcgaatgttctctatcagcacaatctacgaagaatcaagcagtttcttcagagcaggtatcttgagaagccaatggagattgcccggattgtggcccggtgcctgtgggaagaatcacgccttctacagactgcagccactgcggcccagcaagggggccaggccaaccaccccacagcagccgtggtgacggagaagcagcagatgctggagcagcaccttcaggatgtccggaagagagtgcaggatctagaacagaaaatgaaagtggtagagaatctccaggatgactttgatttcaactataaaaccctcaagagtcaaggagacatgcaagatctgaatggaaacaaccagtcagtgaccaggcagaagatgcagcagctggaacagatgctcactgcgctggaccagatgcggagaagcatcgtgagtgagctggcggggcttttgtcagcgatggagtacgtgcagaaaactctcacggacgaggagctggctgactggaagaggcggcaacagattgcctgcattggaggcccgcccaacatctgcctagatcggctagaaaactggataacgtcattagcagaatctcaacttcagacccgtcaacaaattaagaaactggaggagttgcagcaaaaagtttcctacaaaggggaccccattgtacagcaccggccgatgctggaggagagaatcgtggagctgtttagaaacttaatgaaaagtgcctttgtggtggagcggcagccctgcatgcccatgcatcctgaccggcccctcgtcatcaagaccggcgtccagttcactactaaagtcaggttgctggtcaaattccctgagttgaattatcagcttaaaattaaagtgtgcattgacaaagactctggggacgttgcagctctcagaggatcccggaaatttaacattctgggcacaaacacaaaagtgatgaacatggaagaatccaacaacggcagcctctctgcagaattcaaacacttgaccctgagggagcagagatgtgggaatgggggccgagccaattgtgatgcttccctgattgtgactgaggagctgcacctgatcacctttgagaccgaggtgtatcaccaaggcctcaagattgacctagagacccactccttgccagttgtggtgatctccaacatctgtcagatgccaaatgcctgggcgtccatcctgtggtacaacatgctgaccaacaatcccaagaatgtaaacttttttaccaagcccccaattggaacctgggatcaagtggccgaggtcctgagctggcagttctcctccaccaccaagcgaggactgagcatcgagcagctgactacactggcagagaaactcttgggacctggtgtgaattattcagggtgtcagatcacatgggctaaattttgcaaagaaaacatggctggcaagggcttctccttctgggtctggctggacaatatcattgaccttgtgaaaaagtacatcctggccctttggaacgaagggtacatcatgggctttatcagtaaggagcgggagcgggccatcttgagcactaagcctccaggcaccttcctgctaagattcagtgaaagcagcaaagaaggaggcgtcactttcacttgggtggagaaggacatcagcggtaagacccagatccagtccgtggaaccatacacaaagcagcagctgaacaacatgtcatttgctgaaatcatcatgggctataagatcatggatgctaccaatatcctggtgtctccactggtctatctctatcctgacattcccaaggaggaggcattcggaaagtattgtcggccagagagccaggagcatcctgaagctgacccaggtagcgctgccccatacctgaagaccaagtttatctgtgtgacaccattcattgatgcagtttggaaataatggtgaaggtgctgaaccctcagcaggagggcagtttgagtccctcacctttgacatggagttgacctcggagtgcgctacctcccccatgtgaggagctgagaacggaagctgcagaaagatacgactgaggcgcctacctgcattctgccacccctcacacagccaaaccccagatcatctgaaactactaactttgtggttccagattttttttaatctcctacttctgctatctttgagcaatctgggcacttttaaaaatagagaaatgagtgaatgtgggtgatctgcttttatctaaatgcaaataaggatgtgttctctgagacccatgatcaggggatgtggcggggggtggctagagggagaaaaaggaaatgtcttgtgttgttttgttcccctgccctcctttctcagcagctttttgttattgttgttgttgttcttagacaagtgcctcctggtgcctgcggcatccttctgcctgtttctgtaagcaaatgccacaggccacctatagctacatactcctggcattgcactttttaaccttgctgacatccaaatagaagataggactatctaagccctaggtttctttttaaattaagaaataataacaattaaagggcaaaaaacactgtatcagcatagcctttctgtatttaagaaacttaagcagccgggcatggtggctcacgcctgtaatcccagcactttgggaggccgaggcggatcataaggtcaggagatcaagaccatcctggctaacacggtgaaaccccgtctctactaaaagtacaaaaaattagctgggtgtggtggtgggcgcctgtagtcccagctactcgggaggctgaggcaggagaatcgcttgaacctgagaggcggaggttgcagtgagccaaaattgcaccactgcacactgcactccatcctgggcgacagtctgagactctgtctcaaaaaaaaaaaaaaaaaa

SEQ ID NO: 266064 - protein, 284 aa, Artificial Sequence
  derived and/or modified sequence
MDAIKKKMQMLKLDKENAIDRAEQAEADKKQAEDRCKQLEEEQQALQKKLKGTEDEVEKYSESVKEAQEKLEQAEKKATDAEADVASLNRRIQLVEEELDRAQERLATALQKLEEAEKAADESERGMKVIENRAMKDEEKMELQEMQLKEAKHIAEDSDRKYEEVARKLVILEGELERSEERAEVAESRARQLEEELRTMDQALKSLMASEEEYSTKEDKYEEEIKLLEEKLKEAETRAEFAERSVAKLEKTIDDLEETLASAKEENVEIHQTLDQTLLELNNL

SEQ ID NO: 266065 - DNA, 855 bp, Artificial Sequence
  derived and/or modified sequence
atggacgccatcaagaagaagatgcagatgctgaagctggacaaggagaacgccatcgacagagccgagcaggccgaggccgacaagaagcaggccgaggacagatgcaagcagctggaggaggagcagcaggccctgcagaagaagctgaagggcaccgaggacgaggtggagaagtacagcgagagcgtgaaggaggcccaggagaagctggagcaggccgagaagaaggccaccgacgccgaggccgacgtggccagcctgaacagaagaatccagctggtggaggaggagctggacagagcccaggagagactggccaccgccctgcagaagctggaggaggccgagaaggccgccgacgagagcgagagaggcatgaaggtgatcgagaacagagccatgaaggacgaggagaagatggagctgcaggagatgcagctgaaggaggccaagcacatcgccgaggacagcgacagaaagtacgaggaggtggccagaaagctggtgatcctggagggcgagctggagagaagcgaggagagagccgaggtggccgagagcagagccagacagctggaggaggagctgagaaccatggaccaggccctgaagagcctgatggccagcgaggaggagtacagcaccaaggaggacaagtacgaggaggagatcaagctgctggaggagaagctgaaggaggccgagaccagagccgagttcgccgagagaagcgtggccaagctggagaagaccatcgacgacctggaggagaccctggccagcgccaaggaggagaacgtggagatccaccagaccctggaccagaccctgctggagctgaacaacctgtag

SEQ ID NO: 266066 - DNA, 855 bp, Artificial Sequence
  derived and/or modified sequence
atggacgcaatcaaaaagaagatgcagatgttgaagctggacaaagagaatgcaatcgaccgcgccgaacaggcggaggccgacaagaagcaagcagaggaccgctgcaaacaactagaggaagagcaacaggccctgcagaagaaattaaaggggacggaagatgaggtggagaagtactcagagagcgtgaaggaagctcaggagaaactggagcaggccgagaaaaaagccactgacgctgaagctgatgttgcctctctaaaccggcgaatccagttggtagaagaggagttggatagggcccaggagcgtctggcaaccgcactccagaaattagaggaagctgagaaggctgctgatgagtcagagcgcggtatgaaggtcattgaaaacagggcaatgaaagacgaggaaaagatggaactgcaagaaatgcagctaaaagaggccaagcacattgccgaggattcagataggaagtatgaagaagtcgctcgcaaactggtgatcttggagggcgaattagagcgatccgaagaacgtgccgaagtggccgagagtcgtgctagacagttggaggaagagctccggactatggaccaagcacttaaatctcttatggctagcgaagaagagtattctaccaaagaggataagtacgaagaagagattaaactgcttgaggagaagctcaaggaagctgagacccgcgccgagttcgctgagaggagtgtggcgaaactggagaaaaccattgacgatcttgaggaaacactggcttcagctaaagaagaaaacgttgagatccaccagacattggatcaaacgctgctcgagttgaataatctgtag

SEQ ID NO: 266067 - DNA, 855 bp, Artificial Sequence
  derived and/or modified sequence
atggatgccatcaagaagaagatgcagatgctgaagctggacaaggaaaatgccatcgacagagctgagcaggccgaggccgacaagaagcaggctgaagatcgctgcaagcagctggaggaggagcagcaggccctgcagaagaagctgaagggcacagaagatgaggtggagaagtacagcgagagcgtgaaggaggcccaggagaagctggagcaggccgagaagaaggccacagatgctgaggctgatgtggccagcctgaacagacgcatccagctggtggaggaggagctggaccgggcccaggagcggctggccacagccctgcagaagctggaggaggccgagaaggccgcagatgaaagtgagcggggcatgaaggtgattgaaaatagagccatgaaggatgaggagaagatggagctgcaggagatgcagctgaaggaggccaagcacatcgccgaggacagcgacagaaaatatgaggaggtggccaggaagctggtgatcctggagggggagctggagaggtctgaggagagagctgaggtggccgagagccgggcccggcagctggaggaggagctgcggaccatggaccaggccctgaagagcctgatggccagcgaggaggagtacagcaccaaggaggacaagtatgaggaggagatcaagctgctggaggagaagctgaaggaggccgagaccagggctgagtttgctgagaggtctgtggccaagctggagaagaccattgatgacctggaggagaccctggccagcgccaaggaggagaatgtggagatccaccagaccctggaccagaccctgctggagctgaacaacctgtag

SEQ ID NO: 266068 - DNA, 855 bp, Artificial Sequence
  derived and/or modified sequence
atggacgccatcaagaagaagatgcagatgctgaagctggacaaggaaaatgcaattgacagagctgagcaggcagaggctgacaagaaacaggccgaagaccggtgcaaacagctcgaagaagagcagcaggcgctgcagaagaagcttaagggaactgaggatgaggttgagaaatattctgagagtgttaaggaggcccaggagaagcttgagcaggctgagaagaaagctacggacgccgaagctgacgtggccagtttgaacagacgtatccagctagtcgaagaggaacttgatcgagcccaggagagactggccaccgctttacaaaaactcgaagaggccgaaaaagctgcagacgaatcagagcgtggtatgaaggtgatagaaaatagggcgatgaaggacgaagagaagatggaattacaggagatgcaattgaaagaggccaaacatatagcagaagacagcgataggaagtacgaggaggtcgctagaaagcttgtgatactggaaggggaactagaacggagcgaggagcgagcagaagtggccgagtccagagcgcgacagcttgaagaagaattgaggactatggaccaagctctgaagtcccttatggccagtgaggaggaatattcaaccaaggaggacaaatacgaggaggagataaaactgctggaagaaaagctgaaggaggcagaaacccgggcggagtttgcagaaaggtctgtggcaaaactcgagaagacaatcgacgacctggaggagacactggctagtgctaaggaggagaacgtcgagatccaccaaacactggaccaaactttactggagctgaataatttatag

SEQ ID NO: 266069 - DNA, 855 bp, Artificial Sequence
  derived and/or modified sequence
atggacgcaatcaaaaagaagatgcagatgctgaagcttgataaggagaacgccattgatagggcagaacaggcggaggcagataaaaagcaggctgaagaccgctgtaaacagcttgaagaagaacagcaggctctgcagaaaaaactgaagggaacggaggacgaagttgaaaagtactccgagagcgtaaaagaggcacaggagaagctagagcaagctgagaagaaagccaccgacgccgaggcagacgtagcatccttgaatcgcaggatccagctggtggaggaagaactcgatcgcgctcaggaacgtctggctaccgcacttcaaaaactggaggaagctgagaaggccgctgatgaaagcgagcggggaatgaaagtcattgagaacagggccatgaaagatgaagagaagatggagctgcaggagatgcagctgaaggaggcgaaacacattgctgaggactcggatcggaaatacgaggaggttgcacgcaagctggttatcctcgagggtgagctcgagaggagcgaggagcgcgctgaagtggccgagtccagggccaggcagctggaggaggagctgcggaccatggatcaggcactcaagagtcttatggcctctgaggaggagtatagtacaaaggaggacaagtatgaagaggaaatcaaacttttggaagagaagctcaaggaggccgaaaccagagcagaatttgcggaacgatcagtggctaagttggagaaaactattgacgatctggaagaaacactagcctccgctaaggaagaaaacgtggagatccaccagacactggaccagacactgctagaactgaacaacctgtag

SEQ ID NO: 266070 - DNA, 2147 bp, Artificial Sequence
  derived and/or modified sequence
gagaaggcacctcgccccggaccccctatgccccgcagctcagtgactcttcccctcgccctccgccttccccgccgcagcccggctccgcctcccaatggggaaacatcccaaaaaagggcagaaaagaaatttcagcataaagttggcccactgggaaagagaggagcgtccgcggggagcgggggagaagagggaaggcgcgcggaggggagtggggccaggcggagccaggggcggggagcggaggggctcgggacgcgtccgggtgggagcgggggcggggaacgcgcggtgaccagcctggccgcagccgcgtggaaaatatgcggggcacgtggggggcggggcggggagctgggtcctgagccgccgggtgctcgcaggaagggcctggctccaggggcaggggctgggaggggaggcgaggggatgagaggtcaggccggtcctgggggcagcaagcccggccacactccccaccgcgaccggggctctgggctcgcttcctgcttcagtttccccaagctcccgatgagactccgctactaccaccacgtcgataacgcaaacctagagggactcagggtaaactgaggcactcaaactgccgaggagctccgcctcccgagagacatttaatccggggggatttgcaggaaacttctaaattaagggtagcggctgctgcagctgagggggggcacgccggtccctgcgcccgggcagctgccgtgagctcacgccccgaaatagccccaggggccccagccgcagctgccactgggtccggctgtcactcagaggaagcacggagcccccagcccaagggtcccctccccttcgcatcgccggggtttttccagccgaccgtcggccactttttcctccgacggctggcagggaagagggggatgggggcgggaccccaagggaggcggtccccagtgggtgggcgaagggggcggccgcaccccccggccgggccgtgcttctgcccctacaaggtttgggccgaggtgggggagggtcctggttgccggccccgcccggtccctccccgccttttaggcgcccgcgtggccgggacgtcccagtcccgctccgtcctcctcgcctgccaccggtgcacccagtccgctcacccagcccagtccgtccggtcctcaccgcctgccggccggcccaccccccaccgcagccatggacgccatcaagaagaagatgcagatgctgaagctggacaaggagaacgccatcgaccgcgccgagcaggccgaagccgacaagaagcaagctgaggaccgctgcaagcagctggaggaggagcagcaggccctccagaagaagctgaaggggacagaggatgaggtggaaaagtattctgaatccgtgaaggaggcccaggagaaactggagcaggccgagaagaaggccactgatgctgaggcagatgtggcctccctgaaccgccgcattcagctggttgaggaggagctggaccgggcccaggagcgcctggctacagccctgcagaagctggaggaggccgagaaggcggctgatgagagcgagagaggaatgaaggtcatcgaaaaccgggccatgaaggatgaggagaagatggaactgcaggagatgcagctgaaggaggccaagcacatcgctgaggattcagaccgcaaatatgaagaggtggccaggaagctggtgatcctggaaggagagctggagcgctcggaggagagggctgaggtggccgagagccgagccagacagctggaggaggaacttcgaaccatggaccaggccctcaagtccctgatggcctcagaggaggagtattccaccaaagaagataaatatgaagaggagatcaaactgttggaggagaagctgaaggaggctgagacccgagcagagtttgccgagaggtctgtggcaaagttggagaaaaccatcgatgacctagaagagaccttggccagtgccaaggaggagaacgtcgagattcaccagaccttggaccagaccctgctggaactcaacaacctgtgagggccagccccacccccagccaggctatggttgccaccccaacccaataaaactgatgttactagcctctcaaggccctttaatccttt

SEQ ID NO: 266071 - protein, 142 aa, Artificial Sequence
  derived and/or modified sequence
MPRGSRSAASRPASRPAAPSAHPPAHPPPSAAAPAPAPSGQPGLMAQMATTAAGVAVGSAVGHVMGSALTGAFSGGSSEPSQPAVQQAPTPAAPQPLQMGPCAYEIRQFLDCSTTQSDLSLCEGFSEALKQCKYYHGLSSLP

SEQ ID NO: 266072 - DNA, 1171 bp, Artificial Sequence
  derived and/or modified sequence
cagggccgcgcttcacttccctaggccaccggagactcccaggccacgcggtggtcagcagaccctgtctggagggaggggacagacagccgagtccgggagggggcagagagcggagtccagcctggagcctcgcgtccccttcccagctggccccatcccgtcgcctccccgtctcctctcccctccagggctcgcaacaacccccaactccgctccctgccctctgcggtggtcctaacagaaggcactgtcgccctccttaagccctcggcgctttgcgacactggcccctgtccccagaacccgcacagcctgccaggcgcagggagggagcagggtcccatttccagccgagacccggagctgctggaagggagatgtccggaggacgggagaagggggatagggttgggggcagtgccgcctcccgctgggggcgtgttcctgaggccccgcccggggccccgccttttttgcgccggctgtgacaagcgctgcggcatttgtccccgcgacagcaccgctgccgccgtctctaaggtcgcccgggtcccaccgccgccaccatgcctcggggaagccgcagcgcggcctcccggccagccagccgcccagccgcgccctctgcccacccgcccgcgcacccaccgccctcggcagccgccccagcccccgccccttcgggccagccggggctcatggctcagatggcgaccacggccgcaggggtagccgtgggctcggctgtgggacacgtcatgggcagcgccctgaccggagccttcagcggggggagctcggagccctcccagcctgctgtccagcaggcccccacccccgctgccccccagcccctgcagatggggccctgcgcctacgagatcaggcagttcctggactgttccaccactcagagtgacctgtccctgtgtgagggcttcagcgaggccctgaagcagtgcaagtactaccatggtctgagctccctgccctgaagaggtcggtgcagactcgggggccagtcctgcacccacctctacccctcgccgacagccagaccacaacaccagattgtacccagatagctgggattggaagtgaggaggtttctcaccccacagataacccaagacacaaatgtgcaattaaaagtttattttagaccaca

SEQ ID NO: 266073 - DNA, 429 bp, Artificial Sequence
  derived and/or modified sequence
atgcccagaggcagcagaagcgccgccagcagacccgccagcagacccgccgcccccagcgcccacccccccgcccaccccccccccagcgccgccgcccccgcccccgcccccagcggccagcccggcctgatggcccagatggccaccaccgccgccggcgtggccgtgggcagcgccgtgggccacgtgatgggcagcgccctgaccggcgccttcagcggcggcagcagcgagcccagccagcccgccgtgcagcaggcccccacccccgccgccccccagcccctgcagatgggcccctgcgcctacgagatcagacagttcctggactgcagcaccacccagagcgacctgagcctgtgcgagggcttcagcgaggccctgaagcagtgcaagtactaccacggcctgagcagcctgccctag

SEQ ID NO: 266074 - DNA, 429 bp, Artificial Sequence
  derived and/or modified sequence
atgccaagaggaagtaggtcagcagcttccagacccgcttctcgtcccgccgcaccatcggctcacccaccagcccacccccctccctctgccgccgctcctgctcccgctccaagtggtcagccaggcctgatggctcagatggctacaacagccgccggagttgccgttggaagtgcagtgggacatgtgatgggctccgcacttactggcgccttctcaggaggtagcagtgaaccgagccagcctgcagtgcagcaggcacctaccccagcggctccccagcccctgcaaatgggcccctgcgcttacgaaatacgccagtttctggattgctctactacccagtcagacctcagtttatgcgaaggattctctgaggctctaaaacagtgcaaatattaccacggcctgagtagcctgccctag

SEQ ID NO: 266075 - DNA, 429 bp, Artificial Sequence
  derived and/or modified sequence
atgccccggggcagccgctctgctgccagcaggcctgccagcaggcctgctgcccccagcgcccaccccccagcccaccccccacccagcgctgctgccccagccccagcccccagcggccagcccggcctgatggcccagatggccaccacagctgctggggtggccgtgggcagcgctgtgggccacgtgatgggcagcgccctgaccggggccttcagcggcggcagcagcgagcccagccagcctgctgtgcagcaggcccccaccccagctgccccccagcccctgcagatgggcccctgtgcctatgagatccggcagttcctggactgcagcaccacccagagcgacctgagcctgtgtgagggcttcagcgaggccctgaagcagtgcaagtactaccacggcctgagcagcctgccctag

SEQ ID NO: 266076 - DNA, 429 bp, Artificial Sequence
  derived and/or modified sequence
atgccccggggcagccggagcgccgccagccggcccgccagccggccagctgcaccttccgcccacccacccgcacaccccccaccgagtgctgccgctcctgctccggcgccaagcggccagcccggcctgatggcccagatggctacaactgccgccggggtggccgtgggctctgcggtggggcacgtgatgggttcagccctcacaggagcattcagtgggggttcctcagaaccctctcagcctgcagtgcagcaggctcccacccctgccgcgccccagcccttgcaaatgggaccatgcgcttacgagatcagacaattcctggactgcagtaccactcagagcgacttgtcactgtgtgagggattttcagaagcgctcaagcaatgtaagtattaccatggtttgtcctcactgccttag

SEQ ID NO: 266077 - DNA, 429 bp, Artificial Sequence
  derived and/or modified sequence
atgcctcggggatctaggtctgcagcaagccggccagccagcagacccgctgctcctagcgcgcaccctccagcccatcctcctccctccgcggcagctccagccccagcaccatctggacaacctggtcttatggctcagatggctacgaccgcggctggagtggcagtggggtcagccgtgggccacgtgatggggtccgctctgacgggagcttttagcggcggatctagtgagcccagccagccagccgtccagcaggcccctacaccggctgccccacagcccttgcagatgggaccctgtgcttatgagatcagacagtttctcgattgcagtacgacacaatccgacttgagcttgtgcgaaggtttttccgaggcccttaagcagtgtaagtactaccatgggttgagcagcctcccctag

SEQ ID NO: 266078 - protein, 89 aa, Artificial Sequence
  derived and/or modified sequence
MASVSELACIYSALILHDDEVTVTALANVNIGSLICNVGAGGPAPAAGAAPAGGPAPSTAAAPAEEKKVEAKKEESEESDDDMGFGLFD

SEQ ID NO: 266079 - DNA, 270 bp, Artificial Sequence
  derived and/or modified sequence
atggccagtgtaagtgaattggcctgcatctactccgccctgatcctgcatgatgacgaagtgacagtgaccgctctggccaatgtaaatataggcagcctcatctgcaatgttggcgccgggggccccgctcccgccgctggtgctgcccctgccggtgggcctgccccaagtaccgcagctgcacccgcggaggagaaaaaagtcgaggccaagaaagaggagtcagaggagtctgacgatgacatgggattcgggctgttcgattag

SEQ ID NO: 266080 - DNA, 270 bp, Artificial Sequence
  derived and/or modified sequence
atggcctctgtgtctgagctggcctgcatctacagcgccctgatcctgcatgatgatgaggtgacagtgacagccctggccaacgtgaacatcggcagcctcatctgcaatgtgggcgctgggggccctgccccagctgctggagctgccccagctgggggccctgcccccagcacagctgctgccccagctgaggagaagaaggtggaggccaagaaggaggagagcgaggagagtgatgatgacatgggcttcggcctgtttgattag

SEQ ID NO: 266081 - DNA, 270 bp, Artificial Sequence
  derived and/or modified sequence
atggccagcgtgagcgagctggcctgcatctacagcgccctgatccttcacgacgacgaggtcacggtgaccgctttggccaatgttaatatcggttccttgatatgcaacgtcggcgcaggaggtccggccccggctgctggagccgctccagctgggggacccgctcctagcacggccgcggcaccggccgaagaaaaaaaagtggaagctaagaaagaagagtccgaggagagcgacgatgatatggggttcgggttattcgactag

SEQ ID NO: 266082 - DNA, 270 bp, Artificial Sequence
  derived and/or modified sequence
atggccagcgtatctgaactggcttgcatttactctgctttaatcctccacgatgacgaagtgacggtgacagccttagcgaacgtgaacattgggtcactgatctgcaatgtgggagcaggcggaccggcacccgcagccggtgccgcacccgctgggggaccggcacctagcacagctgctgccccagccgaagaaaagaaggtggaagcaaagaaagaagagtcagaagaaagcgacgacgatatgggctttggactgttcgactag

SEQ ID NO: 266083 - DNA, 445 bp, Artificial Sequence
  derived and/or modified sequence
agagcccctttcctcagctgccgccaaggtgctcggtccttccgaggaagctaaggctgcgttggggtgaggccctcacttcatccggcgactagcaccgcgtccggcagcgccagccctacactcgcccgcgccatggcctctgtctccgagctcgcctgcatctactcggccctcattctgcacgacgatgaggtgacagtcacggccctggccaacgtcaacattgggagcctcatctgcaatgtaggggccggtggacctgctccagcagctggtgctgcaccagcaggaggtcctgccccctccactgctgctgctccagctgaggagaagaaagtggaagcaaagaaagaagaatccgaggagtctgatgatgacatgggctttggtctttttgactaaacctcttttataacatgttcaataaaaagctgaactttac

SEQ ID NO: 266084 - DNA, 270 bp, Artificial Sequence
  derived and/or modified sequence
atggccagcgtgagcgagctggcctgcatctacagcgccctgatcctgcacgacgacgaggtgaccgtgaccgccctggccaacgtgaacatcggcagcctgatctgcaacgtgggcgccggcggccccgcccccgccgccggcgccgcccccgccggcggccccgcccccagcaccgccgccgcccccgccgaggagaagaaggtggaggccaagaaggaggagagcgaggagagcgacgacgacatgggcttcggcctgttcgactag

SEQ ID NO: 266085 - protein, 774 aa, Artificial Sequence
  derived and/or modified sequence
MWTPGGPPGSAGWDRRRLGARLRAAFAGLQELQGLRATQQERVRGALALQPPPAPAAPCGPHGLHGPEQQLEAALAALQEQLSRLRQQDIGLKTHLDQLDLQISKLQLDVGTASGEALDSDSRPSSGFYEMSDGGSCSLSTSCASVCSDHISPSLGSLLPVAQAHKARPSMGDWRPRSVDETTVPAWRPQATEEGARPPGSVEDAGQPWGTFWPRPVSTGDLDRALPADTGLQKASADAELLGLLCQGVDIPLHVPDPKYRQDLVSQGGREVYPYPSPLHAVALQSPLFVLTKETPQRGGPSFPRESPRGPAGLNTIQTGPVLEAGPARARAYIDRLLHLWGRETPAKGSEGEQGPLRHAASPSPQRQGGWSTDGGGRLLVFAPGREDEGGPAQSRGAGRGGPQQQGYMPLEGPQQSGSLPEEGSKPSNSCVLRETMVQASPSSKAQQTPSAQDYGRGNIISPSRMLDKSPSPASGHFAHPSFAASLKMGPPKSKAEKIKRSPMDKVLRFARQPLLLLDRPEGAHAAPQPSLEWDPAHWPTGRGGLQRRPALAWEAPGRSCSESTLYPMPVLVPLAVAPQESHRTSAQALFPFEASLLTSVARRKHRRWQSTVEISARARLASCPESNLGPPRPVARRAGGPLARGRPSLVRQDAYTRSDSEPSKHSAECDPRFPSVIPETSEGESSDHTTNRFGDRESSSSDEEGGAQSRDCDLALGYVAAGHAELAWTQEAPVSSGPLLSPVPKLCRIKASKALKKKIRRFQPTALKVMTMV

SEQ ID NO: 266086 - DNA, 2325 bp, Artificial Sequence
  derived and/or modified sequence
atgtggaccccagggggacccccagggtctgcaggctgggacagacggagactgggggcccgcctgcgggcggcatttgccggtttacaggagctccagggacttcgcgccacccagcaggaacgggtcaggggggccctcgctctgcagcctccaccagctccagctgcaccttgcggcccccacggtctgcatgggcccgaacagcaactcgaggccgctctcgccgccctccaagaacagttgtcccgactgcgtcagcaggacattggattgaaaacccaccttgatcagctcgacctgcagatcagcaaattgcaactggacgtgggcactgcaagcggagaagccctggattctgacagccgcccttccagcggattttatgagatgagcgatggcggctcctgtagcctcagcaccagttgtgctagcgtgtgcagcgaccatatcagcccgagccttggtagtttgctgcccgtcgcacaggcgcacaaggctcggcccagtatgggggattggaggccccgaagtgtagatgaaacaactgtgccagcttggcgtccacaggcaacagaggaaggagcgcgaccgcccggttcagtcgaagacgccggccaaccgtggggcaccttttggccccgtcccgtgtcaacaggtgacttggatcgggcgctgccagccgatactggacttcagaaagcgtccgccgacgcagaactgctgggacttctatgtcaaggagtggatatcccactccacgtgccagatccgaaatatcgccaggatctggtgagtcagggggggagagaggtctacccttacccttcgccactccatgctgtcgctctgcagagccccctgttcgtcctcacgaaagagacaccacagcgcggggggccgagctttcccagagagtccccacgggggccggccggcctaaacaccatacaaacggggcccgtgctcgaagcaggccccgcccgcgctagagcctatattgatcgcctcctgcacctgtggggtcgagagactccagctaagggctccgaaggggagcaaggtcccctgagacacgcggcctctccatccccacaacgacaaggcggatggtcaaccgacggcggcggcagattactggtctttgctccaggtagggaggatgagggagggccagcgcagtctcgaggtgctggtagagggggccctcagcagcaaggctatatgccattagagggaccacaacagtcaggctcactcccagaggaaggttcaaagcccagcaacagctgcgtgctcagggaaaccatggttcaggcgagcccctcttccaaggcccagcaaaccccttccgcccaggactacggtcgcggaaacatcatttctccatcgcgaatgctagacaaaagtccctcgccagcctccgggcattttgcacacccttcgttcgctgcatctctgaagatgggcccacccaagagcaaagctgaaaaaataaagaggtctcctatggataaggttctgcgatttgccagacagccgcttctcctgctggacaggcctgagggcgctcatgctgcgcctcagccttcactggagtgggatcccgcccattggcccaccggccggggcggtttacaaagacgccccgccctagcatgggaggcccccggacggtcttgctccgaaagcactttatatccaatgccagtcctggtcccgcttgctgtagctccacaagaatcccacagaaccagcgcccaggctttgttccccttcgaggcttccttactcacatccgtggccagacgaaagcatagacgatggcaatctacagtggaaattagcgctagagctcggctcgcctcctgtcccgaatcaaatctgggcccccctcgccctgtggcgaggagggcaggggggcccctggcgaggggccggcccagtctggtgcgccaggatgcttacacaagaagcgattctgaaccaagtaagcactccgccgagtgtgacccccgctttcccagtgtcataccggagactagtgaaggagaatccagcgaccatacgaccaaccgtttcggggaccgtgagtccagttcttctgacgaagaaggcggcgctcaatctcgggattgtgacctggccctgggatacgttgccgccgggcatgccgaactggcctggacacaggaagctcccgtgtcctctggaccattactctcaccggtgcccaagctctgccgaataaaggctagtaaggctttgaagaagaaaatccgccggttccaacccacggccctcaaggtcatgactatggtgtag

SEQ ID NO: 266087 - DNA, 2325 bp, Artificial Sequence
  derived and/or modified sequence
atgtggacccctgggggccccccaggcagcgctggctgggacagaagaaggctgggcgcccggctgcgggccgcctttgctggcctgcaggagctgcagggcctgcgggccacccagcaggagcgggtgcggggggccctggccctgcagcccccaccagccccagctgccccctgtggcccccacggcctgcacggccctgagcagcagctggaggccgccctggccgccctgcaggagcagctgagccggctgcggcagcaggacatcggcctgaagacccacctggaccagctggacctgcagatcagcaagctgcagctggatgtgggcacagccagcggggaggccctggacagcgacagccggcccagcagcggcttctatgagatgtctgatggcggcagctgcagcctgagcaccagctgtgcctctgtgtgcagcgaccacatcagccccagcctgggcagcctgctgcctgtggcccaggcccacaaggcccggcccagcatgggagactggaggcccaggtctgtggatgagaccaccgtgcctgcctggaggccccaggccacagaggagggcgcccggcccccaggctctgtggaggatgctggccagccctggggcaccttctggcccaggcctgtgtccactggagacctggaccgggccctgcctgctgacaccggcctgcagaaggccagcgcagatgctgagctgctgggcctgctgtgccagggcgtggacatccccctgcacgtgcctgaccccaagtaccggcaggacctggtgtcccagggcggccgggaggtgtacccctaccccagccccctgcatgctgtggccctgcagagccccctgtttgtgctgaccaaggagaccccccagagaggaggccccagcttcccccgggagagcccccggggccctgctggcctgaacaccatccagacaggccctgtgctggaggccggccctgcccgggcccgggcctacatcgaccggctgctgcacctgtggggccgggagaccccagccaagggcagcgagggggagcagggccccctgcggcatgctgccagccccagcccccagaggcagggcggctggagcacagatggcggcggccgcctgctggtgtttgcccctggaagagaagatgagggcggccctgcccagagcagaggagctggccggggcggcccccagcagcagggctacatgcccctggagggcccccagcagagcggcagcctgcctgaggagggcagcaagcccagcaacagctgtgtgctgcgggagaccatggtgcaggccagccccagcagcaaggcccagcagaccccatctgcccaggactatggccggggcaacatcatcagccccagcaggatgctggacaagagccccagccctgccagcggccactttgcccaccccagctttgctgccagcctgaagatgggcccccccaagagcaaggccgagaagatcaagaggagccccatggacaaggtgctgcgctttgcccggcagcccctgctgctgctggacaggcctgagggcgcccacgccgccccccagcccagcctggagtgggaccctgcccactggcccaccggccggggcggcctgcagaggaggcctgccctggcctgggaggcccctggccgcagctgcagcgagagcaccctgtaccccatgcctgtgctggtgcccctggccgtggccccccaggagagccacaggaccagcgcccaggccctcttcccctttgaggccagcctgctgacctctgtggcccggaggaagcaccggcgctggcagagcacagtggagatcagcgcccgggcccggctggccagctgcccagagagcaacctgggcccccccaggcctgtggccaggagagctgggggccccctggcccggggccggcccagcctggtgcggcaggatgcctacaccaggagtgacagcgagcccagcaagcacagcgcagaatgtgacccccgcttccccagcgtcatccctgagaccagcgagggggagagcagtgaccacaccaccaacagatttggagaccgggagagcagcagcagtgatgaggagggcggggcccagagccgggactgtgacctggccctgggctacgtggccgccggccatgctgagctggcctggacccaggaggcccctgtgagcagcggccccctgctgagccctgtgcccaagctgtgccgcatcaaggccagcaaggccctgaagaagaagatccgccgcttccagcccacagccctgaaggtgatgaccatggtgtag

SEQ ID NO: 266088 - DNA, 2325 bp, Artificial Sequence
  derived and/or modified sequence
atgtggacccccggcggcccccccggcagcgccggctgggaccggcgccgtctgggcgcgcggctaagggcagcctttgcagggcttcaagagttgcaggggctccgggctacgcagcaggaacgggtcaggggcgctcttgcactccagcccccccctgcacccgcagcgccctgcgggccccacggtctgcacgggcctgagcagcagctcgaggcggctctagccgcactgcaggaacagctaagccgcctgcgccaacaggatattgggttaaagactcaccttgaccagcttgatctccaaatctctaagctgcagctggatgtggggaccgcatctggcgaggccctggacagcgattccaggcctagcagcggtttttacgagatgtctgacggaggctcctgcagcctgtccaccagctgtgctagcgtttgcagcgatcatatttccccttccctggggtctcttctccccgtcgcacaggcccacaaagcaagaccttccatgggagactggcgtccacggagtgtggatgaaaccacagtgcccgcatggaggcctcaggctacagaagagggtgctagaccccctggatccgtagaagatgctggccagccctggggcactttttggcctcgccctgtgagtacaggcgacctggatagggcactgccagccgataccggcttgcagaaggcctccgctgacgcggaactgttgggactactgtgccaaggagtcgacattccattgcatgtcccagatccaaaatatcgacaggatctggtaagccagggtgggcgtgaggtgtacccgtaccctagccccttgcacgctgttgccctccaatccccacttttcgtcctgacaaaggagaccccccagaggggtgggcctagctttccacgagaaagccccagggggcccgccggcttaaacaccattcagacaggccccgtgctggaagcagggcccgcacgggcacgcgcttacattgacaggctgctgcacctgtggggccgagagacacccgccaagggatctgaaggcgagcagggacctctccggcacgcagcctcacctagcccacagcgccaaggcgggtggtctactgatggcggtggtcggctgctggtcttcgccccggggagagaagacgagggaggaccggcacagtcgagaggcgctggccgggggggcccccaacaacagggatacatgccgctggagggcccccagcaatctggcagtcttcctgaggagggtagcaagccctccaactcgtgtgtgctaagggagaccatggtgcaagcaagcccttcctcaaaggcccagcagaccccctctgcacaggactatgggcgcggtaacataattagtccttctaggatgctcgataagtccccatccccagcctcggggcattttgcccacccctccttcgctgcatcactcaagatgggcccacctaagagtaaagcagaaaagatcaaacgtagtcccatggacaaggtcctaaggttcgcccgccagccactgctgcttctggatagacccgagggcgctcatgctgccccacagccctcattagagtgggaccccgcccactggccaaccgggcggggtggactgcagcgcagaccagctctggcctgggaggcacccgggaggagctgctcagagtccaccctctatccaatgcctgtgctagtacccttggccgtcgccccccaggaaagccaccgaacttcagcccaggcccttttcccatttgaagcctcactgctgacctcggtggcaagaaggaagcaccgacggtggcagagtacggttgagattagcgctcgggctaggcttgcaagttgccctgagtctaacctgggtccaccgcgcccagtcgctcgcagggcgggcgggcccttagctagaggtcgcccttcacttgtccgccaagacgcctacacccggtcggatagtgagcccagcaaacattctgcagaatgtgaccccaggtttccatctgtgatcccggagacttccgagggggagtctagcgaccacaccaccaacagatttggagacagagagtcctcgtccagtgatgaggagggtggtgctcagagcagggactgtgatttggctctgggctacgtggcagcggggcacgctgaactggcttggactcaggaggcgcctgttagcagcggtcctctcctctcccccgtgccaaagctgtgccggattaaagcatccaaggcactgaaaaaaaagatccggcggttccaacccaccgcattaaaggtcatgaccatggtctag

SEQ ID NO: 266089 - DNA, 2325 bp, Artificial Sequence
  derived and/or modified sequence
atgtggacccccggtggtccaccaggttcggccggttgggaccgcagacgcttaggggctcgactgcgggctgcctttgccggtctccaggaactgcaggggctgcgagccactcagcaggagagagtgaggggagccctggctctccagcctcctcccgcacccgcagcgccatgcggtccccacggtctgcacggccctgagcagcaattggaggccgctttagcagcactgcaagaacagctgagcagattaagacagcaggacatcggactgaagacacatctcgatcagttggacctgcagatcagtaaattgcagcttgatgtaggtaccgctagcggcgaggccctggactccgactctagaccctcctcaggattctacgaaatgtcagacgggggttcttgtagcttaagtacatcatgtgcttccgtatgttcagaccatatttctcctagcttaggatccctgttacccgtcgcccaggcccataaagccaggccgagcatgggtgattggcggcctagatccgtggatgaaacaacggtgccagcatggaggcctcaagcaaccgaggagggggctcgcccacctggtagcgtggaagatgccggtcagccgtggggcactttctggccacgcccagtgagcaccggagacctggatcgtgcgctgcctgccgataccggcctccagaaggcttccgcggatgctgaactcctcggcctgttgtgccaaggggtggatatccctttgcacgtccccgatcccaagtatagacaggacttagtttcgcaggggggacgggaggtctacccttatcctagccccctccacgctgtcgctctgcaatcaccactgttcgttctgactaaagagaccccccagcgcggaggaccgtcattccctagggagagcccaaggggccctgcgggtcttaatactatccaaactggaccagtcctcgaagccggtcctgcacgcgcacgagcgtatatcgatcgtctgctgcacctctggggcagagagacccccgcaaaaggtagtgagggggaacagggcccactgcgccatgcagcctcgccaagcccgcagcgacaggggggatggagtacagatggcggaggcagattgcttgtgttcgcccctgggcgtgaagatgaaggcggacctgcccagagtcgaggcgctggccgaggaggaccgcagcagcaaggatatatgccactcgaaggacctcagcagtcgggcagcctgccagaagagggtagcaagccatccaattcctgtgtgttaagagaaacgatggtccaggcctccccctccagcaaggcgcaacagactccatccgctcaggactatggtcggggtaacattatctcaccaagccgcatgctggacaaatctccttctcccgcaagcggccacttcgcacatccttccttcgccgcttcactcaagatgggtcctccgaagtcgaaagcagagaaaatcaagaggtctcccatggacaaagtgttaagattcgccagacagcccttgttgctccttgaccgcccagagggagctcatgcggctcctcagccttcgctggaatgggaccctgcacactggccaaccgggcgtggaggacttcagcgccgaccagcacttgcctgggaggccccaggacgttcctgctccgaatcaactctctatccaatgccagtcctcgtccccctggcagttgcccctcaggaatcgcaccgaacgtctgcccaggcactattcccatttgaggcctcacttctcacgagcgttgccaggcgtaaacaccgcagatggcagtctacagtggagatctctgctcgggctagactcgcttcatgccccgaatcaaacctcggaccaccacggcctgtagcgcgtcgcgcaggcggtcccctggcccgagggcgtcctagcctcgtgagacaggacgcgtacacccggagtgactccgaaccgtccaaacactctgctgagtgcgaccctcgcttcccgtccgtgattccggaaactagcgagggggagagctccgatcatacaacaaatcgtttcggcgatcgcgagtcgtcaagctcagatgaagagggtggcgctcagtctagagactgtgacctggcgctgggatatgtggctgctggtcacgccgagttggcctggacacaagaggctcccgtcagcagcgggccactgctatcacctgttccaaaactctgccgcatcaaggcgtctaaggccttgaagaagaagatcagacggtttcagcccacagcattgaaagtcatgaccatggtgtag

SEQ ID NO: 266090 - DNA, 2942 bp, Artificial Sequence
  derived and/or modified sequence
ggaggacccgcgacacagctcgggatccgcgcgcgctgggcctccggcgccgctcgtggggttcgggaggccgggaccctgcccgggagatgtggacgccgggcggacccccggggtccgcgggctgggaccgccgtaggttgggcgcgaggttgcgcgcggcgttcgcggggctgcaggagctgcaggggctgcgagccacgcagcaggagcgggtacggggcgccctggccctgcagcccccgcccgcgcccgccgcgccctgcggcccccacggcctccacggccccgagcagcagctggaggcggcgctggccgcgctgcaggagcagctgtcccggctgagacaacaggacatcggcctgaagacccacctggaccagctggacctgcagattagcaagctgcagctggatgtgggcacagcctcaggggaggccctggacagcgacagcaggcccagctcaggcttttacgagatgagcgacggtggatcctgctccctgtccacgtcctgtgcctccgtctgcagtgaccacatctctccctcgctgggcagtttgttgcctgtggcccaggcccacaaggccaggcccagcatgggggactggaggccccggtcggttgatgagactactgtgccagcgtggagaccccaggctaccgaggagggcgccaggcccccagggagcgtggaggatgcaggccagccgtggggcacattctggcccaggcctgtgtctacaggtgatcttgacagagccctgccggcggacacggggctccagaaagccagcgcggacgccgagctcctcgggctcctctgccagggggtggatatcccgctgcacgtgccggaccccaagtatcggcaggacctggtgtcccagggcggcagggaggtgtacccgtaccccagccccctgcacgccgtggctctacagagccccctgtttgtcctgactaaggaaaccccacagagaggtggcccctcgttccctagggagagccccaggggccccgcaggtctgaacaccatccagactgggccggtcctcgaggctggcccggccagggccagagcttatatcgacaggttgctgcatctgtggggccgggagaccccagcaaagggtagcgagggagaacagggacctctaaggcatgcagcgtccccatctccacagaggcagggtggctggagtacagacggtggagggcgactgctggtcttcgccccagggagggaggacgagggagggccagctcagagcaggggtgccggcaggggcgggccccagcagcagggatacatgccccttgagggtccccagcagtctggcagccttccagaggagggctccaagccctcaaacagctgtgtcctcagggagaccatggtgcaggcttctcccagctcaaaggcccagcagacaccctcagctcaggactatggacgaggcaacatcatatccccatccaggatgctggacaagagcccctcaccggcctctgggcactttgcccacccatcctttgctgccagcctgaaaatgggtccccccaagagcaaggctgaaaaaatcaagagaagtcccatggacaaggtgctgaggtttgcaaggcagccgctgcttctactggacaggcctgagggagcccatgcagccccccagccatccctggagtgggaccctgcccactggcccacagggaggggcgggctccagcggaggccagccctggcctgggaggcacccgggcgctcctgttctgagtccaccctctaccccatgcctgtcctcgtccccttggcagtggccccgcaggagagccaccggacctcagcccaagccctgttcccctttgaggcgtcactgctcacctcagtggccaggaggaagcatcgccgctggcagtccaccgtggagatctcggcccgggcccgcctggccagctgtcctgagtctaacctggggccccccaggcccgtggccaggagagcaggtggcccactggcccggggccgtccctcactggtccgccaggacgcctacaccaggagcgactcagagccctccaagcactcggccgagtgtgacccgcggttcccgtcagtcatcccggagaccagcgagggagagtccagtgaccacaccaccaaccgattcggagaccgtgagtccagcagcagcgacgaggagggcggcgcccagagcagggactgtgacctggcactgggctatgtggcggccgggcatgcggagctggcctggacccaggaggccccggtcagctcggggccactcctgtcccccgtgcccaagctgtgccgtattaaggcctccaaggccctgaagaagaagatccgcaggttccagccgacggccctgaaggtcatgaccatggtgtgaggtgcagtgactgcgtcaagagaagcctgctgcacacaggggccctttccatgcagtgtcctgtgcatgtctgggtttcagtgtcgtcttgccaagtcgctttatcttccgaggccaccgtttaacaggagtccccgcagatgggttctgccctgtggagtatggccgtgagtccccgccccagcaaagacttccatgcggagctctggtttcagatgccagcagcctccccggccgacctagtgtctcttttcaaggtctgcccaggatgctgcttcccggcatgcaccttgtttccatgttgtcatcctcccatggcttcccctgccctcactcccctctggctggggaagtgtttcccaatcctttgaccattcctccccaaaagcattttaaagaggcggttgcaggactctgagctggaaattgaatttgagtttaaactccacgttaagctgtcagcatacacaaacacccaaattatgccatgatctcaaataaaaggaacattttttttccctcttttaa

SEQ ID NO: 266091 - DNA, 2325 bp, Artificial Sequence
  derived and/or modified sequence
atgtggacccccggcggcccccccggcagcgccggctgggacagaagaagactgggcgccagactgagagccgccttcgccggcctgcaggagctgcagggcctgagagccacccagcaggagagagtgagaggcgccctggccctgcagcccccccccgcccccgccgccccctgcggcccccacggcctgcacggccccgagcagcagctggaggccgccctggccgccctgcaggagcagctgagcagactgagacagcaggacatcggcctgaagacccacctggaccagctggacctgcagatcagcaagctgcagctggacgtgggcaccgccagcggcgaggccctggacagcgacagcagacccagcagcggcttctacgagatgagcgacggcggcagctgcagcctgagcaccagctgcgccagcgtgtgcagcgaccacatcagccccagcctgggcagcctgctgcccgtggcccaggcccacaaggccagacccagcatgggcgactggagacccagaagcgtggacgagaccaccgtgcccgcctggagaccccaggccaccgaggagggcgccagaccccccggcagcgtggaggacgccggccagccctggggcaccttctggcccagacccgtgagcaccggcgacctggacagagccctgcccgccgacaccggcctgcagaaggccagcgccgacgccgagctgctgggcctgctgtgccagggcgtggacatccccctgcacgtgcccgaccccaagtacagacaggacctggtgagccagggcggcagagaggtgtacccctaccccagccccctgcacgccgtggccctgcagagccccctgttcgtgctgaccaaggagaccccccagagaggcggccccagcttccccagagagagccccagaggccccgccggcctgaacaccatccagaccggccccgtgctggaggccggccccgccagagccagagcctacatcgacagactgctgcacctgtggggcagagagacccccgccaagggcagcgagggcgagcagggccccctgagacacgccgccagccccagcccccagagacagggcggctggagcaccgacggcggcggcagactgctggtgttcgcccccggcagagaggacgagggcggccccgcccagagcagaggcgccggcagaggcggcccccagcagcagggctacatgcccctggagggcccccagcagagcggcagcctgcccgaggagggcagcaagcccagcaacagctgcgtgctgagagagaccatggtgcaggccagccccagcagcaaggcccagcagacccccagcgcccaggactacggcagaggcaacatcatcagccccagcagaatgctggacaagagccccagccccgccagcggccacttcgcccaccccagcttcgccgccagcctgaagatgggcccccccaagagcaaggccgagaagatcaagagaagccccatggacaaggtgctgagattcgccagacagcccctgctgctgctggacagacccgagggcgcccacgccgccccccagcccagcctggagtgggaccccgcccactggcccaccggcagaggcggcctgcagagaagacccgccctggcctgggaggcccccggcagaagctgcagcgagagcaccctgtaccccatgcccgtgctggtgcccctggccgtggccccccaggagagccacagaaccagcgcccaggccctgttccccttcgaggccagcctgctgaccagcgtggccagaagaaagcacagaagatggcagagcaccgtggagatcagcgccagagccagactggccagctgccccgagagcaacctgggcccccccagacccgtggccagaagagccggcggccccctggccagaggcagacccagcctggtgagacaggacgcctacaccagaagcgacagcgagcccagcaagcacagcgccgagtgcgaccccagattccccagcgtgatccccgagaccagcgagggcgagagcagcgaccacaccaccaacagattcggcgacagagagagcagcagcagcgacgaggagggcggcgcccagagcagagactgcgacctggccctgggctacgtggccgccggccacgccgagctggcctggacccaggaggcccccgtgagcagcggccccctgctgagccccgtgcccaagctgtgcagaatcaaggccagcaaggccctgaagaagaagatcagaagattccagcccaccgccctgaaggtgatgaccatggtgtag

SEQ ID NO: 266092 - protein, 283 aa, Artificial Sequence
  derived and/or modified sequence
MGLGLRGWGRPLLTVATALMLPVKPPAGSWGAQIIGGHEVTPHSRPYMASVRFGGQHHCGGFLLRARWVVSAAHCFSHRDLRTGLVVLGAHVLSTAEPTQQVFGIDALTTHPDYHPMTHANDICLLRLNGSAVLGPAVGLLRPPGRRARPPTAGTRCRVAGWGFVSDFEELPPGLMEAKVRVLDPDVCNSSWKGHLTLTMLCTRSGDSHRRGFCSADSGGPLVCRNRAHGLVSFSGLWCGDPKTPDVYTQVSAFVAWIWDVVRRSSPQPGPLPGTTRPPGEAA

SEQ ID NO: 266093 - DNA, 852 bp, Artificial Sequence
  derived and/or modified sequence
atgggccttggcctgcgcggttggggacggcctctgctcactgtggctaccgcactgatgctcccagttaaacctcccgctggcagctggggagctcagattatcggaggacatgaggtgacacctcattcacgcccttatatggctagcgtgcgcttcggcggtcagcatcactgtggagggttcttgcttcgagcacgttgggttgtctccgcagcccattgcttcagccatagagacctacgcacgggattggtggttctgggagcccacgttttgtccacagcagaaccaactcaacaggttttcggtatcgatgcgttgacaacacatcccgattaccaccctatgacccacgcgaacgatatctgcctcctgaggttaaatggcagcgcagtgctcggccctgcagtgggcctcctccggccacccggtaggcgggcaaggccgccaacagctggcaccagatgccgtgtcgcaggttggggctttgtgagtgactttgaagaacttcctcctgggcttatggaggcaaaagtgagagttctggacccagacgtttgtaactcatcctggaaaggacatttgactctgaccatgctatgcaccagatcaggcgattcccataggcgcggtttctgtagcgcagactccgggggtcccctagtgtgccggaatagagcccacgggctggtgagtttttcaggattgtggtgcggagaccccaaaacccctgacgtttacactcaggtcagcgccttcgtcgcgtggatatgggacgtcgtacgtagatcctcaccacagccaggtccgcttcctgggaccacacggcctccaggggaggctgcttag

SEQ ID NO: 266094 - DNA, 852 bp, Artificial Sequence
  derived and/or modified sequence
atgggtctaggtcttcggggatggggcagaccactgctgactgtggccactgctctcatgctgcccgtcaaacctcccgctggtagttggggagctcagatcatagggggtcatgaggtaaccccccactctcgtccgtatatggcctccgtgcgattcgggggccagcatcactgcggcgggttcctgctgagagcccgatgggtcgtctccgctgcccactgtttctcccaccgcgatctacgcaccggcctcgtggtgctgggggcacatgtcctaagtacagcagaacccacgcagcaagtcttcggcatcgatgcactcaccacacatcccgattaccaccctatgacacatgctaacgatatatgtttgctgcgactcaacggctccgccgtgctaggcccagctgtgggcctcctgcgtcctcctggaagaagagcccgaccacctacagcaggtacaagatgtagggtcgctggttgggggtttgtgagcgattttgaggagttaccccccggcctaatggaggctaaggtaagggtgttagatcctgatgtctgcaattcttcttggaagggacatctgaccctgacaatgctctgtacccgcagcggtgattcacacagaagaggtttttgtagcgcagattctggaggcccactagtgtgccgcaatagagcccatggactggtgagcttctcgggactctggtgtggcgatcccaaaacccctgacgtgtacacccaggtctcagccttcgtcgcttggatctgggatgtggtacgccggtcctcaccacagcctggaccactccccggtactacaaggcctccaggtgaggccgcttag

SEQ ID NO: 266095 - DNA, 852 bp, Artificial Sequence
  derived and/or modified sequence
atgggtctcggactgagggggtgggggcgccccctgctgactgtggcaaccgcccttatgctgcccgtgaagccacctgccggctcttggggagctcaaattattgggggacacgaggtgactccacattctcgcccttatatggcgtcagttcggttcggaggtcagcaccactgcgggggctttttgttgcgtgcacgatgggttgtgtctgctgcccactgcttcagccatcgtgatctgagaaccggcctcgttgtgcttggagctcatgttctatcgactgcagaaccaactcagcaggtctttggaattgacgccctcaccactcaccctgactatcaccccatgacacatgctaacgatatctgtctactgcgattgaatggatctgccgtgctgggaccggcagtgggtctgctcaggccgcccggacgaagagctcgaccacccacagcaggaactcgctgtcgcgtagccggatggggattcgttagtgactttgaagaactgccccccgggctgatggaagctaaggtaagggtcctggatccggatgtgtgtaattccagctggaagggtcacctaactttgacaatgctgtgcacaagaagtggggactcgcaccgaagaggcttctgttccgcagattcaggtggcccactagtatgtagaaatagggcccacggactggtgagcttttccgggttgtggtgcggagatccgaagacgccagatgtttatacacaggtcagtgcattcgtagcttggatctgggatgtcgtgcgccgctcaagccctcagcctggcccccttcccgggactacacggcctccaggggaagccgcttag

SEQ ID NO: 266096 - DNA, 852 bp, Artificial Sequence
  derived and/or modified sequence
atgggcctgggcctgagaggctggggcagacccctgctgaccgtggccaccgccctgatgctgcccgtgaagccccccgccggcagctggggcgcccagatcatcggcggccacgaggtgaccccccacagcagaccctacatggccagcgtgagattcggcggccagcaccactgcggcggcttcctgctgagagccagatgggtggtgagcgccgcccactgcttcagccacagagacctgagaaccggcctggtggtgctgggcgcccacgtgctgagcaccgccgagcccacccagcaggtgttcggcatcgacgccctgaccacccaccccgactaccaccccatgacccacgccaacgacatctgcctgctgagactgaacggcagcgccgtgctgggccccgccgtgggcctgctgagaccccccggcagaagagccagaccccccaccgccggcaccagatgcagagtggccggctggggcttcgtgagcgacttcgaggagctgccccccggcctgatggaggccaaggtgagagtgctggaccccgacgtgtgcaacagcagctggaagggccacctgaccctgaccatgctgtgcaccagaagcggcgacagccacagaagaggcttctgcagcgccgacagcggcggccccctggtgtgcagaaacagagcccacggcctggtgagcttcagcggcctgtggtgcggcgaccccaagacccccgacgtgtacacccaggtgagcgccttcgtggcctggatctgggacgtggtgagaagaagcagcccccagcccggccccctgcccggcaccaccagaccccccggcgaggccgcctag

SEQ ID NO: 266097 - DNA, 1051 bp, Artificial Sequence
  derived and/or modified sequence
ctctgcggggagacgccagcctgcgtctgccatggggctcgggttgaggggctggggacgtcctctgctgactgtggccaccgccctgatgctgcccgtgaagccccccgcaggctcctggggggcccagatcatcgggggccacgaggtgaccccccactccaggccctacatggcatccgtgcgcttcgggggccaacatcactgcggaggcttcctgctgcgagcccgctgggtggtctcggccgcccactgcttcagccacagagacctccgcactggcctggtggtgctgggcgcccacgtcctgagtactgcggagcccacccagcaggtgtttggcatcgatgctctcaccacacaccccgactaccaccccatgacccacgccaacgacatctgcctgctgcggctgaacggctctgctgtcctgggccctgcagtggggctgctgaggccgccagggagaagggccaggccccccacagcggggacacggtgccgggtggctggctggggcttcgtgtctgactttgaggagctgccgcctggactgatggaggccaaggtccgagtgctggacccggacgtctgcaacagctcctggaagggccacctgacacttaccatgctctgcacccgcagtggggacagccacagacggggcttctgctcggccgactccggagggcccctggtgtgcaggaaccgggctcacggcctcgtttccttctcgggcctctggtgcggcgaccccaagacccccgacgtgtacacgcaggtgtccgcctttgtggcctggatctgggacgtggttcggcggagcagtccccagcccggccccctgcctgggaccaccaggcccccaggagaagccgcctgagccacaaccttgcggcatgcaaatgagatggccgctccaggcctggaatgttccgtggctgggccccacgggaagcctgatgttcagggttggggtgggacgggcagcggtggggcacacccattccacatgcaaagggcagaagcaaacccagtaaaatgttaactg

SEQ ID NO: 266098 - DNA, 852 bp, Artificial Sequence
  derived and/or modified sequence
atggggttgggactgcgcggatggggtagacctctcctgacggtagccacggccctgatgctcccagttaaacctccagcgggctcgtggggcgcgcagataatcggaggacatgaagttacccctcacagtcgcccatacatggcctcagttagattcgggggtcagcatcactgcgggggttttctgttgagggccaggtgggttgtgtcagccgcccactgtttcagtcaccgcgatctccgtacagggctggttgtgctaggggcacacgtgcttagcacggccgagccgacccagcaagtttttggcattgatgcacttaccacccaccctgactatcacccaatgacccatgctaatgatatttgcctgctaagactaaacggcagcgctgtgctgggtccggcagttggtctgttgagaccaccagggaggcgagctcgaccacccactgccggcacccggtgccgtgtagccgggtggggcttcgttagtgacttcgaggaattgcccccagggctgatggaggctaaggtgcgcgtcctggatcctgatgtgtgcaattctagttggaaagggcatctcactttgactatgctgtgcacaaggtctggagactctcatcggcgaggcttctgcagcgcggattccggagggccacttgtatgccggaatcgggcccacgggctggtttcttttagcggcttgtggtgtggcgacccaaagactccagatgtttacacgcaggtcagtgcattcgttgcctggatttgggatgtggtgcgccgttcttccccccaacctggccctttgccaggtaccacgcgcccacccggagaggctgcttag

SEQ ID NO: 266099 - DNA, 852 bp, Artificial Sequence
  derived and/or modified sequence
atgggcctgggcctgcggggctggggccggcccctgctgactgtggccacagccctgatgctgcctgtgaagcccccagctggctcctggggcgcccagatcattggaggccacgaggtgaccccccacagccggccctacatggcctctgtgcgctttggaggccagcaccactgcggcggcttcctgctgcgggcccgctgggtggtgtctgctgcccactgcttcagccaccgggacctgaggacaggcctggtggtgctgggcgcccacgtgctgagcacagctgagcccacccagcaggtgtttggaattgatgccctgaccacccacccagactaccaccccatgacccacgccaatgacatctgcctgctgcggctgaatggatctgctgtgctgggccctgctgtgggcctgctgcggcccccaggccggcgggcccggcccccaacagctggcacccgctgccgggtggccggctggggctttgtgtctgactttgaggagctgcccccaggcctgatggaggccaaggtgcgggtgctggaccctgatgtgtgcaacagctcctggaagggccacctgaccctgaccatgctgtgcaccaggtctggggacagccaccggcggggcttctgcagcgctgacagcggcggccccctggtgtgcaggaacagagcccacggcctggtgtccttcagcggcctgtggtgtggggaccccaagaccccagatgtgtacacccaggtgtctgcctttgtggcctggatctgggatgtggtgagaagaagcagcccccagcccggccccctgcccggcaccacccggcccccaggagaggccgcctag

SEQ ID NO: 266100 - DNA, 852 bp, Artificial Sequence
  derived and/or modified sequence
atgggcctgggcctgcggggctggggccggcccctgctgaccgtggcgacggcactgatgttgccggtaaagccacccgctgggtcctggggtgcccagatcataggcggacacgaggtcaccccccacagccgcccttacatggcttccgtgaggttcggcggacagcatcactgtggcggcttcctgctccgtgcccggtgggtggtaagcgctgcccactgtttcagccatagggacttgaggaccggcttggtcgtccttggggcccatgtactaagcaccgcagaaccaacacaacaggtgtttggcatcgacgccctgaccacccatcccgattaccatccaatgacacacgccaacgacatctgtctgttacgtctgaacggtagcgccgtattggggcccgctgtcggactgctgcggcccccgggtagaagagcaagacctcccaccgccggcaccagatgccgggtggctgggtggggcttcgtgagcgattttgaggaacttccaccgggactgatggaggccaaagtgcgggttctggatccagatgtttgtaatagttcctggaaaggacatctgactctgaccatgctgtgtacacggagcggggatagccacaggaggggcttctgcagtgccgactctggaggcccgctggtctgtcgcaatcgagcacatggccttgtgtcattttccggcctgtggtgtggcgatcctaaaaccccagacgtgtatacccaggttagcgcgttcgtggcttggatctgggatgtggtgaggcgcagctccccccagcccggacccctacccggcacaacccgaccccccggcgaggcggcctag

SEQ ID NO: 266101 - RNA, 852 nt, Artificial Sequence
  derived and/or modified sequence
augggucuaggucuucggggauggggcagaccacugcugacuguggccacugcucucaugcugcccgucaaaccucccgcugguaguuggggagcucagaucauagggggucaugagguaaccccccacucucguccguauauggccuccgugcgauucgggggccagcaucacugcggcggguuccugcugagagcccgaugggucgucuccgcugcccacuguuucucccaccgcgaucuacgcaccggccucguggugcugggggcacauguccuaaguacagcagaacccacgcagcaagucuucggcaucgaugcacucaccacacaucccgauuaccacccuaugacacaugcuaacgauauauguuugcugcgacucaacggcuccgccgugcuaggcccagcugugggccuccugcguccuccuggaagaagagcccgaccaccuacagcagguacaagauguagggucgcugguuggggguuugugagcgauuuugaggaguuaccccccggccuaauggaggcuaagguaaggguguuagauccugaugucugcaauucuucuuggaagggacaucugacccugacaaugcucuguacccgcagcggugauucacacagaagagguuuuuguagcgcagauucuggaggcccacuagugugccgcaauagagcccauggacuggugagcuucucgggacucugguguggcgaucccaaaaccccugacguguacacccaggucucagccuucgucgcuuggaucugggaugugguacgccgguccucaccacagccuggaccacuccccgguacuacaaggccuccaggugaggccgcuuag

SEQ ID NO: 266102 - RNA, 852 nt, Artificial Sequence
  derived and/or modified sequence
augggucucggacugagggggugggggcgcccccugcugacuguggcaaccgcccuuaugcugcccgugaagccaccugccggcucuuggggagcucaaauuauugggggacacgaggugacuccacauucucgcccuuauauggcgucaguucgguucggaggucagcaccacugcgggggcuuuuuguugcgugcacgauggguugugucugcugcccacugcuucagccaucgugaucugagaaccggccucguugugcuuggagcucauguucuaucgacugcagaaccaacucagcaggucuuuggaauugacgcccucaccacucacccugacuaucaccccaugacacaugcuaacgauaucugucuacugcgauugaauggaucugccgugcugggaccggcagugggucugcucaggccgcccggacgaagagcucgaccacccacagcaggaacucgcugucgcguagccggauggggauucguuagugacuuugaagaacugccccccgggcugauggaagcuaagguaaggguccuggauccggauguguguaauuccagcuggaagggucaccuaacuuugacaaugcugugcacaagaaguggggacucgcaccgaagaggcuucuguuccgcagauucagguggcccacuaguauguagaaauagggcccacggacuggugagcuuuuccggguuguggugcggagauccgaagacgccagauguuuauacacaggucagugcauucguagcuuggaucugggaugucgugcgccgcucaagcccucagccuggcccccuucccgggacuacacggccuccaggggaagccgcuuag

SEQ ID NO: 266103 - protein, 294 aa, Artificial Sequence
  derived and/or modified sequence
MRPEGSLTYRVPERLRQGFCGVGRAAQALVCASAKEGTAFRMEAVQEGAAGVESEQAALGEEAVLLLDDIMAEVEVVAEEEGLVERREEAQRAQQAVPGPGPMTPESALEELLAVQVELEPVNAQARKAFSRQREKMERRRKPHLDRRGAVIQSVPGFWANVIANHPQMSALITDEDEDMLSYMVSLEVEEEKHPVHLCKIMLFFRSNPYFQNKVITKEYLVNITEYRASHSTPIEWYPDYEVEAYRRRHHNSSLNFFNWFSDHNFAGSNKIAESPDRSYVRTCGAIPCNTTRG

SEQ ID NO: 266104 - DNA, 441 bp, Artificial Sequence
  derived and/or modified sequence
atgagacccgagggcagcctgacctacagagtgcccgagagactgagacagggcttctgcggcgtgggcagagccgcccaggccctggtggagctggagcccgtgaacgcccaggccagaaaggccttcagcagacagagagagaagatggagagaagaagaaagccccacctggacagaagaggcgccgtgatccagagcgtgcccggcttctgggccaacgtgatcgccaaccacccccagatgagcgccctgatcaccgacgaggacgaggacatgctgagctacatggtgagcctggaggtggaggaggagaagcaccccgtgcacctgtgcaagatcatgctgttcttcagaagcaacccctacttccagaacaaggtgatcaccaaggagtacctggtgaacatcaccgagtacagagccagccacagcacctag

SEQ ID NO: 266105 - DNA, 885 bp, Artificial Sequence
  derived and/or modified sequence
atgagacccgagggcagcctgacctacagagtgcccgagagactgagacagggcttctgcggcgtgggcagagccgcccaggccctggtgtgcgccagcgccaaggagggcaccgccttcagaatggaggccgtgcaggagggcgccgccggcgtggagagcgagcaggccgccctgggcgaggaggccgtgctgctgctggacgacatcatggccgaggtggaggtggtggccgaggaggagggcctggtggagagaagagaggaggcccagagagcccagcaggccgtgcccggccccggccccatgacccccgagagcgccctggaggagctgctggccgtgcaggtggagctggagcccgtgaacgcccaggccagaaaggccttcagcagacagagagagaagatggagagaagaagaaagccccacctggacagaagaggcgccgtgatccagagcgtgcccggcttctgggccaacgtgatcgccaaccacccccagatgagcgccctgatcaccgacgaggacgaggacatgctgagctacatggtgagcctggaggtggaggaggagaagcaccccgtgcacctgtgcaagatcatgctgttcttcagaagcaacccctacttccagaacaaggtgatcaccaaggagtacctggtgaacatcaccgagtacagagccagccacagcacccccatcgagtggtaccccgactacgaggtggaggcctacagaagaagacaccacaacagcagcctgaacttcttcaactggttcagcgaccacaacttcgccggcagcaacaagatcgccgagagccccgacagaagctacgtgagaacctgcggcgccatcccctgcaacaccaccagaggctag

SEQ ID NO: 266106 - DNA, 441 bp, Artificial Sequence
  derived and/or modified sequence
atgagacctgagggatccctcacatacagggtgccagagcgtttacgccagggcttttgtggcgttgggagggcagctcaggccctggtggaactggagcccgtaaacgcccaggccagaaaagcatttagtagacagagagaaaaaatggaacgcagacgcaaacctcatctcgacaggaggggtgccgttatacagagcgtgccgggcttctgggctaatgtgatcgccaaccatccccagatgagtgctctcattacagacgaggatgaggacatgctctcttacatggtgtctctggaggtagaggaagagaaacaccctgtccatctatgcaagatcatgttgtttttcaggtccaatccctacttccagaataaagttatcacgaaggaatatctcgttaatatcacagagtacagagcttcccacagtacctag

SEQ ID NO: 266107 - DNA, 885 bp, Artificial Sequence
  derived and/or modified sequence
atgcggcctgaaggtagcctcacgtatagagttcccgagagacttcgacagggcttttgcggggtggggagggctgcccaggcgctggtgtgtgcgtccgccaaagaaggaactgccttcaggatggaggccgtgcaggaaggtgcagcgggggtggagtcagaacaggcagcactcggagaggaggccgtgcttctgctggacgacattatggctgaagtggaagtcgtagctgaggaggagggtctggttgagcgacgcgaggaggcacagagggctcagcaggcagtgcctggacctgggccgatgactcctgagtcagcattggaggagctgctcgccgttcaggtagagctagaacccgttaacgctcaggccagaaaggcatttagccgacagagggaaaagatggaaagaagaagaaaaccccatctggacagaagaggggcagtaattcagtctgtcccgggattctgggccaatgtgatagccaaccaccctcaaatgagcgctctcatcaccgacgaggacgaagatatgttatcctatatggtcagtcttgaggtggaggaggagaaacatcctgttcacttgtgcaaaattatgctgtttttccggagtaatccctactttcagaacaaggtcatcacaaaagaatacctcgtgaacatcaccgagtacagagcgagccattcaacaccaatcgagtggtaccccgactacgaagtggaagcgtatagaaggagacaccacaactcttccctgaactttttcaattggttttctgatcacaattttgccggctcaaacaaaatcgcggagagccccgatcgcagctacgtcagaacctgcggcgcaatcccttgtaatactacacggggatag

SEQ ID NO: 266108 - DNA, 441 bp, Artificial Sequence
  derived and/or modified sequence
atgaggcctgagggcagcctgacctacagagtgcctgagcggctgcggcagggcttctgtggggtgggccgggccgcccaggccctggtggagctggagcctgtgaatgcccaggccaggaaggccttcagccggcagcgggagaagatggagaggaggaggaagccccacctggacagaagaggagctgtgatccagagcgtgcccggcttctgggccaacgtcatcgccaaccacccccagatgtctgccctgatcacagatgaagatgaggacatgctgagctacatggtgtccctggaggtggaggaggagaagcaccctgtgcacctgtgcaagatcatgctgttcttccgcagcaacccctacttccagaacaaggtgatcaccaaggagtacctggtgaacatcacagagtaccgggccagccacagcacctag

SEQ ID NO: 266109 - DNA, 885 bp, Artificial Sequence
  derived and/or modified sequence
atgaggcctgagggcagcctgacctacagagtgcctgagcggctgcggcagggcttctgtggggtgggccgggccgcccaggccctggtgtgtgccagcgccaaggagggcacagccttcaggatggaggccgtgcaggagggcgccgccggcgtggagagcgagcaggccgccctgggggaggaggccgtgctgctgctggatgacatcatggccgaggtggaggtggtggccgaggaggagggcctggtggagcggcgggaggaggcccagagggcccagcaggccgtgcccggccctggccccatgaccccagagagcgccctggaggagctgctggccgtgcaggtggagctggagcctgtgaatgcccaggccaggaaggccttcagccggcagcgggagaagatggagaggaggaggaagccccacctggacagaagaggagctgtgatccagagcgtgcccggcttctgggccaacgtgattgccaaccacccccagatgtctgccctgatcacagatgaagatgaggacatgctgagctacatggtgtccctggaggtggaggaggagaagcaccctgtgcacctgtgcaagatcatgctgttcttccgcagcaacccctacttccagaacaaggtgatcaccaaggagtacctggtgaacatcacagagtaccgggccagccacagcacccccatcgagtggtacccagactatgaggtggaggcctacagaagaagacaccacaacagcagcctgaacttcttcaactggttcagtgaccacaactttgctggcagcaacaagattgctgagagcccagacaggagctatgtgaggacctgtggggccatcccctgcaacaccacccggggctag

SEQ ID NO: 266110 - DNA, 441 bp, Artificial Sequence
  derived and/or modified sequence
atgcggcccgagggcagcctgacctaccgggtgcccgagcggctgcggcagggcttttgcggcgtgggcagagccgctcaggctctggtagaactggaacctgtgaatgcccaggctcgcaaagcattcagccgacagcgggagaagatggaaaggaggagaaaaccacacctggatcgaagaggagcggttattcaaagcgtgccaggattctgggccaacgtgatcgcgaatcacccacagatgagcgccctgataacggacgaagacgaagacatgctgagctacatggtgtcactggaggttgaggaggagaagcaccccgtacatctctgcaagattatgctgtttttcagaagtaacccctatttccaaaataaagtcatcactaaagagtatctggttaatatcacggagtaccgagcctcacattcaacatag

SEQ ID NO: 266111 - DNA, 885 bp, Artificial Sequence
  derived and/or modified sequence
atgcggcccgagggcagcctgacctaccgggtgcccgagcggctgagacaagggttttgtggcgtcggtcgcgcggcccaggcccttgtctgcgcttcggccaaagagggcacggccttccggatggaagcagtccaggaaggagcggctggagttgagtctgagcaggccgcattgggtgaggaagctgtgcttttgttagacgacatcatggccgaagttgaggtagtggccgaggaggagggtctggttgaaagacgcgaggaggcccagcgcgcacagcaggcggtgcctggcccgggtcctatgacgcccgagtctgcgttggaagaattgctagctgtacaggttgagttggagcccgtcaacgcacaagcccggaaggcattcagccggcagagggagaagatggagcggcgcagaaaaccacacctggacaggagaggcgctgtgattcagagcgtgcccggcttttgggccaatgttatcgccaatcacccccagatgtccgctctaattaccgacgaagacgaagatatgttatcttatatggtgagcctggaggttgaagaagagaaacatcccgtgcatctttgcaaaatcatgctgttcttccgctctaatccttacttccagaataaagtgataacaaaagaatatctcgtgaatattaccgagtaccgagccagtcattcaacacctatcgaatggtaccccgactacgaagtggaggcctatcgccgtcggcaccataattctagtctcaacttctttaattggttctcagaccacaattttgccggctccaataaaatcgccgaatctcccgaccggtcgtatgttcggacttgtggggcgatcccatgcaacaccactaggggttag

SEQ ID NO: 266112 - DNA, 441 bp, Artificial Sequence
  derived and/or modified sequence
atgaggcctgaggggagcctcacttatagagtgccggagcggctgcggcaagggttttgcggcgtcgggcgagcggctcaagccctcgtcgaattggagccagtgaatgctcaggcgaggaaagcgttttctcgccagagggagaaaatggaacgcaggaggaaacctcacctggatcggaggggcgcagtcatccaatcggtccccggattttgggccaatgttatcgccaatcaccctcaaatgagtgcccttatcacagatgaagatgaggatatgctcagttatatggtgagtctcgaggtagaagaggagaagcatcccgtacacttgtgcaagatcatgctattttttcggtctaatccttatttccagaacaaagtcatcaccaaggagtatttagtgaacatcacagagtaccgtgccagtcacagtacctag

SEQ ID NO: 266113 - DNA, 885 bp, Artificial Sequence
  derived and/or modified sequence
atgagacccgaggggagcctcacctaccgagtgccagagcgcctgcgccagggattctgcggggttggacgggcagcccaggccttagtttgtgcatcagcaaaggaagggacagcctttaggatggaggcggtgcaggaaggagctgcaggggtggaaagcgagcaggctgctttgggtgaagaagccgtcctgctgctggatgacatcatggctgaggtggaagttgttgcagaggaagagggacttgtcgagcgcagagaggaagcacaaagagcacagcaggcagtcccgggtcccggaccgatgaccccggagagtgcgctggaggagcttctcgccgtccaggtggagttggaaccagtgaatgcccaggctcgaaaggcgttcagtagacagcgagagaagatggaacgcagaaggaagccccatctagatcgtagaggagcagtgattcagagcgtgcccggattctgggccaacgtgattgccaaccatccgcagatgtctgctttgatcacagatgaggatgaagatatgcttagttatatggtgtccctggaagtcgaagaggagaagcaccccgtgcatttgtgtaagatcatgttattcttcaggtcaaacccttacttccagaacaaagtcatcaccaaagaatatctagtgaacattactgagtatagagcctctcactctacacctattgaatggtatccggactatgaagttgaggcttatagacgtcgtcaccacaactcttcactcaactttttcaactggttttcagaccataattttgccggatccaacaaaatagcagaaagtccagacaggagctacgtccgaacttgcggcgcaataccttgtaacaccactcgaggctag

SEQ ID NO: 266114 - DNA, 1125 bp, Artificial Sequence
  derived and/or modified sequence
atgcgccctgagggctcgctgacctaccgggtgccagagaggctgcggcagggtttctgtggcgtgggtcgggcagcacaggccttggtgtgtgcgagtgccaaggagggcaccgccttcaggatggaggctgtacaggagggggcggccggggtggagagtgagcaggcggctttgggggaggaggcggtgctgctgttggatgacataatggcggaggtggaggtggtggcggaggaggagggcctcgtggagcggcgggaggaggcccagcgggcacagcaggctgtgcctggccctgggcccatgaccccagagtctgcactggaggagctgctggccgttcaggtggagctggagccggttaatgcccaagccaggaaggccttttctcggcagcgggaaaagatggagcggaggcgcaagccccacctagaccgcagaggcgccgtcatccagagcgtccctggcttctgggccaatgttattgcaaaccacccccagatgtcagccctgatcactgacgaagatgaagacatgctgagctacatggtcagcctggaggtggaagaagagaagcatcctgttcatctctgcaagatcatgttgttctttcggagtaacccctacttccagaataaagtgattaccaaggaatatctggtgaacatcacagaatacagggcttctcattccactccaattgagtggtatccggattatgaagtggaggcctatcgccgcagacaccacaacagcagccttaacttcttcaactggttctctgaccacaacttcgcaggatctaacaagattgctgagtcccctgacagatcctatgtaaggacctgtggcgcaatcccctgcaatactacaagaggatgaagccacctgaagagggaacagagacgtcaggggactcccagttgttgagttgaatatgatggagcatcagattttacctaatacagcagaactcctaaaaagttacagccatatgcaggacggcagtactcagcatggtcttatgcacaggaactaaaggaaaaacagatcgagtcacaaaaattcaggaagagggggtaaatgtggattgtatggaatgaaaaataaacattctcaagg

SEQ ID NO: 266115 - DNA, 231 bp, Artificial Sequence
  derived and/or modified sequence
ctgaagatcagcttcagcgagaccgccctggagaccacctaccagtaccccagcgagagcagcgtgctggaggagctgggccccgagcccgaggtgcccagcgcccccaacccccccgccgcccagcccgacgacgaggaggacgaggaggagctgctgctgctgcagcccgagctgcagggcggcctgagaaccaaggccctgatcgtggacgagagctgcagaagatag

SEQ ID NO: 266116 - DNA, 231 bp, Artificial Sequence
  derived and/or modified sequence
ttgaagatttctttttccgagacagcactggagactacctaccagtacccctccgagtcttcagtgctggaggaattagggcccgagccagaggtccccagtgcccccaaccctccagccgcacagccagacgacgaggaagatgaggaagagctactgctgctgcaacctgagcttcagggcgggctgaggacaaaagcccttattgtggacgaatcctgtcgccgctag

SEQ ID NO: 266117 - DNA, 231 bp, Artificial Sequence
  derived and/or modified sequence
ctcaagatctcgttctcagagacagcgcttgaaaccacctatcagtacccttccgagtcctctgtgctggaggagttagggccggagccagaggtgccttccgctccaaacccaccagctgcacaaccagatgatgaggaggatgaagaggagctgttgctgcttcagccagagctccagggcggcctacgaacaaaagcccttatcgtagatgagtcatgcagaagatag

SEQ ID NO: 266118 - DNA, 231 bp, Artificial Sequence
  derived and/or modified sequence
ctgaagatctccttcagcgagacagccctggagaccacctaccagtaccccagcgagagctctgtgctggaggagctgggccctgagcctgaggtgcccagcgcccccaaccccccagctgcccagccagatgatgaagaagatgaggaggagctgctgctgctgcagcctgagctgcagggcggcctgcggaccaaggccctgattgtggatgagagctgcagaagatag

SEQ ID NO: 266119 - DNA, 231 bp, Artificial Sequence
  derived and/or modified sequence
ctgaagatcagcttcagcgagaccgccctggagaccacctaccagtacccttccgagtcgtctgtgcttgaagaactgggcccggaaccagaggtgccttcagccccgaatcccccggccgctcagccagacgacgaggaggacgaagaggaactcctgttgctgcagcctgagctgcaaggggggctgcgcacgaaagctctcattgtcgacgagagctgcagaaggtag

SEQ ID NO: 266120 - DNA, 231 bp, Artificial Sequence
  derived and/or modified sequence
ctgaagatcagcttcagcgagaccgccctggagaccacctaccagtatccatctgagtcctctgtgctggaggaactgggccctgagccagaggtgccatccgctccaaatccacctgccgctcagccggacgacgaagaggatgaggaggagctgctcttgctccagcccgagctccagggcggtttgaggactaaagctttaattgttgacgaaagttgtcgcaggtag

SEQ ID NO: 266121 - DNA, 231 bp, Artificial Sequence
  derived and/or modified sequence
ctgaagataagctttagcgagaccgcccttgagacaacctatcagtaccctagtgagtcatccgtgctggaggaactggggcctgagcctgaggttccttctgcacccaaccctccggcagcacagcctgacgacgaagaggatgaggaagaactgcttctgctgcagcctgagctgcaggggggactccgcaccaaggcgttaattgttgacgagagctgcaggcggtag

SEQ ID NO: 266122 - DNA, 231 bp, Artificial Sequence
  derived and/or modified sequence
cttaaaatctcattcagcgaaacggccttagagacgacatatcaataccccagcgagtcgtcagttttagaagaattaggtccagagccggaagtaccgagtgccccaaatccacccgcagcccaaccagacgacgaggaggatgaagaagaactgctccttttgcagcccgagctccagggcggtttaagaacaaaggccctgatagttgatgagtcttgtcgcaggtag

SEQ ID NO: 266123 - DNA, 1111 bp, Artificial Sequence
  derived and/or modified sequence
cttaagatctccttcagcgagacagccctggagaccacgtaccaatacccctccgagagttcggtactggaggagctgggcccggagcctgaggtccccagtgcccccaaccctccagcagcccaacccgacgacgaagaggatgaggaagagctgctgctgctgcagccagagctccagggcgggctgcgcaccaaggccctgattgtggatgagtcctgccggcggtgaccatcttccaacatagggatatacctccctccttcttataactgaagatcctggagcccggaagattcagggcagacagaccctgataatgagcctggcagggaagggcaaccaacatcttgtaacttgctttccccaccctgtttctgggggcagagccaattgcccaatttctaccctaatccaaagtccctggtgtgggtggggttaaacgtgctggtgcatcctaggtcatccaagagtgagcgccaagtcctgagaaggggcacagaactccctggagggtggagatggagcacctgccccccatggcagggtacactctccccacagccttcctccccaccatcccgtggggactctcgggatttaagcactcgtctctctgggaggcccagaccccactccatttataggcacatctccttcatttcctaggtcactgcccctttgtttacagctcctgcctcctcccttgaccacagcctggtttacaaattccatcagctcccagccccacctgccaaagtcccaggtttacaagccacgcttacttgctgtgtctgcgtggaattctctcctctgtcccctccagtctcctcattggagtgacctgaaggtgtggcttcctccactttttctcagtattactttgccttagttttccccaagagggaaggctggaactcttaactctgtaccccttgatagttatttaattctgtttctcctagtggttcacaattgaactgaattgagatggtgtcgggtggctaaggagacacctcacctctccttccccattgtgccgcctttatcaattgcctgttttgttttgtttgttttttaactttccataataaaatggagttctcttcaa

SEQ ID NO: 266124 - protein, 255 aa, Artificial Sequence
  derived and/or modified sequence
MILNKALMLGALALTTVMSPCGGEDIVADHVASYGVNLYQSYGPSGQYSHEFDGDEEFYVDLERKETVWQLPLFRRFRRFDPQFALTNIAVLKHNLNIVIKRSNSTAATNEVPEVTVFSKSPVTLGQPNTLICLVDNIFPPVVNITWLSNGHSVTEGVSETSFLSKSDHSFFKISYLTFLPSDDEIYDCKVEHWGLDEPLLKHWEPEIPTPMSELTETVVCALGLSVGLVGIVVGTVLIIRGLRSVGASRHQGPL

SEQ ID NO: 266125 - DNA, 768 bp, Artificial Sequence
  derived and/or modified sequence
atgatattaaacaaggcattgatgcttggggctctggctttaaccaccgtgatgtctccatgtggaggggaagatatagtcgcagaccacgtggcatcatacggagtaaacctttaccagtcttacgggccttcaggccagtactcccatgaattcgatggggacgaggaattttacgtggacttagaacggaaggaaaccgtgtggcagttaccactgttcaggagattccggcgtttcgacccccagttcgccttgactaatatcgctgtcctgaaacataacctgaatatagtaatcaaacgcagcaacagcactgcagcaacaaacgaggtgcccgaagtgaccgttttctccaaatctccagttaccctgggacaacctaacacccttatttgccttgtcgataacatctttccccctgtcgtcaacattacttggctttccaatggacatagtgtgactgaaggcgtgtctgaaacgagctttctttccaagagtgaccactctttttttaagatctcctacctgacttttctaccaagtgatgacgagatttacgattgtaaggttgaacattggggactagacgaaccactgttgaaacactgggagcccgagattccaactcccatgtcagagcttactgagactgtggtgtgtgctctgggcttgtctgtcgggttggtgggcattgtggtgggcacagtgctgatcatccgaggattgcgttctgtgggcgcctcacgccaccaaggacccctctag

SEQ ID NO: 266126 - DNA, 768 bp, Artificial Sequence
  derived and/or modified sequence
atgattctgaataaggctcttatgctgggagcactggctctgactactgtgatgtctccctgcgggggtgaggacattgtagcagaccatgtagcctcctacggggttaatctttaccagagctatggacctagtggccagtactcacacgaattcgatggagatgaggagttctacgtcgatctcgaacgcaaggagacagtgtggcagcttccgctcttccgcagattccgccgattcgacccccaattcgccctgaccaacatcgcagtgctcaagcataatctcaacatcgtgattaagaggtccaacagcactgctgcgacaaacgaagtgccagaagtgacagttttttctaaaagccctgtaacgttgggacagccaaatacactgatttgccttgtggacaacatattcccccctgttgtcaatatcacctggctcagcaatggccacagcgttactgaaggggtcagtgaaacctcattcctgtcaaagagcgatcactctttctttaaaatctcttacctaacattcttaccaagcgacgatgaaatctatgattgcaaggttgaacactgggggctggatgaaccactgctcaagcattgggaacccgagatccctactcccatgtctgagctaacagagactgtggtgtgcgcactagggctttccgtcggtctggtcgggattgtcgtgggaaccgtcctaataatcagggggctgcggtctgtgggcgcctcccggcaccagggaccactttag

SEQ ID NO: 266127 - DNA, 768 bp, Artificial Sequence
  derived and/or modified sequence
atgatactgaacaaggctttgatgttaggggctcttgcgctgaccactgtcatgtccccctgtggcggagaggatatcgtcgcagaccatgtggcaagctacggcgtgaacttgtaccagtcctacggcccatccggacaatattcccatgagtttgacggggacgaggaattttacgtggatctggaaagaaaggagacagtgtggcagctaccgctatttcggagatttcgccggttcgatccccagttcgctctcaccaatattgctgtcctgaaacataacctgaatatcgttatcaaacgctcaaactccaccgcggctactaacgaggtacccgaggtgaccgtgtttagtaagagccccgtgacccttggccagcccaacacactgatctgcctcgttgacaacatcttccccccggtggtgaacattacctggctctccaacggccactctgtgaccgaaggggtctccgaaacatcattcttaagcaagtctgatcactcttttttcaagatcagttacctcacttttcttccgtcggacgatgagatttatgattgtaaagtcgagcactggggtctggatgagcctctgctcaaacactgggagccagagattcccacacccatgtctgaactgaccgagacagtggtctgtgcgctgggtctttcagtgggtctcgttggaatagtagtgggaactgtactgatcataagagggttgcgttcagtgggagcctcacggcaccaggggcccctgtag

SEQ ID NO: 266128 - DNA, 768 bp, Artificial Sequence
  derived and/or modified sequence
atgatcctcaacaaagccctaatgctcggtgctctcgcactgacgaccgtcatgagtccctgcggtggcgaggacattgtcgctgatcacgtagcgagctatggagtgaatctataccaatcctatggccccagtggccagtattcgcacgaatttgatggggatgaggagttttatgttgacctggaaaggaaagagaccgtgtggcagctgccacttttccgacgctttaggcgttttgacccacaattcgctctgacaaatattgcagtgctgaaacataatctgaatattgtgataaagcgctctaatagtaccgctgccaccaatgaggtacccgaggttacggtcttctcaaaaagtcccgttacattaggacagcctaatactctaatttgtcttgtggataatatttttccccctgtggtcaatataacatggctgtccaatggtcacagtgtcacagagggggtctcggagacttctttcctgagcaagtctgaccacagcttctttaagatctcctacttaacctttctccctagtgacgatgagatctatgattgtaaggtggaacactgggggctggacgaaccgctcctgaagcactgggaacccgagatccccacccccatgagcgagcttacggaaacagtggtgtgtgctctcggcctgagcgtgggcctggtggggatcgttgtgggcaccgtgctgattatccgcgggctgcgcagtgtgggcgcctcacggcaccaaggtccactctag

SEQ ID NO: 266129 - DNA, 768 bp, Artificial Sequence
  derived and/or modified sequence
atgatcctgaacaaggccctgatgctgggcgccctggccctgaccaccgtgatgagcccctgtggcggggaggacatcgtggccgaccacgtggccagctatggagtgaacctgtaccagagctatggccccagcggccagtacagccatgaatttgatggagatgaggagttctacgtggacctggagaggaaggagaccgtgtggcagctgcccctcttccgccgcttccgccgctttgacccccagtttgccctgaccaacattgctgtgctgaagcacaacctgaacatcgtcatcaagaggagcaacagcacagctgccaccaatgaggtgcctgaggtgaccgtcttcagcaagagccctgtgaccctgggccagcccaacaccctcatctgcctggtggacaacatcttcccccctgtggtgaacatcacctggctgagcaatggccacagcgtgacagaaggagtgtctgagaccagcttcctgagcaagagtgaccacagcttcttcaagatctcctacctgaccttcctgcccagtgatgatgagatctatgactgcaaggtggagcactggggcctggatgagcccctgctgaagcactgggagcctgagatccccacccccatgtctgagctgacagagaccgtggtgtgtgccctgggcctgtctgtgggcctggtgggcatcgtggtgggcaccgtgctgatcatccggggcctgcggtctgtgggcgccagccgccaccagggccccctgtag

SEQ ID NO: 266130 - DNA, 1001 bp, Artificial Sequence
  derived and/or modified sequence
aacagcaactgctgaggctgccttgggaagaggatgatcctaaacaaagctctgatgctgggggccctcgccctgaccaccgtgatgagcccttgtggaggtgaagacattgtggctgaccatgttgcctcttacggtgtaaacttgtaccagtcttatggtccctctgggcagtacagccatgaatttgatggagacgaggagttctatgtggacctggagaggaaggagactgtctggcagttgcctctgttccgcagatttagaagatttgacccgcaatttgcactgacaaacatcgctgtgctaaaacataacttgaacatcgtgattaaacgctccaactctaccgctgctaccaatgaggttcctgaggtcacagtgttttccaagtctcccgtgacactgggtcagcccaacaccctcatctgtcttgtggacaacatctttcctcctgtggtcaacatcacctggctgagcaatgggcactcagtcacagaaggtgtttctgagaccagcttcctctccaagagtgatcattccttcttcaagatcagttacctcaccttcctcccttctgatgatgagatttatgactgcaaggtggagcactggggcctggatgagcctcttctgaaacactgggagcctgagattccaacacctatgtcagagctcacagagactgtggtctgcgccctggggttgtctgtgggcctcgtgggcattgtggtggggaccgtcttgatcatccgaggcctgcgttcagttggtgcttccagacaccaagggcccttgtgaatcccatcctgaaaaggaaggtaagattgagatttgttagagctgaagctgcaggaaggaaagtgggaggaggctgtggacatgaatgtggttgaaagttgtaggggaattgggaagtggcatgatgatgacacaggagcccccttggacccatcgatctcatgtctgtcctgttgcaggtgcatcaccatctacagcag

SEQ ID NO: 266131 - DNA, 1548 bp, Artificial Sequence
  derived and/or modified sequence
acaattgctctacagctcagaacagcaactgctgaggctgccttgggaagaggatgatcctaaacaaagctctgatgctgggggccctcgccctgaccaccgtgatgagcccttgtggaggtgaagacattgtggctgaccatgttgcctcttacggtgtaaacttgtaccagtcttatggtccctctgggcagtacagccatgaatttgatggagacgaggagttctatgtggacctggagaggaaggagactgtctggcagttgcctctgttccgcagatttagaagatttgacccgcaatttgcactgacaaacatcgctgtgctaaaacataacttgaacatcgtgattaaacgctccaactctaccgctgctaccaatgaggttcctgaggtcacagtgttttccaagtctcccgtgacactgggtcagcccaacaccctcatctgtcttgtggacaacatctttcctcctgtggtcaacatcacctggctgagcaatgggcactcagtcacagaaggtgtttctgagaccagcttcctctccaagagtgatcattccttcttcaagatcagttacctcaccttcctcccttctgatgatgagatttatgactgcaaggtggagcactggggcctggatgagcctcttctgaaacactgggagcctgagattccaacacctatgtcagagctcacagagactgtggtctgcgccctggggttgtctgtgggcctcgtgggcattgtggtggggaccgtcttgatcatccgaggcctgcgttcagttggtgcttccagacaccaagggcccttgtgaatcccatcctgaaaaggaaggtgcatcaccatctacagcagcggaagagtggacttgctacatgacctagcactattctctggcccgatttatcataccctttttctcctgcaaatgtttctcctcttaccttttctctgctttttttttcttaagcttctgtatcccctcagagctcacaaatgcctttgaattctttccctgacctcctgatttttttttcttttctcaggtgttacctactaagagatgcctggggtaagccgcccagctacctaattcctcagtaacatcgatctaaaatctccatggaagcaataaattccctttaagagatctatgtcaaatttttctatctttcatccggggctgactgaacctatggctaagaattgtgacactctcatgtttcaagccaatttcatctcatttcccagatcatatttcatatccagtaacacagaagcaaccaagtacaatatagcctgataatatgttgatttcttagctgacattaatatttctttcttctttgtgttctcacccttggcactgccgcccatccctcaattcaggcaacaatgaagttaatggatactctctgccctttgctcagaattgttatagcaaaaattttaaaaccaaaaaataagtttgtactaatttcaatatggcttttaaaagtatgatggagaaataaattaggataaaggaactttgaatcaca

SEQ ID NO: 266132 - DNA, 1206 bp, Artificial Sequence
  derived and/or modified sequence
ccctcacaattgctctacagctcagaacagcaactgctgaggctgccttgggaagaggatgatcctaaacaaagctctgatgctgggggccctcgccctgaccaccgtgatgagcccttgtggaggtgaagacattgtggctgaccatgttgcctcttacggtgtaaacttgtaccagtcttatggtccctctgggcagtacagccatgaatttgatggagacgaggagttctatgtggacctggagaggaaggagactgtctggcagttgcctctgttccgcagatttagaagatttgacccgcaatttgcactgacaaacatcgctgtgctaaaacataacttgaacatcgtgattaaacgctccaactctaccgctgctaccaatgaggttcctgaggtcacagtgttttccaagtctcccgtgacactgggtcagcccaacaccctcatctgtcttgtggacaacatctttcctcctgtggtcaacatcacctggctgagcaatgggcactcagtcacagaaggtgtttctgagaccagcttcctctccaagagtgatcattccttcttcaagatcagttacctcaccttcctcccttctgatgatgagatttatgactgcaaggtggagcactggggcctggatgagcctcttctgaaacactgggagcctgagattccaacacctatgtcagagctcacagagactgtggtctgcgccctggggttgtctgtgggcctcgtgggcattgtggtggggaccgtcttgatcatccgaggcctgcgttcagttggtgcttccagacaccaagggcccttgtgaatcccatcctgaaaaggaagggctgactgaacctatggctaagaattgtgacactctcatgtttcaagccaatttcatctcatttcccagatcatatttcatatccagtaacacagaagcaaccaagtacaatatagcctgataatatgttgatttcttagctgacattaatatttctttcttctttgtgttctcacccttggcactgccgcccatccctcaattcaggcaacaatgaagttaatggatactctctgccctttgctcagaattgttatagcaaaaattttaaaaccaaaaaataagtttgtactaatttcaatatggcttttaaaagtatgatggagaaataaattaggataaaggaactttgaatcaca

SEQ ID NO: 266133 - DNA, 1385 bp, Artificial Sequence
  derived and/or modified sequence
ggcagggtttggtttgggtgtcttcagatttccttgtcttgaggccctcacaattgctctacagctcagaacagcaactgctgaggctgccttgggaagaggatgatcctaaacaaagctctgatgctgggggccctcgccctgaccaccgtgatgagcccttgtggaggtgaagacattgtggctgaccatgttgcctcttacggtgtaaacttgtaccagtcttatggtccctctgggcagtacagccatgaatttgatggagacgaggagttctatgtggacctggagaggaaggagactgtctggcagttgcctctgttccgcagatttagaagatttgacccgcaatttgcactgacaaacatcgctgtgctaaaacataacttgaacatcgtgattaaacgctccaactctaccgctgctaccaatgaggttcctgaggtcacagtgttttccaagtctcccgtgacactgggtcagcccaacaccctcatctgtcttgtggacaacatctttcctcctgtggtcaacatcacctggctgagcaatgggcactcagtcacagaaggtgtttctgagaccagcttcctctccaagagtgatcattccttcttcaagatcagttacctcaccttcctcccttctgatgatgagatttatgactgcaaggtggagcactggggcctggatgagcctcttctgaaacactgggagcctgagattccaacacctatgtcagagctcacagagactgtggtctgcgccctggggttgtctgtgggcctcgtgggcattgtggtggggaccgtcttgatcatccgaggcctgcgttcagttggtgcttccagacaccaagggcccttgtgaatcccatcctgaaaaggaaggtgttacctactaagagatgcctggggtaagccgcccagctacctaattcctcagtaacatcgatctaaaatctccatggaagcaataaattccctttaagagatctatgtcaaatttttctatctttcatccggggctgactgaacctatggctaagaattgtgacactctcatgtttcaagccaatttcatctcatttcccagatcatatttcatatccagtaacacagaagcaaccaagtacaatatagcctgataatatgttgatttcttagctgacattaatatttctttcttctttgtgttctcacccttggcactgccgcccatccctcaattcaggcaacaatgaagttaatggatactctctgccctttgctcagaattgttatagcaaaaattttaaaaccaaaaaataagtttgtactaatttcaatatggcttttaaaagtatgatggagaaataaattaggataaaggaactttgaatcaca

SEQ ID NO: 266134 - DNA, 768 bp, Artificial Sequence
  derived and/or modified sequence
atgatcctgaacaaggccctgatgctgggcgccctggccctgaccaccgttatgtctccttgtggtggcgaggacatcgtcgccgaccatgtagccagctatggtgtaaatctctaccagtcttatggccctagcggtcagtacagccatgaatttgatggggacgaagagttttatgtcgatctggaacggaaggagaccgtgtggcagttgcccctcttccgacgcttccgcaggtttgatccacagttcgctttgactaatattgcagtgctgaagcataacctgaacatcgttataaaaagatccaactctaccgcggccacgaacgaagtaccagaggtgacggtcttttcaaagtctcccgtgacactcggtcagcctaacaccctgatctgccttgtggacaatatctttccacccgtcgtcaatatcacctggctatcaaacgggcactcggtaactgagggcgtatccgagacatcattcctgtctaagagcgatcattccttttttaaaatctcttatctcaccttcttaccctccgatgatgaaatctatgactgtaaagtggagcattggggactagatgaaccactcctcaagcactgggaacccgagattcctactcccatgtctgagcttacagaaaccgtcgtctgtgcacttggactatccgtgggcctggtcggcattgtagtgggcactgttctgattattcgcgggctacggagtgtgggagctagtcgtcatcagggcccattatag

SEQ ID NO: 266135 - DNA, 768 bp, Artificial Sequence
  derived and/or modified sequence
atgatcctgaacaaggccctgatgctgggcgccctggccctgaccacggtgatgtcaccctgtggaggggaggatatcgttgcagaccatgtagcttcctatggagtgaatctataccagagctacggcccctccggacagtatagccacgagttcgacggtgacgaggaattttacgtggatctggaacgcaaggagaccgtctggcagctccctttgttccgtcgcttccggcggttcgatccgcagttcgcgctgaccaacatagctgtcctcaaacacaatctgaacatagtcattaagcgctccaattcaaccgctgcgacgaatgaggtgcccgaggtcaccgtattcagcaagtctcctgttacacttggtcagcccaatactctgatttgtctcgtcgacaacattttcccaccggtagtcaacatcacttggctgtctaacggacactcagttacagaaggcgttagcgaaacttcttttctgagtaaatctgaccattctttcttcaagatcagctatctaactttccttccctccgatgacgaaatttacgactgtaaggtagagcattgggggctagacgaacccctgttgaagcattgggagcctgaaatccctacacccatgtccgagctcaccgagaccgtggtgtgtgcactgggcttaagtgtgggactggtaggaatcgtggtaggcaccgtcctcattatccgcggtttacgatcagtgggcgcatcccggcaccagggacccctgtag

SEQ ID NO: 266136 - DNA, 768 bp, Artificial Sequence
  derived and/or modified sequence
atgatcctgaacaaggccctgatgctgggcgccctggccctgaccacggtgatgtctccatgtgggggggaggatatcgtggctgatcacgtggccagttatggtgtgaacctgtaccagagttatgggccatctggccaatacagccacgaatttgatggcgatgaagaattttatgtagacctcgaaaggaaggagaccgtgtggcaactgccattgtttaggcggtttcgtagatttgacccacagttcgcgctcaccaacatagcagtcttaaagcacaatcttaacattgtaatcaagagaagcaatagtaccgccgcgaccaatgaggtgcctgaagttacggttttcagtaaatcaccagtgactctcggacagcccaacacacttatttgtttagttgataacattttccctcctgtggttaatatcacttggctctccaatggtcatagcgtgaccgagggagtctccgagacctccttcctgtcaaagtccgaccatagctttttcaagatctcttacctgactttccttccaagtgacgacgaaatctacgactgtaaggtggaacactggggtctggacgaaccacttctcaagcattgggagcctgaaattccgacccctatgtcggaactgactgaaacggtcgtctgtgctctgggactatctgtgggacttgtcggcattgtggtcggcacagtcttgattatacggggtctaagatctgttggtgcctcacgacatcaaggtccattatag

SEQ ID NO: 266137 - DNA, 768 bp, Artificial Sequence
  derived and/or modified sequence
atgatcctgaacaaggccctgatgctgggcgccctggccctgaccaccgtgatgtccccgtgtggcggcgaagatattgttgccgatcacgtggcttcgtatggggtgaacctttaccagtcatacggaccatcagggcagtactcccatgagtttgatggggatgaagaattctatgtggacctcgaaagaaaggagaccgtttggcagctgcccctgttcagacggtttagacgcttcgatcctcaattcgccctgactaatatcgcagtcttgaaacacaacctgaatattgtgatcaagagaagcaactctacagccgcaacaaatgaggtgccggaggtgacagtatttagcaagagccccgtgaccctgggacaacctaacacacttatatgccttgtcgacaacatcttcccaccggtcgtgaacattacttggttatcgaacggccactctgttactgagggcgtatcagagacctctttcttatcgaaatccgaccactcgtttttcaaaatcagctacctgacttttctgcctagcgacgatgagatatatgactgtaaggtggagcactggggactcgatgaaccgctcctcaaacattgggagccagagattccgacccccatgtccgagctgacagaaaccgtcgtttgtgcgctaggactgagcgttggcctggtgggcatcgtggtgggcacagtgctgatcatacgaggtcttcgaagtgttggcgcctcccggcatcagggtcccctctag

SEQ ID NO: 266138 - DNA, 768 bp, Artificial Sequence
  derived and/or modified sequence
atgattctgaacaaggcgcttatgctgggcgctctagccctaaccaccgtaatgagcccctgtgggggagaggacatcgtcgcagaccacgtcgcctcttacggggtgaatctgtatcagtcttatgggccttccggccagtactctcacgaatttgacggagatgaggaattctatgtggatttggaacgcaaggagactgtctggcaactgcctctgtttagacgatttagacggttcgacccgcagttcgccctgaccaacatcgctgtcctgaagcacaacctcaacatcgttataaagaggtctaactcgaccgcagccacgaatgaggtaccggaagtcacagtgttcagcaagtctcccgtgacactggggcagccgaataccctaatatgtttggtggataacatttttcccccagtagtgaacattacatggctgagtaatgggcactcagtgactgagggggttagcgagacatcatttctgtccaagagcgaccatagctttttcaagatatcatatctcacctttctgccgtctgacgatgaaatctatgattgtaaagtggaacattgggggctcgacgaaccacttctgaaacattgggagcctgagatcccaaccccgatgagtgaactcacggagactgtcgtatgcgcacttgggctgagtgttgggctggtgggcattgtcgtgggcacagtgcttattattaggggcctgcgcagcgtcggcgcaagtaggcaccaggggcctttgtag

SEQ ID NO: 266139 - DNA, 768 bp, Artificial Sequence
  derived and/or modified sequence
atgattcttaataaagcgctcatgttgggagcactggctctgacaaccgtgatgtcaccttgcggcggtgaggatattgtggctgaccatgtggctagctatggggtcaacctatatcaatcgtatggacctagcggacaatattcccatgagtttgacggtgacgaggaattttatgtggatttagagcggaaggagactgtgtggcagctgccactttttagaagattcaggaggtttgatccccagttcgccctgacgaacattgctgtgctcaagcataaccttaatatcgtgatcaaacggtctaacagcactgcggctactaacgaagtgccagaagtgaccgttttttcaaaatcgcccgtaactctgggccagcctaacaccctcatctgcctggtagataatatcttcccccctgtggtgaacattacgtggctgtcaaatggccacagcgttacggaaggtgttagtgaaacctctttcttgtccaaaagcgaccactccttctttaagatctcttatctaacatttctcccgagcgatgacgagatctatgattgtaaagtcgaacattggggactcgacgagcccctactcaaacactgggagccagagatccctactcctatgtctgagctcacggagacagtcgtgtgcgccctgggcctatctgtcggcttggtgggaatcgtcgtgggaaccgtgcttattattcggggtctccgctccgtcggcgcttcgcgtcaccaggggccactgtag

SEQ ID NO: 266140 - DNA, 768 bp, Artificial Sequence
  derived and/or modified sequence
atgatcttgaacaaagcattgatgttgggcgcattagcactaacgacagtgatgtctccttgcggaggggaggacatagtcgccgaccatgtcgccagctacggagtcaatttatatcagtcttacggcccatcaggacaatactcccatgagttcgacggagatgaagagttctacgtagatttggaacggaaagagaccgtatggcagctgccactgttccgcagattcaggaggtttgacccccagtttgccctgacaaacatcgcagtattaaagcacaacctcaatatcgtcatcaagaggtccaattctacagccgcaaccaacgaggtccccgaagtgaccgtgtttagcaaatcccctgtgaccctcggtcaacccaacacactgatctgcttggtggataacattttcccaccggtagtcaatattacttggctatccaatggacattccgtgacagagggtgtctcggagacatcttttctcagcaagtcggatcattctttctttaagatctcatatctgacctttcttccgagtgatgacgagatctacgactgcaaggtcgagcactggggtctggacgaaccactgttaaaacattgggaaccagaaatcccaacaccgatgagcgagctaaccgaaactgtggtttgtgcactagggctttctgtggggctggttgggatcgtcgtgggaaccgtactgatcatccgtgggttacgatccgtgggcgcatcacggcatcaagggccactttag

SEQ ID NO: 266141 - DNA, 768 bp, Artificial Sequence
  derived and/or modified sequence
atgatattgaacaaggcattgatgctgggcgcactagccttgacaacggtgatgtccccctgcggcggtgaggacatcgtggccgatcacgttgcctcttacggtgtgaacctctaccagtcttacggccctagtggccaatactcccatgagtttgatggggatgaagagttctacgtcgacctggaaaggaaagaaacagtatggcagctgcctctgtttcgaaggtttcggcgatttgatccccaatttgccctgaccaatatagcagtgctgaagcacaacctcaacattgtaattaaacggtcaaactccactgcggctacaaatgaagtccccgaggtgacggttttctccaaaagccctgtgacattagggcagcctaacactctgatttgtctggtcgataacattttcccacctgtcgtgaacatcacatggttgtccaacgggcacagcgtcacagaaggcgtaagcgagaccagtttcctcagtaaatccgatcacagtttcttcaaaatcagctatttaactttcctgccttcagatgatgagatctacgactgtaaggtggaacattggggcttggatgagccgctactcaagcactgggaacccgagattcccacaccaatgtcggaactgactgaaaccgtcgtgtgtgctctcggattatcagtgggattggtcggtattgtggtcgggactgttctgatcatcaggggcttacggagtgtcggggcaagccgacaccaagggcctctatag

SEQ ID NO: 266142 - DNA, 768 bp, Artificial Sequence
  derived and/or modified sequence
atgatcctgaacaaggccctgatgctgggcgccctggccctgaccaccgtgatgagcccctgcggcggcgaggacatcgtggccgaccacgtggccagctacggcgtgaacctgtaccagagctacggccccagcggccagtacagccacgagttcgacggcgacgaggagttctacgtggacctggagagaaaggagaccgtgtggcagctgcccctgttcagaagattcagaagattcgacccccagttcgccctgaccaacatcgccgtgctgaagcacaacctgaacatcgtgatcaagagaagcaacagcaccgccgccaccaacgaggtgcccgaggtgaccgtgttcagcaagagccccgtgaccctgggccagcccaacaccctgatctgcctggtggacaacatcttcccccccgtggtgaacatcacctggctgagcaacggccacagcgtgaccgagggcgtgagcgagaccagcttcctgagcaagagcgaccacagcttcttcaagatcagctacctgaccttcctgcccagcgacgacgagatctacgactgcaaggtggagcactggggcctggacgagcccctgctgaagcactgggagcccgagatccccacccccatgagcgagctgaccgagaccgtggtgtgcgccctgggcctgagcgtgggcctggtgggcatcgtggtgggcaccgtgctgatcatcagaggcctgagaagcgtgggcgccagcagacaccagggccccctgtag

SEQ ID NO: 266143 - protein, 140 aa, Artificial Sequence
  derived and/or modified sequence
GPPEQSLLLTEAWSWASKKKQPHLFSGVIVGGHLWLLGFSPGAGGFCTTLPPSFLRVDDRATSSTTDSSRAPSSPRPPGSTSHCGISTRCTERCLCVLPLRTSQVPDVMAPQHDQEPKRRMYFIWLGWIPSDKPSQLTER

SEQ ID NO: 266144 - protein, 66 aa, Artificial Sequence
  derived and/or modified sequence
  misc_feature (1)..(1): Xaa can be any naturally occurring amino acid
XQPQGPPEQSLLLTEAWSWASKKKQPHLFSGVIVGGHLWLLGPKRRMYFIWLGWIPSDKPSQLTER

SEQ ID NO: 266145 - DNA, 423 bp, Artificial Sequence
  derived and/or modified sequence
ggacccccagaacaatccctactcctcacggaggcttggagttgggccagcaagaaaaaacagccccacctgttcagcggcgtgatagtcggtggccatctctggttgctaggcttttcacctggggctggaggcttctgcaccacactgccgccttcctttctgagggtggatgaccgggccacctcatcaacaaccgattctagccgcgctccctcaagtcccaggccgccagggagcacttctcactgcggaattagtacacgatgtacagagaggtgtctctgcgtcctccctctgaggacttcccaagtgcctgacgttatggctccacagcacgatcaggaaccaaaaaggcgcatgtacttcatttggttgggctggatacccagcgataagccttctcaactgactgagcggtag

SEQ ID NO: 266146 - DNA, 201 bp, Artificial Sequence
  derived and/or modified sequence
tgacagccccaggggcctccagaacagtcactgctgctgacggaggcttggtcatgggccagtaaaaaaaaacagcctcaccttttttctggcgttatcgtgggtggacacttgtggctgttgggacccaaacgccgtatgtatttcatctggcttggctggatcccgagcgataagccctctcagttgactgaacgttag

SEQ ID NO: 266147 - DNA, 423 bp, Artificial Sequence
  derived and/or modified sequence
ggccccccagagcagagcctgctgctgacagaggcctggagctgggccagcaagaagaagcagccccacctgttcagcggcgtgattgtgggcggccacctgtggctgctgggcttcagccctggagctgggggcttctgcaccaccctgcccccatccttcctgcgggtggatgaccgggccaccagcagcaccacagacagcagccgggcccccagcagccccaggcctcctggcagcaccagccactgcggcatcagcacccgctgcacagagcgctgcctgtgtgtgctgcccctgcggaccagccaggtgcctgatgtgatggccccccagcacgaccaggagcccaagaggaggatgtacttcatctggctgggctggatccccagcgacaagcccagccagctgacagagaggtag

SEQ ID NO: 266148 - DNA, 201 bp, Artificial Sequence
  derived and/or modified sequence
tgacagccccagggccccccagagcagagcctgctgctgacagaggcctggagctgggccagcaagaagaagcagccccacctgttcagcggcgtgattgtgggcggccacctgtggctgctgggccccaagaggaggatgtacttcatctggctgggctggatccccagcgacaagcccagccagctgacagagaggtag

SEQ ID NO: 266149 - DNA, 423 bp, Artificial Sequence
  derived and/or modified sequence
ggcccccccgagcagagcctgctgctgaccgaggcctggagctgggcatctaaaaaaaagcagccgcatctgttttcaggtgtgatcgtgggtggtcacttatggctcctggggtttagccctggtgctggcggattctgcactactcttccccccagcttcttgcgggtggacgatagggccacctcctccaccaccgactcctctcgagccccttcttcaccgcgccctcctggaagcacgtcgcactgcggtatctctaccaggtgcaccgagagatgcctctgcgtactgcccctgaggacctctcaggtccctgatgtaatggcacctcagcacgatcaggagccaaagcggcgcatgtatttcatttggctaggatggattccatctgataagcctagtcagttaacggaacgctag

SEQ ID NO: 266150 - DNA, 201 bp, Artificial Sequence
  derived and/or modified sequence
tgacagccccagggcccccccgagcagagcctgctgctgaccgaggcctggagctgggcttctaaaaaaaaacagcctcacctcttctcaggcgttattgttggggggcacctctggctccttgggcccaaacgccgaatgtattttatctggctgggttggatccccagcgataaaccctctcagcttacagagcggtag

SEQ ID NO: 266151 - DNA, 423 bp, Artificial Sequence
  derived and/or modified sequence
ggtccacccgagcagtcccttctgctgacagaggcttggagttgggcatcgaagaaaaaacagccgcacctgttctcaggagtgatcgttggcggacacttgtggttattgggtttttcccccggtgcaggcggattttgcacaaccctgccgcctagctttttaagggtcgatgatcgtgccacttctagtactaccgatagttcgcgcgcaccctctagtcctagaccaccagggagcaccagtcactgcgggattagtacgagatgcactgagcgctgcctatgcgtcttgccgctacggaccagtcaggtgcccgatgtgatggcccctcagcatgaccaagaacctaaacgacgaatgtattttatctggctcgggtggatcccgtcggataaaccaagccaactaactgagcgatag

SEQ ID NO: 266152 - DNA, 201 bp, Artificial Sequence
  derived and/or modified sequence
tgacaaccccagggccctcctgagcagtccttattgctgacagaggcctggtcttgggctagtaagaagaaacagccccacctcttctccggcgtgattgtgggcggtcatctatggttgttgggtccgaaaagaaggatgtactttatatggcttggttggattcccagcgataagccttcacagctgaccgagcggtag

SEQ ID NO: 266153 - DNA, 688 bp, Artificial Sequence
  derived and/or modified sequence
gggccacccgaacagtctctcctcctcacagaagcctggagctgggcatccaagaagaagcagcctcatttgttttctggtgtcatcgtaggtggccacctatggcttttgggcttctcacctggggcgggtgggttctgcaccaccctcccaccctccttcctccgtgtggacgatagagccacatccagcaccacggacagctcccgggcgccttcatctcctcgtcctccaggcagcacaagccattgtggaatctccaccaggtgtacagaacggtgcctctgcgtcctgccactcaggacctctcaagtccccgatgtgatggctcctcagcatgatcaggaaccaaaaagaagaatgtacttcatctggttgggctggattccctctgataagccttcccagttgactgaaagatgaggctaggctctagcaagttgaagtcaaaccagctccttcaagaagctttgagcagaatgaagtggggaggacccagcttccagcccaggaagcccactgtacctggagccatctgggataagactttgacccatgactcccatatccacagcctgtccatcctagcccatcccagtttatcctgtatcatttgagctgggattcccacatcctctgagttggaagtcccatctcaagtcttcaataaagactcttgaatattgaa

SEQ ID NO: 266154 - DNA, 423 bp, Artificial Sequence
  derived and/or modified sequence
ggcccccccgagcagagcctgctgctgaccgaggcctggagctgggccagcaagaagaagcagccccacctgttcagcggcgtgatcgtgggcggccacctgtggctgctgggcttcagccccggcgccggcggcttctgcaccaccctgccccccagcttcctgagagtggacgacagagccaccagcagcaccaccgacagcagcagagcccccagcagccccagaccccccggcagcaccagccactgcggcatcagcaccagatgcaccgagagatgcctgtgcgtgctgcccctgagaaccagccaggtgcccgacgtgatggccccccagcacgaccaggagcccaagagaagaatgtacttcatctggctgggctggatccccagcgacaagcccagccagctgaccgagagatag

SEQ ID NO: 266155 - DNA, 201 bp, Artificial Sequence
  derived and/or modified sequence
tgacagccccagggcccccccgagcagagcctgctgctgaccgaggcctggagctgggccagcaagaagaagcagccccacctgttcagcggcgtgatcgtgggcggccacctgtggctgctgggccccaagagaagaatgtacttcatctggctgggctggatccccagcgacaagcccagccagctgaccgagagatag

SEQ ID NO: 266156 - DNA, 1275 bp, Artificial Sequence
  derived and/or modified sequence
atggtgcagaccctgtactacagcgccgaccacaagctgctggacggcaacctgctggacggccaggccgaggtgttcggcagcgacgacgaccacatccagttcgtgcagaagaagccccccagagagaacggccacaagcagatcagcagcagcagcaccggctgcctgagcagccccaacgccaccgtgcagagccccaagcacgagtggaagatcgtggccagcgagaagaccagcaacaacacctacctgtgcctggccgtgctggacggcatcttctgcgtgatcttcctgcacggcagaaacagcccccagagcagccccaccagcacccccaagctgagcaagagcctgagcttcgagatgcagcaggacgagctgatcgagaagcccatgagccccatgcagtacgccagaagcggcctgggcaccgccgagatgaacggcaagctgatcgccgccggcggctacaacagagaggagtgcctgagaaccgtggagtgctacaacccccacaccgaccactggagcttcctggcccccatgagaacccccagagccagattccagatggccgtgctgatgggccagctgtacgtggtgggcggcagcaacggccacagcgacgacctgagctgcggcgagatgtacgacagcaacatcgacgactggatccccgtgcccgagctgagaaccaacagatgcaacgccggcgtgtgcgccctgaacggcaagctgtacatcgtgggcggcagcgacccctacggccagaagggcctgaagaactgcgacgtgttcgaccccgtgaccaagctgtggaccagctgcgcccccctgaacatcagaagacaccagagcgccgtgtgcgagctgggcggctacctgtacatcatcggcggcgccgagagctggaactgcctgaacaccgtggagagatacaaccccgagaacaacacctggaccctgatcgcccccatgaacgtggccagaagaggcgccggcgtggccgtgctgaacggcaagctgttcgtgtgcggcggcttcgacggcagccacgccatcagctgcgtggagatgtacgaccccaccagaaacgagtggaagatgatgggcaacatgaccagccccagaagcaacgccggcatcgccaccgtgggcaacaccatctacgccgtgggcggcttcgacggcaacgagttcctgaacaccgtggaggtgtacaacctggagagcaacgagtggagcccctacaccaagatcttccagttctag

SEQ ID NO: 266157 - DNA, 1275 bp, Artificial Sequence
  derived and/or modified sequence
atggtccaaactttgtattattccgcagaccacaaacttctggatggcaacctgctcgacggccaagccgaggtctttggctccgacgacgatcatattcagttcgttcagaagaaacccccaagggaaaatggtcacaaacagatctcatctagcagtaccggatgtttgagctctcccaatgctacggtgcaaagccctaagcacgagtggaaaatcgtggcatcagagaagacttctaacaatacctatctctgcctggcagttttagacggcatcttttgtgttatctttctgcacggcaggaactctccacagagctccccaacaagcacaccaaaattaagtaagtccctttccttcgagatgcagcaggacgagctgatagaaaagcctatgagccctatgcagtatgcacgatcaggcctcggcacggccgagatgaatggcaaactgattgctgctggcggctacaatagggaggaatgcctcaggactgtggagtgctataacccccatactgatcactggagcttcttggcccccatgagaacaccaagagcccggttccaaatggccgtgctgatggggcaattgtatgtggttggtggatccaatggccattcagatgatttatcttgcggggagatgtacgactcgaatatcgacgactggatccctgttcccgagcttcgaactaatcgctgcaatgccggcgtctgcgctcttaacgggaagctttatattgtgggagggtccgacccatatggacagaagggcctcaagaactgtgatgtgtttgatcccgtgacaaaactgtggacgagttgcgcaccgctcaacatccgtagacatcaaagcgcagtctgtgagctgggcggctacctctacattatagggggcgccgaatcctggaactgtttaaacacagtcgaaagatataatccggagaacaatacctggaccctcatagcccctatgaatgtcgctcgcagaggcgctggggtagccgtgctcaacggtaagctattcgtatgcggcggattcgacggttcacatgcgataagttgcgttgagatgtatgatccgaccaggaacgagtggaagatgatgggaaacatgacctcgccccgaagtaatgcgggcatcgcaaccgtgggaaacacaatttacgcggtgggaggcttcgatggcaatgagtttctcaacaccgtggaagtgtacaacctggaatcaaacgagtggtccccttacactaaaatcttccagttttag

SEQ ID NO: 266158 - DNA, 1275 bp, Artificial Sequence
  derived and/or modified sequence
atggtgcagaccctgtactacagcgctgaccacaagctgctggatggcaacctgctggatggccaggccgaggtgtttggaagtgatgatgaccacatccagtttgtgcagaagaagcccccaagagaaaatggccacaagcagatcagcagcagcagcacaggctgcctgagcagccccaatgccaccgtgcagagccccaagcatgagtggaagatcgtggccagcgagaagaccagcaacaacacctacctgtgcctggccgtgctggatggcatcttctgtgtgatcttcctgcacggcaggaacagcccccagagcagccccaccagcacccccaagctgagcaagagcctgagctttgagatgcagcaggatgagctgattgagaagcccatgagccccatgcagtatgcccggagcggcctgggcacagctgagatgaatggcaagctgattgctgctgggggctacaaccgggaggagtgcctgaggacagtggagtgctacaacccccacacagaccactggagcttcctggcccccatgaggaccccccgggcccgcttccagatggctgtgctgatgggccagctgtatgtggtgggcggcagcaatggccacagtgatgacctgagctgtggggagatgtatgacagcaacattgatgactggatccctgtgcctgagctgcggaccaaccgctgcaatgctggggtgtgtgccctgaatggcaagctgtacatcgtgggcggcagtgacccctacggccagaagggcctgaagaactgtgatgtgtttgatcctgtgaccaagctgtggaccagctgtgcccccctgaacatcagaagacaccagagcgctgtgtgtgagctgggcggctacctgtacatcattggaggagctgagagctggaactgcctgaacacagtggagcgctacaaccctgagaacaacacctggaccctcatcgcccccatgaatgtggccaggagaggagctggggtggccgtgctgaatggcaagctgtttgtgtgtggcggctttgatggcagccacgccatcagctgtgtggagatgtatgaccccaccagaaatgagtggaagatgatgggcaacatgaccagccccaggagcaatgccggcatcgccaccgtgggcaacaccatctatgctgtgggcggctttgatggaaatgagttcctgaacacagtggaggtgtacaacctggagagcaatgagtggagcccctacaccaagatcttccagttctag

SEQ ID NO: 266159 - DNA, 1275 bp, Artificial Sequence
  derived and/or modified sequence
atggtgcagaccctgtactacagcgccgaccacaagctgctggacggcaaccttctggatggtcaagctgaagttttcgggagcgacgatgatcatattcaatttgtgcagaagaagcccccgcgcgaaaatggtcacaagcagatttcttcaagcagcacagggtgcttgtcatcgcccaacgctactgtacagagtcccaagcacgaatggaagatagttgcctcagaaaaaactagtaacaacacctacctctgcctggcggtgcttgatgggatcttttgtgtgatattcttgcacggacggaactctccccaaagctccccgaccagtaccccaaagctgtccaagtctttgtcctttgagatgcaacaggacgaattgattgagaagcccatgtcacctatgcaatatgctcggagtggattaggaaccgccgagatgaatggaaagctaatcgccgctggcggctataacagggaagagtgtctgaggactgtggaatgttataacccccatacagaccattggagctttttggctccaatgagaaccccaagagctcgcttccagatggccgtgctgatgggccagctttatgtggtgggcggcagtaacggccactcggacgacctaagctgtggcgagatgtacgactcgaacatagacgactggatacctgtcccagaattgcgcactaataggtgtaatgccggtgtgtgtgccctaaacgggaagttatatatcgtcggaggctcggatccttacgggcaaaagggcctcaagaactgtgacgtgttcgacccagtaacgaagctgtggacatcctgtgctcctttaaatatccgtcgccatcagagcgccgtttgtgagctgggaggctatctttatatcataggtggggccgaatcttggaactgcctgaacaccgtagagcgatataatcctgagaacaatacctggaccttaatcgccccaatgaatgtggccaggcggggcgcaggggtggcggtgctcaatggaaagctatttgtgtgtggtgggtttgacggttcgcatgctatcagctgcgtggagatgtacgaccctacgcgcaatgaatggaaaatgatgggcaatatgacgtcaccaagatcaaacgccggcatcgcgaccgtgggaaacactatctatgctgttggcggctttgacgggaacgaattcctcaacacagtggaagtctacaatctggagtctaatgagtggtctccctacacaaaaatattccaattctag

SEQ ID NO: 266160 - DNA, 1275 bp, Artificial Sequence
  derived and/or modified sequence
atggtgcagactctgtattactccgcagaccataagctcctggatggtaatctgttggacggacaggcagaggtgtttgggagtgatgacgaccacatacagtttgtgcagaagaagcccccacgtgaaaatggccataagcagatttccagctccagcacaggatgcctgtcctctccaaacgctactgtgcaatctcccaagcacgagtggaagatagtggcctcggaaaagacatctaataacacttatctgtgtcttgcagtgctggacggaattttttgcgttattttcctccatggcaggaatagcccccagtcgtctcccacctctaccccaaaactgagcaaaagtctatcctttgaaatgcagcaggacgagttgatagagaaaccaatgtctcctatgcaatatgctcggagcggcctggggacagctgaaatgaatggtaagcttatagccgctggcggatataacagagaggagtgtctgaggacagtggagtgttacaacccacatactgaccactggtcttttctcgcacccatgcgaactccaagggcacgttttcagatggccgtgcttatgggtcagctgtacgtcgtgggcggaagcaatgggcacagcgacgacctgtcatgcggcgaaatgtacgactctaacatcgatgactggatccccgtgcccgagctgcgaaccaaccgctgtaatgctggagtgtgtgcacttaatggcaagctgtatatcgtggggggtagtgacccctatggtcagaaggggttgaaaaactgtgatgtcttcgaccctgtgactaaactgtggaccagttgtgcccctctaaacatcagaaggcatcagagcgctgtgtgtgaattaggagggtacctatacatcatagggggtgcagagagctggaactgtctcaatacagtggaaaggtacaaccccgagaacaacacttggactcttattgctcctatgaatgtcgcgcgacgcggagctggtgtcgcggtcctaaatggcaaactcttcgtctgcggcggattcgacggcagccatgcaatttcttgtgtcgaaatgtatgaccccaccagaaatgagtggaaaatgatgggcaacatgacttcaccacgctctaacgctggcatcgcgactgtgggcaacaccatatacgccgtaggaggtttcgacggtaacgagttcctgaacacagtcgaagtctacaatttggaatcaaatgaatggtccccctacacaaagatttttcagttctag

SEQ ID NO: 266161 - DNA, 1014 bp, Artificial Sequence
  derived and/or modified sequence
atgaccgagcccggcggcgccggcgagcccgccctgtggaagaacaccagcagcagcatggagcccaccgcccccctggtgacccccccccccaagggcggcggcgacatggccgtggtggtgagcaaggagggcagctgggagaagcccagcgacgacagcttccagaagagcgaggcccaggccatccccgagatgcccatgttcgagatccccagccccgacttcagcttccacgccgacgagtacctggaggtgtacgtgagcgccagcgagcaccccaaccacttctggatccagatcgtgggcagcagaagcctgcagctggacaagctggtgaacgagatgacccagcactacgagaacagcgtgcccgaggacctgaccgtgcacgtgggcgacatcgtggccgcccccctgcccaccaacggcagctggtacagagccagagtgctgggcaccctggagaacggcaacctggacctgtacttcgtggacttcggcgacaacggcgactgccccctgaaggacctgagagccctgagaagcgacttcctgagcctgcccttccaggccatcgagtgcagcctggccagaatcgcccccagcggcgaccagtgggaggaggaggccctggacgagttcgacagactgacccactgcgccgactggaagcccctggtggccaagatcagcagctacgtgcagaccggcatcagcacctggcccaagatctacctgtacgacaccagcaacggcaagaagctggacatcggcctggagctggtgcacaagggctacgccatcgagctgcccgaggacatcgaggagaacagagccgtgcccgacatgctgaaggacatggccaccgagaccgacgccagcctgagcaccctgctgaccgagaccaagaagagcagcggcgagatcacccacaccctgagctgcctgagcctgagcgaggccgccagcatgagcggcgacgacaacctggaggacgactacctgctgtag

SEQ ID NO: 266162 - DNA, 1014 bp, Artificial Sequence
  derived and/or modified sequence
atgactgagccagggggagcgggcgaacctgccctctggaagaacacctcctcctcaatggagcctacagcccctttagtgaccccccctcccaaaggcggcggggatatggcagtggtcgtttcaaaagaagggagctgggaaaagcccagcgatgacagttttcagaaatccgaagcacaggccatccccgaaatgcccatgttcgaaatcccatccccggacttctcatttcacgccgatgagtatctcgaagtctatgtttccgccagcgaacaccctaaccatttttggattcagatcgtcggctcacgctccctgcagttggataaactggtgaacgaaatgactcagcattacgagaattctgtgccagaggatctcacagttcacgtcggcgacattgtagcagctccactaccaaccaatgggagttggtaccgagccagggtcctcggcactctggagaacggaaacctggatttatattttgtggattttggagacaacggggactgtcccctcaaggacttgcgagcattaagatccgactttctatcattacccttccaggctatcgaatgctcccttgccagaatcgctccttccggagatcagtgggaggaggaggctctggatgaattcgacaggctaacgcattgcgctgactggaaaccacttgttgccaagatctcatcctatgtgcagacaggaatttcgacctggcccaaaatttatctttacgacacctcaaacgggaagaagctcgacatcggcctggaactagtccataagggatacgcgattgagctacctgaagacattgaggaaaatagagctgtgcctgacatgcttaaggacatggccactgaaactgatgcaagtctcagcaccttactgactgagaccaaaaagtcctccggagagattacccacaccctttcctgcctgtccttaagtgaggccgcaagcatgtcaggggacgacaacttggaggatgactacctactctag

SEQ ID NO: 266163 - DNA, 1014 bp, Artificial Sequence
  derived and/or modified sequence
atgacagagcccggcggggccggggagcccgccctgtggaagaacaccagcagctccatggagcccacagcccccctggtgaccccaccacccaagggcggcggggacatggctgtggtggtgtccaaggagggctcctgggagaagcccagtgatgacagcttccagaagtctgaggcccaggccatccctgagatgcccatgtttgagatccccagcccagacttctccttccacgcagatgagtacctggaggtgtatgtgtctgccagcgagcaccccaaccacttctggatccagatcgtgggcagccgcagcctgcagctggacaagctggtgaatgagatgacccagcactatgaaaattctgtgcctgaggacctgactgtgcacgtgggggacatcgtggccgcccccctgcccaccaacggctcctggtaccgggcccgggtgctgggcaccctggagaatggaaacctggacctgtactttgtggactttggagacaacggggactgccccctgaaggacctgcgggccctgcggagtgacttcctgagcctgcccttccaggccatcgagtgcagcctggcccgcatcgcccccagcggggaccagtgggaggaggaggccctggatgaatttgaccggctgacccactgtgccgactggaagcccctggtggccaagatcagcagctatgtgcagacaggcatcagcacctggcccaagatctacctgtatgacaccagcaatggcaagaagctggacatcggcctggagctggtgcacaagggctacgccatcgagctgcctgaagatattgaagaaaatagagctgtgcctgacatgctgaaggacatggccacagaaacagatgccagcctgagcaccctgctgacagagaccaagaagagcagtggagagatcacccacaccctgagctgcctgagcctgtctgaggccgcctccatgtctggagatgacaacctggaggatgactacctgctgtag

SEQ ID NO: 266164 - DNA, 1014 bp, Artificial Sequence
  derived and/or modified sequence
atgaccgagcccggcggcgccggcgagcccgccctgtggaagaacacatcaagctctatggagccaactgcccccctcgtaactcctcctcctaagggtggcggcgacatggccgtggttgtgtcgaaggaaggaagctgggagaagccatctgacgacagtttccagaagagcgaagcacaggctattcctgagatgcctatgttcgaaataccgtcacctgatttctcctttcatgctgacgaatatctggaggtgtatgtgagtgcatcagagcaccccaaccacttttggatccagatcgtcggatctaggagcttacagctcgacaagttagttaacgaaatgacgcagcactatgagaacagcgtgcccgaggatctgacggtccatgtaggcgacatcgtggccgccccactgcctacgaacggctcgtggtatcgggctagggtcctgggaactctcgaaaatggtaatctggatctttattttgtggactttggagacaatggtgattgtccactgaaggatctgcgagccctgaggtctgattttctgagtctaccatttcaagccatcgagtgttctctggctcgaatagccccctcaggagaccagtgggaggaggaggccctggacgaattcgaccgactcacccattgcgccgactggaagcccctcgtggcgaagattagttcctatgttcagaccgggatttcaacttggccgaagatttatctgtacgacacctcaaacgggaagaaactggacattggcctcgagctggtacacaaagggtatgctattgagcttccagaagatatcgaagagaacagggctgtccccgacatgctgaaggatatggccactgaaaccgacgcctctctgagcaccctccttaccgaaaccaaaaagtcgtcaggagagatcactcacactttgagttgtctgagcctgtccgaggccgcctcgatgagtggggacgacaacctcgaagacgattacctgctctag

SEQ ID NO: 266165 - DNA, 1014 bp, Artificial Sequence
  derived and/or modified sequence
atgactgagcctggcggagcaggagaacccgctctctggaagaacacttcttcatcaatggaacctaccgcgccacttgtgacaccgccaccgaagggcggaggagacatggcagttgtggtctctaaggaaggcagctgggagaagccaagcgatgactcatttcagaaatcagaggcccaggcgattcccgaaatgcccatgtttgagataccaagtccagatttcagttttcacgccgatgaataccttgaagtttatgttagcgcatccgaacaccctaatcacttctggattcaaatcgtagggagcagatctttacagctggataagctggttaatgaaatgactcagcattacgagaacagcgtccccgaggatctaaccgtccatgtgggcgacattgtggccgcaccactgccgaccaatggatcatggtatcgggcacgggttctcggaaccctcgagaacggcaatctcgatttatactttgtagacttcggagataacggggactgccccctgaaagacctacgggcattgcgcagtgatttcctctcgctgccattccaggccattgagtgctctttagcacgaatagctccctcgggtgatcagtgggaggaggaggctctggacgagtttgacaggttgacacactgcgcagactggaagcctctcgtcgccaaaattagcagctacgtgcagactggcattagtacctggccaaagatatacttgtacgacacaagcaatggaaaaaagctggacatcggattagagctggttcacaaaggttacgcgattgaacttccagaagatatcgaagaaaatcgagccgtgccggatatgctcaaagacatggccactgagaccgacgcttccctgtccacgctcctgaccgagactaagaaatctagtggcgagatcacccataccctttcgtgtctgtccttgtctgaggctgcgtctatgtcaggggatgataacttggaagacgactacttactttag

SEQ ID NO: 266166 - DNA, 2219 bp, Artificial Sequence
  derived and/or modified sequence
cggaggactatgagctgccgcgcgttgtccagagcccagcccagccctaccgcgcgcggcccggagctctgttccctggaactttgggcactgcctctgggacccctgccggccagcaggcaggatggtgcttgcctcgtgccccttggtgcccgtctgctgatgtgcccagcctgtgcccgccatgccgccctccatctcagctttccaggccgcctacatcggcatcgaggtgctcatcgccctggtctctgtgcccgggaacgtgctggtgatctgggcggtgaaggtgaaccaggcgctgcgggatgccaccttctgcttcatcgtgtcgctggcggtggctgatgtggccgtgggtgccctggtcatccccctcgccatcctcatcaacattgggccacagacctacttccacacctgcctcatggttgcctgtccggtcctcatcctcacccagagctccatcctggccctgctggcaattgctgtggaccgctacctccgggtcaagatccctctccggagaataagccaatgcatggcaagcactaaatcttagatcctgaagactcagccctcgagcaaaagacatgcacctccccactcaccgggccctggaagaggagggtgctcctcttagaggcccctggaggccaggcgtgcctcagaggggcctttcgaggcagctgggaggcagatcctcacactctgccctcctctcccccaggtacaagatggtggtgaccccccggagggcggcggtggccatagccggctgctggatcctctccttcgtggtgggactgacccctatgtttggctggaacaatctgagtgcggtggagcgggcctgggcagccaacggcagcatgggggagcccgtgatcaagtgcgagttcgagaaggtcatcagcatggagtacatggtctacttcaacttctttgtgtgggtgctgcccccgcttctcctcatggtcctcatctacctggaggtcttctacctaatccgcaagcagctcaacaagaaggtgtcggcctcctccggcgacccgcagaagtactatgggaaggagctgaagatcgccaagtcgctggccctcatcctcttcctctttgccctcagctggctgcctttgcacatcctcaactgcatcaccctcttctgcccgtcctgccacaagcccagcatccttacctacattgccatcttcctcacgcacggcaactcggccatgaaccccattgtctatgccttccgcatccagaagttccgcgtcaccttccttaagatttggaatgaccatttccgctgccagcctgcacctcccattgacgaggatctcccagaagagaggcctgatgactagaccccgccttccgctcccaccagcccacatccagtggggtctcagtccagtcctcacatgcccgctgtcccaggggtctccctgagcctgccccagctgggctgttggctgggggcatgggggaggctctgaagagatacccacagagtgtggtccctccactaggagttaactaccctacacctctgggccctgcaggaggcctgggagggcaagggtcctacggagggaccaggtgtctagaggcaacagtgttctgagcccccacctgcctgaccatcccatgagcagtccagagcttcagggctgggcaggtcctggggaggctgagactgcagaggagccacctgggctgggagaaggtgcttgggcttctgcggtgaggcaggggagtctgcttgtcttagatgttggtggtgcagccccaggaccaagcttaaggagaggagagcatctgctctgagacggatggaaggagagaggttgaggatgcactggcctgttctgtaggagagactggccagaggcagctaaggggcaggaatcaaggagcctccgttcccacctctgaggactctggaccccaggccataccaggtgctagggtgcctgctctccttgccctgggccagcccaggattgtacgtgggagaggcagaaagggtaggttcagtaatcatttctgatatttgctggagtgctggctccacgccctggggagtgagcttggtgcggtaggtgctggcctcaaacagccacgaggtggtagctctgagccctccttcttgccctgagctttccggggaggagccttggagtgtaattacctgtcatctgggccaccagctc

SEQ ID NO: 266167 - protein, 103 aa, Artificial Sequence
  derived and/or modified sequence
MSDCYTELEKAVIVLVENFYKYVSKYSLVKNKISKSSFREMLQKELNHMLSDTGNRKAADKLIQNLDANHDGRISFDEYWTLIGGITGPIAKLIHEQEQQSSS

SEQ ID NO: 266168 - DNA, 947 bp, Artificial Sequence
  derived and/or modified sequence
ctctgttccccttttcctgccaccttcttctccagggaccagaaacaagggccccgccagcaggcgaagcagggagatgtcagactgctacacggagctggagaaggcagtcattgtcctggtggaaaacttctacaaatatgtgtctaagtacagcctggtcaagaacaagatcagcaagagcagcttccgcgagatgctccagaaagagctgaaccacatgctgtcggacacagggaaccggaaggctgcggataagctcatccagaacctggatgccaatcatgatgggcgcatcagcttcgatgagtactggaccttgataggcggcatcaccggccccatcgccaaactcatccatgagcaggagcagcagagcagcagctagagacccctttggccacaccttccaggcactggcctgatgccccgccctggtgctctccccaggctccctcctcagcctcctgcccacccagggccctttactctcttctccctccagaccttcctctgacccttgctgaactggggtccctttgtgagtgtctcagtctagaggtacctccctccctggggggtctcagctcctggagtcgcaggcccttggggcccctctgtgagatctcaatgctgtctggggaccctaagagttttctcacctgttcagtctcatctaaccttccaatgtctgatgttcctgccaaattcctgcctgattctgggtccgtcctgacctccaaaggtcagcttggtgcttgaggtctccctgctcttggtggcagtggtagcagcaacagcagcagcagcagcagcagcagcagcagagacctctccactttcccttagcccctctgctgggtagagaggcactttcagggacttccctccagctgcctcttcatctgggaatgagctaagcaaggctgagcctcctcctgttgctt

SEQ ID NO: 266169 - DNA, 1146 bp, Artificial Sequence
  derived and/or modified sequence
aatggccacaagtggccaacggaaagcaggtggcaggacaggaggctgtggtggggcctgaccgagcagcctttccttccaaatctgactgtggcttgctcaggcccctatggtggctgtgaccctgttttgtccatctcctttcaccaggacccgccgggccccgccagcaggcgaagcagggagatgtcagactgctacacggagctggagaaggcagtcattgtcctggtggaaaacttctacaaatatgtgtctaagtacagcctggtcaagaacaagatcagcaagagcagcttccgcgagatgctccagaaagagctgaaccacatgctgtcggacacagggaaccggaaggctgcggataagctcatccagaacctggatgccaatcatgatgggcgcatcagcttcgatgagtactggaccttgataggcggcatcaccggccccatcgccaaactcatccatgagcaggagcagcagagcagcagctagagacccctttggccacaccttccaggcactggcctgatgccccgccctggtgctctccccaggctccctcctcagcctcctgcccacccagggccctttactctcttctccctccagaccttcctctgacccttgctgaactggggtccctttgtgagtgtctcagtctagaggtacctccctccctggggggtctcagctcctggagtcgcaggcccttggggcccctctgtgagatctcaatgctgtctggggaccctaagagttttctcacctgttcagtctcatctaaccttccaatgtctgatgttcctgccaaattcctgcctgattctgggtccgtcctgacctccaaaggtcagcttggtgcttgaggtctccctgctcttggtggcagtggtagcagcaacagcagcagcagcagcagcagcagcagcagagacctctccactttcccttagcccctctgctgggtagagaggcactttcagggacttccctccagctgcctcttcatctgggaatgagctaagcaaggctgagcctcctcctgttgcttgaaataatgatgatataaaggctggatttggagtttgtatcccctggtccctctgggatgctcattaaaaccttcccactccttggaaa

SEQ ID NO: 266170 - DNA, 1443 bp, Artificial Sequence
  derived and/or modified sequence
agccggcatgggagtaggaatggccacaagtggccaacggaaagcaggtggcaggacaggaggctgtggtggggcctgaccgagcagcctttccttccaaatctgactgtggcttgctcaggcccctatggtggctgtgaccctgttttgtccatctcctttcaccaggacccgccgggtgagggtgactggagcacattcctgggcttgggggtgggaagggagtctgatttgcctggggttgatgtgggggggttttgggcatgggccgtgactcacagagtagatccagatccgcctgctcccctcatatcctgttattcagaaggctgtatccgcttagaaagtgtcttttgtcctggggtgagagggtgacgcatgtgccctctggcagtctgctgctgtgtccagagtccgactccagctgggctgtaactgggcttggcccccgccttaggccccgccagcaggcgaagcagggagatgtcagactgctacacggagctggagaaggcagtcattgtcctggtggaaaacttctacaaatatgtgtctaagtacagcctggtcaagaacaagatcagcaagagcagcttccgcgagatgctccagaaagagctgaaccacatgctgtcggacacagggaaccggaaggctgcggataagctcatccagaacctggatgccaatcatgatgggcgcatcagcttcgatgagtactggaccttgataggcggcatcaccggccccatcgccaaactcatccatgagcaggagcagcagagcagcagctagagacccctttggccacaccttccaggcactggcctgatgccccgccctggtgctctccccaggctccctcctcagcctcctgcccacccagggccctttactctcttctccctccagaccttcctctgacccttgctgaactggggtccctttgtgagtgtctcagtctagaggtacctccctccctggggggtctcagctcctggagtcgcaggcccttggggcccctctgtgagatctcaatgctgtctggggaccctaagagttttctcacctgttcagtctcatctaaccttccaatgtctgatgttcctgccaaattcctgcctgattctgggtccgtcctgacctccaaaggtcagcttggtgcttgaggtctccctgctcttggtggcagtggtagcagcaacagcagcagcagcagcagcagcagcagcagagacctctccactttcccttagcccctctgctgggtagagaggcactttcagggacttccctccagctgcctcttcatctgggaatgagctaagcaaggctgagcctcctcctgttgcttgaaataatgatgatataaaggctggatttggagtttgtatcccctggtccctctgggatgctcattaaaaccttcccactccttggaaa

SEQ ID NO: 266171 - DNA, 1203 bp, Artificial Sequence
  derived and/or modified sequence
tttaacaagggcccaaccccagggccaagtcaagaaggagctcagccactatctccccaccgagccagctcagcgggcagggctgggagggagtgggacagattctgggagtgcagcggggaggagtcccggctgggctgagcgcagggagctgcttggcagtgccagagcccaggccccagagccctgctggagaggaggcagactgaggcagcaggccccgccagcaggcgaagcagggagatgtcagactgctacacggagctggagaaggcagtcattgtcctggtggaaaacttctacaaatatgtgtctaagtacagcctggtcaagaacaagatcagcaagagcagcttccgcgagatgctccagaaagagctgaaccacatgctgtcggacacagggaaccggaaggctgcggataagctcatccagaacctggatgccaatcatgatgggcgcatcagcttcgatgagtactggaccttgataggcggcatcaccggccccatcgccaaactcatccatgagcaggagcagcagagcagcagctagagacccctttggccacaccttccaggcactggcctgatgccccgccctggtgctctccccaggctccctcctcagcctcctgcccacccagggccctttactctcttctccctccagaccttcctctgacccttgctgaactggggtccctttgtgagtgtctcagtctagaggtacctccctccctggggggtctcagctcctggagtcgcaggcccttggggcccctctgtgagatctcaatgctgtctggggaccctaagagttttctcacctgttcagtctcatctaaccttccaatgtctgatgttcctgccaaattcctgcctgattctgggtccgtcctgacctccaaaggtcagcttggtgcttgaggtctccctgctcttggtggcagtggtagcagcaacagcagcagcagcagcagcagcagcagcagagacctctccactttcccttagcccctctgctgggtagagaggcactttcagggacttccctccagctgcctcttcatctgggaatgagctaagcaaggctgagcctcctcctgttgcttgaaataatgatgatataaaggctggatttggagtttgtatcccctggtccctctgggatgctcattaaaaccttcccactccttggaaa

SEQ ID NO: 266172 - protein, 245 aa, Artificial Sequence
  derived and/or modified sequence
MANNYKKIVLLKGLEVINDYHFRIVKSLLSNDLKLNPKMKEEYDKIQIADLMEEKFPGDAGLGKLIEFFKEIPTLGDLAETLKREKLKVANKIESIPVKGIIPSKKTKQKEVYPATPACTPSNRLTAKGAEETLGPQKRKKPSEEETGTKRSKMSKEQTRPSCSAGASTSTAMGRSPPPQTSSSAPPNTSSTEAYLMNLTLSLTAGSFLSCAVWGRDRELRNLELSATDSLSTAPIYYTPIPFAH

SEQ ID NO: 266173 - DNA, 738 bp, Artificial Sequence
  derived and/or modified sequence
atggccaataattataagaaaatagtgctgctcaaaggactagaggttataaacgattaccactttcggattgtgaaaagcctgttaagtaacgatcttaagctgaacccaaagatgaaagaagagtacgacaaaattcagattgcagacctgatggaggaaaagttccccggcgatgctggcctgggtaagttgatcgagttctttaaagagatccccacactgggtgacctggctgaaactctaaaacgggaaaagctgaaggtggctaacaagattgagagcattcccgtcaagggcataatacccagtaaaaagactaaacaaaaggaggtgtacccagccaccccggcttgtacaccttcaaacaggctcacagccaagggtgccgaagaaacactagggccccagaagcgaaagaagccctcagaagaagaaaccgggacaaagcgatctaagatgtcaaaagagcagacgaggccgtcctgcagtgcaggtgcatccaccagtaccgccatgggcagatccccccctccacagactagcagctccgccccgcccaatactagttcaaccgaggcctacctaatgaatctcaccttaagcctgactgctggtagctttttgtcttgtgcagtgtggggaagggatagggagttgcgcaatttggagctgagcgctactgattctctgagcaccgctccaatttactatacgcccataccattcgctcattag

SEQ ID NO: 266174 - DNA, 453 bp, Artificial Sequence
  derived and/or modified sequence
atggcaaataactataagaagatcgttctgctgaagggtcttgaagtcatcaacgactatcattttcggatcgtgaagagtctgctttcaaatgatctgaagctgaatccgaagatgaaggaggagtacgacaagattcagatcgccgacctcatggaagagaagttccccggggacgccgggctgggaaaactcatcgagttctttaaagagatcccaacactgggagacttggccgaaaccctgaagcgcgagaaacttaaggtggccaataagatcgagtctatccccgtcaaagggattattcctagcaagaagactaagcagaaggaggtttaccctgccacacctgcctgtactccaagtaaccgattaactgccaagggggcggaggagaccctcggcccccagaaacgcaagaagccctccgaggaggagacaggcacgaagtag

SEQ ID NO: 266175 - DNA, 738 bp, Artificial Sequence
  derived and/or modified sequence
atggccaacaactacaagaagatcgtgctgctgaagggcctggaggtgatcaatgactaccacttccgcatcgtgaagagcctgctgagcaatgacctgaagctgaaccccaagatgaaggaggagtatgacaagatccagattgctgacctgatggaggagaagtttcctggagatgctggcctgggcaagctgattgagttcttcaaggagatccccaccctgggggacctggccgagaccctgaagcgggagaagctgaaggtggccaacaagattgagagcatccctgtgaagggcatcatccccagcaagaagaccaagcagaaggaggtgtacccagccaccccagcctgcacccccagcaaccggctgacagccaagggagctgaggagaccctgggcccccagaagaggaagaagcccagcgaggaggagaccggcaccaagaggagcaagatgagcaaggagcagacccggcccagctgcagcgctggggccagcaccagcacagccatgggccgcagccccccaccccagaccagcagcagcgccccacccaacaccagcagcacagaggcctacctgatgaacctgaccctgagcctgacagctggcagcttcctgagctgtgctgtgtggggccgggaccgggagctgaggaacctggagctgagcgccacagacagcctgagcacagcccccatctactacacccccatcccctttgcccactag

SEQ ID NO: 266176 - DNA, 453 bp, Artificial Sequence
  derived and/or modified sequence
atggccaacaactacaagaagatcgtgctgctgaagggcctggaggtgatcaatgactaccacttccgcatcgtgaagagcctgctgagcaatgacctgaagctgaaccccaagatgaaggaggagtatgacaagatccagattgctgacctgatggaggagaagtttcctggagatgctggcctgggcaagctgattgagttcttcaaggagatccccaccctgggggacctggccgagaccctgaagcgggagaagctgaaggtggccaacaagattgagagcatccctgtgaagggcatcatccccagcaagaagaccaagcagaaggaggtgtacccagccaccccagcctgcacccccagcaaccggctgacagccaagggagctgaggagaccctgggcccccagaagaggaagaagcccagcgaggaggagaccggcaccaagtag

SEQ ID NO: 266177 - DNA, 738 bp, Artificial Sequence
  derived and/or modified sequence
atggccaacaactacaagaagatcgtgctgctgaagggcctggaggtcatcaacgactaccacttccgaatcgttaagtccctcctcagtaacgatttgaagctaaaccccaagatgaaagaggagtatgacaaaatccagatcgcagatctgatggaagagaagtttcctggtgatgcaggcctcggcaagcttattgaattctttaaggagatcccaacactgggcgatctggcggaaactctgaaacgagagaagctgaaagttgccaacaagattgaatcaataccagttaaaggaataattccatctaagaaaacaaaacaaaaggaagtgtacccagccactcctgcttgtactccaagcaatcgcttaacggcaaaaggggccgaggaaaccctcggcccccagaaacggaaaaagcctagcgaggaagaaacagggacaaaacggtcaaagatgtccaaagagcaaactcgccccagctgttccgctggcgccagcacatcaacggcaatgggtagaagtcctcccccccagactagctcttctgctccacctaatacctcatccacagaggcttacctgatgaatcttactttatctttgaccgcagggtccttcctaagttgcgctgtgtggggtagagatcgagagctaagaaacctggagttatccgctacagacagtctaagtacagcccctatctattatacccccatccctttcgcccactag

SEQ ID NO: 266178 - DNA, 453 bp, Artificial Sequence
  derived and/or modified sequence
atggccaacaactacaagaagatcgtgctgctgaagggcctggaggttatcaatgactaccacttcagaattgtaaagtcactgctttcaaatgatcttaagttgaaccccaaaatgaaggaagagtacgacaagattcagattgctgatctcatggaggaaaagttcccaggggacgcgggactgggcaaattaatcgagttcttcaaggaaatccctacccttggagatcttgctgaaaccctaaagcgggaaaagctaaaagtagccaataagatagagtccatccctgtgaagggaattattccttccaagaaaactaaacagaaagaggtgtaccctgctaccccagcttgtacaccttcaaatagactcacggccaagggcgcagaggagactctcggaccacagaagcggaagaaaccaagtgaggaggagaccggcaccaaatag

SEQ ID NO: 266179 - DNA, 738 bp, Artificial Sequence
  derived and/or modified sequence
atggccaacaactataagaagatcgtgctcctcaagggattggaggttatcaacgattatcacttcagaatagtgaaatcgttgctctccaacgacttaaaactgaaccccaagatgaaagaagaatatgacaagatccagattgcagatctgatggaagaaaagtttcctggggatgccggactaggcaagctgatcgaattctttaaggaaatcccaacattaggagatcttgccgaaactctgaagcgcgagaagttaaaagtcgcaaataagatcgagtccattcccgttaaagggatcattccttcaaagaagacaaaacagaaagaagtgtacccagccactcccgcttgcacaccatctaatcggcttacagccaaaggcgcagaggagacacttggtccccagaaacgcaagaagccgtccgaagaagagacaggaacaaagcggagcaagatgagtaaagagcagacacggccttcttgttcggctggtgcatcaacctccaccgctatggggagaagcccgcctccccagaccagctctagtgctccccctaacacatcatcaactgaggcctatctgatgaatttgactctaagcctaaccgccggaagctttcttagttgcgcagtgtggggaagagatcgtgagctgagaaaccttgagctcagcgctacagatagcctgtcgacggcacccatctactatacacctattcctttcgcacattag

SEQ ID NO: 266180 - DNA, 453 bp, Artificial Sequence
  derived and/or modified sequence
atggctaacaattataagaagattgtgttgctaaaggggctcgaagtgatcaatgactaccatttcagaatcgtaaaatctctcctgagtaatgatctcaagcttaaccccaagatgaaggaggagtatgacaagatccagatcgccgatctgatggaggagaaattcccgggagatgcgggactagggaaattaatcgagttcttcaaggagattcctacgctgggcgacctcgccgagactctgaaaagggagaaactcaaagtggcaaacaagatcgaatccatcccagttaagggaattattccttccaagaagaccaagcagaaagaggtttatccagccacaccagcttgcacaccctcaaaccgactgaccgccaaaggcgcagaagaaactttgggcccacagaagagaaaaaagcccagcgaggaggagaccgggactaaatag

SEQ ID NO: 266181 - DNA, 1662 bp, Artificial Sequence
  derived and/or modified sequence
agcactagtcaagtgactctaagaagggccattttcccttgttgtctttgaaaatacttcattttcttagcatttcaggagattataacatcctgtatttcagtttctgagagctttactgactgatttccctattcaaaacaatcctcatttcctacatttctgaagatctcaagatctggactactgttgaagaaattcccagtaaggctcacttatatctttagagatggcaaataactacaagaaaattgttctactgaaaggattagaggtcatcaatgattatcattttagaattgttaagtccttactgagtaacgatttaaaacttaatccaaaaatgaaagaagagtatgacaaaattcagattgctgacttgatggaggaaaagttcccaggtgatgccggtttgggcaaactaatagaattcttcaaagaaataccaacactgggagaccttgctgaaactcttaaaagagaaaagttaaaagttgcaaataaaattgaatccattccagtcaaaggaataatcccatctaaaaagacgaaacagaaagaagtgtatcctgctacacctgcatgcaccccaagcaaccgtctcacagctaaaggagcagaggagactcttggacctcagaaaagaaaaaaaccatctgaagaagagactggaaccaaaaggagtaagatgtccaaagagcagactcggccttcctgctctgcaggagccagcacgtccacagccatgggccgttccccacctccccagacctcatcatcagctccacccaacacttcctcaactgaggcatatttgatgaacttgacattatctctgactgcaggaagttttctgtcctgtgctgtttggggaagagacagagaactgcggaatctggaactttcagcaacagactcactgtctactgcccccatctattatacacccattccctttgctcactaatttgttcaagtttctctgacatacaccatgctcctttttcctttaggattttcacacaccatatttctttcacctttaaactcttacctggccaaccctatccaccctctggatcccaatattgagatcttatcctcagggaatcctcacttagacccctgtaacaggttaaatcttcatggtgttctgtttcctaggaacttctttcttttctactgtttatgacaactgaagttaataagtgtttatctttcccacctactcaaagtagttccaagattagggctagtttgtaattctgtggaccactgtaaacgagggcctagttcagtgtctgcctcatgggaagcttccaataaatacctttgctcaacgaaaaaatgaaaacccagtggctcacgcctgtaatcccagcactttgggaggccgaggcaggtggattgcctgaggtcaggagtttgagactagtctggccaacatggtgaaacactatctctactaaaaatacaaaaaaattagctgggtatggtggcttacgcctataatcccagctactcaggaggctgaggcaggggaattgcttgaaccagggaggtggaggttgcagtgagctgagatcgcaccactgcactccagcctgggtgacagagcgagactccatctcaaaataaaaaagtaaaaaaaaaaaaaaaaaa

SEQ ID NO: 266182 - DNA, 771 bp, Artificial Sequence
  derived and/or modified sequence
gacacccactgcccttaacagaaaaaatactgctgagcaaagggtttaacaggactctcggtctaccagaagttcagtgcattttccaggattttcaaggcttcgatgctgtcatgttgtgagcccactatccacttgtgtttttccatgaataatgaaggaaacctgaggaatcatgaatgtaatcattgagtttctgagagctttactgactgatttccctattcaaaacaatcctcatttcctacatttctgaagatctcaagatctggactactgttgaagaaattcccagtaaggctcacttatatctttagagatggcaaataactacaagaaaattgttctactgaaaggattagaggtcatcaatgattatcattttagaattgttaagtccttactgagtaacgatttaaaacttaatccaaaaatgaaagaagagtatgacaaaattcagattgctgacttgatggaggaaaagttcccaggtgatgccggtttgggcaaactaatagaattcttcaaagaaataccaacactgggagaccttgctgaaactcttaaaagagaaaagttaaaagttgcaaataaaattgaatccattccagtcaaaggaataatcccatctaaaaagacgaaacagaaagaagtgtatcctgctacacctgcatgcaccccaagcaaccgtctcacagctaaaggagcagaggagactcttggacctcagaaaagaaaaaaaccatctgaagaagagactggaaccaaaag

SEQ ID NO: 266183 - DNA, 738 bp, Artificial Sequence
  derived and/or modified sequence
atggccaacaactacaagaagatcgtgctgctgaagggcctggaggtgatcaacgactaccacttcagaatcgtgaagagcctgctgagcaacgacctgaagctgaaccccaagatgaaggaggagtacgacaagatccagatcgccgacctgatggaggagaagttccccggcgacgccggcctgggcaagctgatcgagttcttcaaggagatccccaccctgggcgacctggccgagaccctgaagagagagaagctgaaggtggccaacaagatcgagagcatccccgtgaagggcatcatccccagcaagaagaccaagcagaaggaggtgtaccccgccacccccgcctgcacccccagcaacagactgaccgccaagggcgccgaggagaccctgggcccccagaagagaaagaagcccagcgaggaggagaccggcaccaagagaagcaagatgagcaaggagcagaccagacccagctgcagcgccggcgccagcaccagcaccgccatgggcagaagcccccccccccagaccagcagcagcgccccccccaacaccagcagcaccgaggcctacctgatgaacctgaccctgagcctgaccgccggcagcttcctgagctgcgccgtgtggggcagagacagagagctgagaaacctggagctgagcgccaccgacagcctgagcaccgcccccatctactacacccccatccccttcgcccactag

SEQ ID NO: 266184 - DNA, 453 bp, Artificial Sequence
  derived and/or modified sequence
atggccaacaactacaagaagatcgtgctgctgaagggcctggaggtgatcaacgactaccacttcagaatcgtgaagagcctgctgagcaacgacctgaagctgaaccccaagatgaaggaggagtacgacaagatccagatcgccgacctgatggaggagaagttccccggcgacgccggcctgggcaagctgatcgagttcttcaaggagatccccaccctgggcgacctggccgagaccctgaagagagagaagctgaaggtggccaacaagatcgagagcatccccgtgaagggcatcatccccagcaagaagaccaagcagaaggaggtgtaccccgccacccccgcctgcacccccagcaacagactgaccgccaagggcgccgaggagaccctgggcccccagaagagaaagaagcccagcgaggaggagaccggcaccaagtag

SEQ ID NO: 266185 - protein, 755 aa, Artificial Sequence
  derived and/or modified sequence
IETKTRANPDRTFDLVLKVKCHASENEDPVVLWKFPEDFGDQEILQSVPKFCFPFDVERVSQNQVGQHFTFVLTDIESKQRFGFCRLTSGGTICLCILSYLPWFEVYYKLLNTLADYLAKELENDLNETLRSLYNHPVPKANTPVNLSVHSYFIAPDVTGLPTIPESRNLTEYFVAVDVNNMLQLYASMLHERRIVIISSKLSTLTACIHGSAALLYPMYWQHIYIPVLPPHLLDYCCAPMPYLIGIHSSLIERVKNKSLEDVVMLNVDTNTLESPFSDLNNLPSDVVSALKNKLKKQSTATGDGVARAFLRAQAALFGSYRDALRYKPGEPITFCEESFVKHRSSVMKQFLETAINLQLFKQFIDGRLAKLNAGRGFSDVFEEEITSGGFCGGNPRSYQQWVHTVKKGGALFNTAMTKATPAVRTAYKFAKNHAKLGLKEVKSKLKHKENEEDYGTCSSSVQYTPVYKLHNEKGGNSEKRKLAQARLKRPLKSLDGALYDDEDDDDIERASKLSSEDGEEASAYLYESDDSVETRVKTPYSGEMDLLGEILDTLSTHSSDQGKLAAAKSLDFFRSMDDIDYKPTNKSNAPSENNLAFLCGGSGDQAEWNLGQDDSALHGKHLPPSPRKRVSSSGLTDSLFILKEENSNKHLGADNVSDPTSGLDFQLTSPEVSQTDKGKTEKRETLSQISDDLLIPGLGRHSSTFVPWEKEGKEAKETSEDIGLLHEVVSLCHMTSDFQQSLNISDKNTNGNQT

SEQ ID NO: 266186 - DNA, 2268 bp, Artificial Sequence
  derived and/or modified sequence
attgagacgaagacgcgagccaaccctgaccggacctttgaccttgtcctgaaggtgaagtgccatgccagcgagaacgaggatcccgtagttttgtggaaatttcctgaagattttggggatcaggaaatcctgcagagtgttcctaaattctgcttccctttcgacgtggagcgggtgagccagaatcaagtgggccagcactttacatttgtcctaaccgacatcgagtcaaaacagcgatttggtttctgtcgacttacttccggtggcacgatttgcctgtgtattttgtcctatctgccctggtttgaagtctactacaagctcctcaacacgctagctgactaccttgctaaagagctcgagaacgacttaaacgaaaccctaaggagtctgtacaatcaccccgtgccaaaggctaatacgcccgttaatttgtcagttcactcttactttattgcccccgatgtcactggcttacctaccatccccgaatcgcgaaacctcactgagtacttcgtggctgtcgacgtgaataatatgttacagctttatgccagcatgctacacgaaagaaggatcgtcattatctcttccaaactctctactcttacagcttgcatccatggatccgctgccctactttacccgatgtactggcagcatatttatattccggtccttccccctcacctactcgactattgctgtgctcctatgccgtatctcatcgggatccactcctctctgattgaaagggtaaaaaacaaatcattagaagatgtcgtgatgttgaacgtcgacaccaatactctggaatcaccgttctctgacttgaacaacctcccaagcgacgtagtgtccgcactgaagaataaactgaaaaaacaaagtacagctaccggcgacggcgtcgcacgcgctttcctgcgggcccaggcggccctctttggttcttaccgcgatgccctgagatacaagccaggtgagcctatcactttttgcgaagagtctttcgtaaagcatagatcctctgtcatgaagcagttcctcgagactgcaatcaacttgcagttattcaagcagttcatcgatggccgcctcgctaaactgaatgccggccgtggcttttccgacgtgttcgaagaggagatcacaagtggggggttctgtggcggcaacccacggtcgtatcagcagtgggtgcatactgtgaaaaagggcggcgctctgtttaataccgcaatgacaaaagcaacccccgccgtgcggacggcatacaagttcgccaaaaaccatgccaagttaggtctcaaggaggtcaagtccaaacttaaacataaggagaacgaggaggattatggcacatgcagcagctccgttcagtataccccggtctacaagctgcacaatgaaaagggcggaaacagcgagaaacgcaaattagcacaggccaggttgaagcgtcccttaaagagcttggacggtgccctttacgacgacgaggatgatgatgacatagagcgagctagcaagttgagtagtgaagatggggaggaggcttctgcctacctgtatgagtccgatgactcagtggaaacccgcgtgaaaacgccctacagcggagaaatggacctactgggtgagatactcgacacgctgagtacccactcatccgaccaagggaaactggcagccgctaaaagcttagatttttttaggagcatggacgatatcgactacaaaccaacaaataagtcaaacgcgccttctgaaaacaacctggctttcctgtgcgggggatccggagaccaggctgagtggaatctgggacaagacgacagcgccctgcacggcaaacacctgcctccatccccccgcaagcgagtgtccagttcaggactgaccgatagcttgtttattctgaaggaggaaaactccaataagcatcttggtgccgacaatgttagcgatccaacaagcgggctggactttcagctaacgagtcccgaggtttcccagacagacaagggcaaaacagagaaacgggaaacacttagccaaataagcgatgaccttctcatcccagggttgggcagacacagttcaactttcgtcccatgggagaaagagggtaaagaggctaaggagaccagcgaggacatcggcctactgcacgaggttgtgagcttgtgtcatatgaccagcgacttccagcagagtctcaatatctccgacaagaatactaacggtaaccagacctag

SEQ ID NO: 266187 - DNA, 2268 bp, Artificial Sequence
  derived and/or modified sequence
attgagaccaagacccgggccaacccagacaggacctttgacctggtgctgaaggtgaagtgccacgcctctgaaaatgaagatcctgtggtgctgtggaagttcccagaagattttggagaccaggagatcctgcagagcgtgcccaagttctgcttcccctttgatgtggagcgggtgtcccagaaccaggtgggccagcacttcacctttgtgctgacagacatcgagagcaagcagcgcttcggcttctgccgcctgaccagcggcggcaccatctgcctgtgcatcctgagctacctgccctggtttgaggtgtactacaagctgctgaacaccctggccgactacctggccaaggagctggagaatgacctgaatgagaccctgcggagcctgtacaaccaccctgtgcccaaggccaacacccctgtgaacctgtctgtgcacagctacttcatcgccccagatgtgacaggcctgcccaccatccctgagagcaggaacctgacagagtactttgtggccgtggatgtgaacaacatgctgcagctgtatgcctccatgctgcatgaaagaagaattgtcatcatcagcagcaagctgagcaccctgacagcctgcatccacggcagcgctgccctgctgtaccccatgtactggcagcacatctacatccctgtgctgcccccccacctgctggactactgctgtgcccccatgccctacctgattggcatccacagcagcctcatcgagcgggtgaagaacaagagcctggaggatgtggtgatgctgaatgtggacaccaacaccctggagagccccttcagtgacctgaacaacctgcccagtgatgtggtgtctgccctgaagaacaagctgaagaagcagagcacagccactggagatggagtggcccgggccttcctgcgggcccaggccgccctgtttggcagctacagagatgccctgcgctacaagccaggagagcccatcaccttctgtgaggagagctttgtgaagcacaggagctctgtgatgaagcagttcctggagacagccatcaacctgcagctgttcaagcagttcattgatggccgcctggccaagctgaatgccggccggggcttcagtgatgtgtttgaggaggagatcaccagcggcggcttctgtggcggcaaccccaggagctaccagcagtgggtgcacacagtgaagaagggcggggccctcttcaacacagccatgaccaaggccaccccagctgtgaggacagcctacaagtttgccaagaaccacgccaagctgggcctgaaggaggtgaagagcaagctgaagcacaaggaaaatgaagaagattatggcacctgcagcagctctgtgcagtacacccctgtgtacaagctgcacaatgagaagggcggcaacagcgagaagaggaagctggcccaggcccggctgaagaggcccctgaagagcctggatggagccctgtatgatgatgaagatgatgatgacatcgagcgggccagcaagctgagcagtgaagatggagaggaggccagcgcctacctgtatgaaagtgatgacagcgtggagaccagggtgaagaccccctacagcggggagatggacctgctgggggagatcctggacaccctgagcacccacagcagtgaccagggcaagctggccgccgccaagagcctggacttcttccgctccatggatgacatcgactacaagcccaccaacaagagcaatgcccccagcgagaacaacctggccttcctgtgtggcggcagcggggaccaggccgagtggaacctgggccaggatgacagcgccctgcacggcaagcacctgccccccagccccaggaagagggtgagcagcagcggcctgacagacagcctcttcatcctgaaggaggagaacagcaacaagcacctgggcgctgacaacgtgtctgaccccaccagcggcctggacttccagctgaccagccctgaggtgtcccagacagacaagggcaagacagagaagcgggagaccctgagccagatcagtgatgacctgctgatccctggcctgggccgccacagcagcacctttgtgccctgggagaaggagggcaaggaggccaaggagaccagtgaagatattggcctgctgcacgaggtggtgtccctgtgccacatgaccagtgacttccagcagagcctgaacatcagtgacaagaacaccaatggaaaccagacctag

SEQ ID NO: 266188 - DNA, 2268 bp, Artificial Sequence
  derived and/or modified sequence
atcgagaccaagacccgggccaaccccgaccggaccttcgacctggtgttaaaggtgaagtgccacgcttctgaaaatgaagaccccgtggtgctctggaagttccctgaggacttcggtgatcaggaaatactgcagagtgtcccaaaattttgtttcccatttgatgtcgaacgcgtgtctcagaatcaggtcggtcagcactttacgttcgtactcacagacatcgaatctaaacaacgatttgggttttgccgcttaacatcgggcggtactatctgtctgtgcattctgagctatcttccttggtttgaggtgtattacaagctgctgaacaccctggcggactacctggcaaaagagttggagaatgatctaaatgaaactctgcgctcgttatataaccatccagttcccaaggctaacaccccggttaatctgagcgtccactcttatttcatcgctccagatgtgacgggtctgccgacaatacctgagagccgtaacttgactgagtattttgtagccgtcgatgtgaataatatgttgcagctgtacgcctcgatgctacatgaacggagaatcgtaatcatttcctcaaagcttagtactcttacggcctgtatccacggatcagctgcccttctttaccctatgtactggcagcatatctatattcccgttctgcctccccatctgctagactactgctgcgccccaatgccttacctgatcggcattcattcatcactgatcgagagggtgaagaacaagagcttggaggacgtagtcatgctgaatgtcgatactaataccctcgaatcacccttttctgacctcaataatttgccgtcagatgtcgtttccgcccttaagaataagctgaaaaaacagtcaacagctacaggcgatggcgttgccagagcattcctgagagctcaggccgccctctttggaagttatcgggatgcgttgcgttataagccaggcgaacctattaccttctgcgaggagtcgttcgtgaagcacagaagctctgttatgaagcaattcctggagaccgccatcaacttgcagctgtttaagcagtttattgatggccgcctggcaaagttaaatgcaggaagagggttctccgacgtctttgaggaagagataacttccggcggcttctgtgggggtaaccctcgaagttatcaacaatgggtccatactgtgaagaagggcggggctctgtttaacaccgccatgactaaagctactcctgcagtccggactgcttacaaatttgccaaaaatcatgctaagctgggtttgaaggaagtgaagtcgaagctgaaacacaaagagaacgaggaagactacgggacttgctcgtcttcagtccagtacactcctgtatacaagctgcacaatgagaaagggggcaactccgagaagcggaaattggcccaggcacgtctgaagcggccactcaaaagtctggacggcgctctatacgacgacgaagacgacgacgatatcgagagggcgtctaagctttcttcagaggacggggaagaggcaagcgcttacctctacgagagtgatgattctgttgagactcgtgtaaaaactccttatagtggcgaaatggacctcctcggcgagatcctcgacacactttctactcattccagcgaccaaggcaaattggcggccgctaagtcactggatttttttcgctctatggatgacattgactataagccaaccaataagagcaatgctccaagcgagaataacctggcatttctgtgtgggggctctggagaccaggccgaatggaaccttggacaggacgattctgccctgcacggaaaacacctgcccccctccccgaggaaacgcgttagctcttctggcttaacagattcgttgtttatcctgaaggaagagaactccaacaaacacctgggcgccgacaacgtttctgacccaacctctggtctcgacttccagctgacctctcccgaggtgtcacaaaccgacaaaggtaaaactgaaaagagggaaaccctgtcccaaatctctgacgacttgctcatccctgggttgggtcgtcactccagtacctttgtcccctgggagaaggaaggaaaagaagctaaggagacttccgaggatattggcctactccacgaggtagtgagcttgtgccacatgacaagcgatttccaacagagcttaaacatatccgacaaaaataccaacggcaatcagacatag

SEQ ID NO: 266189 - DNA, 2268 bp, Artificial Sequence
  derived and/or modified sequence
atcgaaaccaagacacgcgcaaacccagatcgaaccttcgacctcgtactgaaagtgaagtgccacgcttccgaaaacgaggatcccgttgtgctgtggaagtttcctgaggacttcggggatcaagagatcctgcagtctgttcctaaattctgttttccatttgatgttgagcgtgtgtcccaaaaccaggtcggacagcattttacttttgtgcttaccgatattgagtccaaacagcgattcggcttctgtcgactgacctctgggggtacaatatgcctctgcattctgtcctatttgccctggttcgaggtctactacaaactgcttaatacgctggcggattatttggcaaaggaactcgaaaacgatcttaatgagactctgaggagtttgtacaatcaccctgttccaaaggccaatacccccgtcaacctatctgtgcacagctacttcatcgcacccgatgtgactggcctccccacgattcccgaatcacgtaacttgactgagtactttgtcgccgtcgacgtgaacaacatgctccaattgtacgcgagcatgctgcatgagcggagaatcgtgatcataagtagcaagctgtcaaccctgaccgcctgtattcatggcagtgccgctctcctctatccaatgtactggcagcacatctacataccggtcctaccgcctcacttgctggactactgctgcgcccctatgccctatttgataggaatacacagcagcctgatagagagggtcaaaaacaaaagccttgaagacgtggttatgctcaacgtagatactaacacccttgaatcaccctttagtgacctgaacaatctgcccagtgatgtagtgagcgccctcaaaaacaaattgaaaaagcagagcacagccaccggcgatggggtagcacgcgcttttctccgcgctcaggccgctctgttcggctcttaccgagacgctctccgctacaagccgggagagcccatcacattctgtgaggaatcctttgttaagcacaggagtagcgttatgaaacaattcctggagactgcaattaacctccagctgttcaaacagttcatcgacggtaggctggccaagctcaacgcaggacggggatttagtgacgtctttgaagaggagataacctcgggaggattctgtggtggcaaccctcggtcctatcagcagtgggttcacaccgtgaaaaaaggcggagctctgttcaataccgctatgactaaggctactcccgctgtaaggacagcctataagttcgcaaagaaccacgccaaactcgggttgaaagaagtcaagagtaaactgaaacacaaggagaacgaagaggattacggaacttgttcttctagcgtccagtatactcctgtgtataaactgcacaacgagaaaggagggaactccgaaaagaggaaactggctcaagccaggttgaagcgtcccttgaagagtcttgacggcgcactctatgacgatgaggatgatgacgacattgagcgtgcatcgaaactcagtagtgaggatggtgaggaagcctctgcctatctgtacgagtctgacgatagtgtcgaaaccagggtgaaaaccccgtattctggcgagatggatttgttaggggaaatcctggatacattatccacacactcctctgatcagggcaagctggcagccgctaagtccctcgatttcttccgtagcatggatgatatcgattacaaaccaaccaataaatccaacgcgccatcagagaacaatctggcgtttctgtgcggaggaagcggcgatcaggcagagtggaacctgggtcaagatgacagcgcactacacggaaagcacctcccaccatccccgagaaaacgcgtgtcttcttctggacttaccgattcactattcattctgaaagaggaaaatagtaacaagcatcttggcgcagacaacgttagtgacccgacaagtggcctagatttccagctcacatcaccagaggtctcacagacagataaggggaaaaccgaaaagcgggaaactctgagtcagatctccgacgacctactgataccaggactaggaagacacagtagtacattcgtaccatgggaaaaagaaggcaaagaggctaaggagactagcgaggatattgggctgctgcacgaggtagtgtccctgtgccacatgacttctgatttccagcagagcctgaacatcagcgacaaaaacacaaacggcaaccagacttag

SEQ ID NO: 266190 - DNA, 2268 bp, Artificial Sequence
  derived and/or modified sequence
atcgagaccaagaccagagccaaccccgacagaaccttcgacctggtgctgaaggtgaagtgccacgccagcgagaacgaggaccccgtggtgctgtggaagttccccgaggacttcggcgaccaggagatcctgcagagcgtgcccaagttctgcttccccttcgacgtggagagagtgagccagaaccaggtgggccagcacttcaccttcgtgctgaccgacatcgagagcaagcagagattcggcttctgcagactgaccagcggcggcaccatctgcctgtgcatcctgagctacctgccctggttcgaggtgtactacaagctgctgaacaccctggccgactacctggccaaggagctggagaacgacctgaacgagaccctgagaagcctgtacaaccaccccgtgcccaaggccaacacccccgtgaacctgagcgtgcacagctacttcatcgcccccgacgtgaccggcctgcccaccatccccgagagcagaaacctgaccgagtacttcgtggccgtggacgtgaacaacatgctgcagctgtacgccagcatgctgcacgagagaagaatcgtgatcatcagcagcaagctgagcaccctgaccgcctgcatccacggcagcgccgccctgctgtaccccatgtactggcagcacatctacatccccgtgctgcccccccacctgctggactactgctgcgcccccatgccctacctgatcggcatccacagcagcctgatcgagagagtgaagaacaagagcctggaggacgtggtgatgctgaacgtggacaccaacaccctggagagccccttcagcgacctgaacaacctgcccagcgacgtggtgagcgccctgaagaacaagctgaagaagcagagcaccgccaccggcgacggcgtggccagagccttcctgagagcccaggccgccctgttcggcagctacagagacgccctgagatacaagcccggcgagcccatcaccttctgcgaggagagcttcgtgaagcacagaagcagcgtgatgaagcagttcctggagaccgccatcaacctgcagctgttcaagcagttcatcgacggcagactggccaagctgaacgccggcagaggcttcagcgacgtgttcgaggaggagatcaccagcggcggcttctgcggcggcaaccccagaagctaccagcagtgggtgcacaccgtgaagaagggcggcgccctgttcaacaccgccatgaccaaggccacccccgccgtgagaaccgcctacaagttcgccaagaaccacgccaagctgggcctgaaggaggtgaagagcaagctgaagcacaaggagaacgaggaggactacggcacctgcagcagcagcgtgcagtacacccccgtgtacaagctgcacaacgagaagggcggcaacagcgagaagagaaagctggcccaggccagactgaagagacccctgaagagcctggacggcgccctgtacgacgacgaggacgacgacgacatcgagagagccagcaagctgagcagcgaggacggcgaggaggccagcgcctacctgtacgagagcgacgacagcgtggagaccagagtgaagaccccctacagcggcgagatggacctgctgggcgagatcctggacaccctgagcacccacagcagcgaccagggcaagctggccgccgccaagagcctggacttcttcagaagcatggacgacatcgactacaagcccaccaacaagagcaacgcccccagcgagaacaacctggccttcctgtgcggcggcagcggcgaccaggccgagtggaacctgggccaggacgacagcgccctgcacggcaagcacctgccccccagccccagaaagagagtgagcagcagcggcctgaccgacagcctgttcatcctgaaggaggagaacagcaacaagcacctgggcgccgacaacgtgagcgaccccaccagcggcctggacttccagctgaccagccccgaggtgagccagaccgacaagggcaagaccgagaagagagagaccctgagccagatcagcgacgacctgctgatccccggcctgggcagacacagcagcaccttcgtgccctgggagaaggagggcaaggaggccaaggagaccagcgaggacatcggcctgctgcacgaggtggtgagcctgtgccacatgaccagcgacttccagcagagcctgaacatcagcgacaagaacaccaacggcaaccagacctag

SEQ ID NO: 266191 - DNA, 2351 bp, Artificial Sequence
  derived and/or modified sequence
attgagacaaaaacaagggcaaatccagacagaacctttgacttggtgttgaaagtgaaatgtcatgcctctgaaaatgaagatcctgtggtattgtggaaattcccagaggactttggagaccaggaaatactacagagtgtgccaaagttctgttttccctttgacgttgaaagggtgtctcagaatcaagttggacagcactttacctttgtactgacagacattgaaagtaaacagagatttggattctgcagactgacgtcaggaggcacaatttgtttatgcatccttagttaccttccctggtttgaagtgtattacaagcttctaaatactcttgcagattacttggctaaggaactggaaaatgatttgaatgaaactctcagatcactgtataaccacccagtaccaaaggcaaatactcctgtaaatttgagtgtgcattcctacttcattgcccctgatgtaactggactcccaacaatacccgagagtagaaatcttacagaatattttgttgccgtggatgtgaacaacatgctgcagctgtatgccagtatgctgcatgaaaggcgcatcgtgattatctcgagcaaattaagcactttaactgcctgtatccatggatcagctgctcttctatacccaatgtattggcaacacatatacatcccagtgcttcctccacacctgctggactactgctgtgccccaatgccatacctgattggaatacactccagcctcatagagagagtgaaaaacaaatcattggaagatgttgttatgttaaatgttgatacaaacacattagaatcaccatttagtgacttgaacaacctaccaagtgatgtggtctcggccttgaaaaataaactgaagaagcagtctacagctacgggtgatggagtagctagggcctttcttagagcacaggctgctttgtttggatcctacagagatgcactgagatacaaacctggtgagcccatcactttctgtgaggagagttttgtaaagcaccgctcaagcgtgatgaaacagttcctggaaactgccattaacctccagctttttaagcagtttatcgatggtcgactggcaaaactaaatgcaggaaggggtttctctgatgtatttgaagaagagatcacttcaggtggcttttgtggagggaacccgaggtcatatcaacaatgggtgcatacagtcaagaaaggaggtgcactgttcaacacagcaatgaccaaagcaacccctgctgtacggacagcatataaatttgcaaaaaatcatgcaaagctgggactaaaggaagtgaagagtaaactaaaacacaaggaaaatgaagaagattatgggacctgttctagttctgtacaatatacaccagtttacaaattacacaatgaaaagggaggaaactcagaaaagcgtaagcttgctcaggcacgcttaaaaaggcctcttaagagccttgatggtgctctatatgatgatgaagatgatgatgacattgaaagagcaagcaagttatcttctgaagatggtgaagaagcttctgcttatctctatgagagtgatgactctgttgaaacaagagtgaagactccttactcaggtgaaatggacttactaggagagattcttgatacattgagcacacacagctcagatcaggggaagctggcagctgcaaagagcttggatttctttagatcaatggatgacattgattacaaacctacgaataaatctaatgctcctagtgagaataacctggctttcctctgtggtggttctggtgaccaagcagagtggaatcttgggcaagacgatagtgccctccatggcaaacacctccctccatctcctaggaagcgggtttcctctagtggtttgacagattctctgtttatcctgaaagaggaaaacagtaacaagcacctcggtgctgacaatgtgagtgaccctacttcaggactggatttccaactcacttcccctgaagtttcccagactgataaaggaaaaacagaaaagagggaaacactaagccagatttcagatgatctgcttatacccggtcttgggcggcattcatcgacttttgttccttgggagaaagaagggaaagaagccaaagagacttcagaagatattggactgctccatgaagtagtgtcattatgtcatatgacatctgacttccaacaaagcttgaacatttcagacaaaaacacaaatggaaaccaaacttaaatcttgcatccaagcttctatggagacattttgagattcaatgcaatctgtataataaacagaattatttgtaggaatggcaa

SEQ ID NO: 266192 - protein, 491 aa, Artificial Sequence
  derived and/or modified sequence
VIIHRVLEKQEVEVFYPDFGNIGIVQKSSLRFLKCCYTKLPAQAIPCSLAWVRPVEEHWTSKAILQFQKLCGLKPLVGVVDEYVDGILNIFLCDTSSNEDVYFHHVLRTEGHAIVCRENISSKGFSELNPLALYTTSSGGPEDIVLTELGYPSQQHYFNEDRKISPQSKESELRILQDINDEKSLSHLKSESKEPLKDSEFESLKTCNKSFEEDPKWSNPEPNDLKEENEDEIPTGMPCLESVTIGDDIWDENWLPLQAKMGKGGDAASHLFTASLGGKNQYSSCKEMPQKDWCFSTPKDTWDDSWQPSGLVNGTKVEVHKPEVLGAQEKNTGTNRTQKQLDINGSSDSSTLPKLEEFCTSLTQSEQSADGSQSEPNNSQTQPKQIQLSTAAPCSTTAVDDSAEKPSGSVESSPEILKNEDFSSSRAITLYKDKRQESVDQLSLILSYECQISQKLYIPRSTATAALGAAARLATSRSLLHWYPSVKRMEA

SEQ ID NO: 266193 - protein, 1035 aa, Artificial Sequence
  derived and/or modified sequence
MSEQERIQECLRKEIRSLLISTKDGLSPQELEKEYLLMVGNHLPLRILGYRSTMELVLDMPDVVRVCPGAGGTVILKAIPDESTKGIASLVAKQRSSHKLRNSMHKGRPSIYSGPRSHRRVPYRGRVAPILPAVVKSELKDLLALSPVLLSDFEKAFAKRFGRSFQYMQYGFLSMFEVLNAASDVISVEQTRAGSLLMLKKSVTEEKPRGCPAGKIFTQPFRMKQGSYSTGFPVAKPCFSQPTSNMEPPKQIMSMEKTSKLNVVETSRLNHTEKLNQLENTFKSVIAQIGPGGTISSELKHKIKFVVSKFPEGLFISKLLGEYEVIFKEQLSPKKLGFLNVTELVGALSDILHVEFRKGHQDLLVFDADKKPLPPVQSDKKIEAKACVSSPPRNSLSTAAVKETVWNCPSKKQKEPQQKICKKPNLVVKPLQLQVETNKSELNLAMANHDIPPDAVPNKKLCRLPPLDTSSLIGVFVEYIISPSQFYIRIYSRDSSELLEDMMIEMRRCYSNQLVSDRYVMPECFIQPGHLCCVRISEDKWWYRVIIHRVLEKQEVEVFYPDFGNIGIVQKSSLRFLKCCYTKLPAQAIPCSLAWVRPVEEHWTSKAILQFQKLCGLKPLVGVVDEYVDGILNIFLCDTSSNEDVYFHHVLRTEGHAIVCRENISSKGFSELNPLALYTTSSGGPEDIVLTELGYPSQQHYFNEDRKISPQSKESELRILQDINDEKSLSHLKSESKEPLKDSEFESLKTCNKSFEEDPKWSNPEPNDLKEENEDEIPTGMPCLESVTIGDDIWDENWLPLQAKMGKGGDAASHLFTASLGGKNQYSSCKEMPQKDWCFSTPKDTWDDSWQPSGLVNGTKVEVHKPEVLGAQEKNTGTNRTQKQLDINGSSDSSTLPKLEEFCTSLTQSEQSADGSQSEPNNSQTQPKQIQLSTAAPCSTTAVDDSAEKPSGSVESSPEILKNEDFSSSRAITLYKDKRQESVDQLSLILSYECQISQKLYIPRSTATAALGAAARLATSRSLLHWYPSVKRMEA

SEQ ID NO: 266194 - DNA, 1476 bp, Artificial Sequence
  derived and/or modified sequence
gtgatcatccacagagtgctggagaagcaggaggtggaggtgttctaccccgacttcggcaacatcggcatcgtgcagaagagcagcctgagattcctgaagtgctgctacaccaagctgcccgcccaggccatcccctgcagcctggcctgggtgagacccgtggaggagcactggaccagcaaggccatcctgcagttccagaagctgtgcggcctgaagcccctggtgggcgtggtggacgagtacgtggacggcatcctgaacatcttcctgtgcgacaccagcagcaacgaggacgtgtacttccaccacgtgctgagaaccgagggccacgccatcgtgtgcagagagaacatcagcagcaagggcttcagcgagctgaaccccctggccctgtacaccaccagcagcggcggccccgaggacatcgtgctgaccgagctgggctaccccagccagcagcactacttcaacgaggacagaaagatcagcccccagagcaaggagagcgagctgagaatcctgcaggacatcaacgacgagaagagcctgagccacctgaagagcgagagcaaggagcccctgaaggacagcgagttcgagagcctgaagacctgcaacaagagcttcgaggaggaccccaagtggagcaaccccgagcccaacgacctgaaggaggagaacgaggacgagatccccaccggcatgccctgcctggagagcgtgaccatcggcgacgacatctgggacgagaactggctgcccctgcaggccaagatgggcaagggcggcgacgccgccagccacctgttcaccgccagcctgggcggcaagaaccagtacagcagctgcaaggagatgccccagaaggactggtgcttcagcacccccaaggacacctgggacgacagctggcagcccagcggcctggtgaacggcaccaaggtggaggtgcacaagcccgaggtgctgggcgcccaggagaagaacaccggcaccaacagaacccagaagcagctggacatcaacggcagcagcgacagcagcaccctgcccaagctggaggagttctgcaccagcctgacccagagcgagcagagcgccgacggcagccagagcgagcccaacaacagccagacccagcccaagcagatccagctgagcaccgccgccccctgcagcaccaccgccgtggacgacagcgccgagaagcccagcggcagcgtggagagcagccccgagatcctgaagaacgaggacttcagcagcagcagagccatcaccctgtacaaggacaagagacaggagagcgtggaccagctgagcctgatcctgagctacgagtgccagatcagccagaagctgtacatccccagaagcaccgccaccgccgccctgggcgccgccgccagactggccaccagcagaagcctgctgcactggtaccccagcgtgaagagaatggaggcctag

SEQ ID NO: 266195 - DNA, 3108 bp, Artificial Sequence
  derived and/or modified sequence
atgagcgagcaggagagaatccaggagtgcctgagaaaggagatcagaagcctgctgatcagcaccaaggacggcctgagcccccaggagctggagaaggagtacctgctgatggtgggcaaccacctgcccctgagaatcctgggctacagaagcaccatggagctggtgctggacatgcccgacgtggtgagagtgtgccccggcgccggcggcaccgtgatcctgaaggccatccccgacgagagcaccaagggcatcgccagcctggtggccaagcagagaagcagccacaagctgagaaacagcatgcacaagggcagacccagcatctacagcggccccagaagccacagaagagtgccctacagaggcagagtggcccccatcctgcccgccgtggtgaagagcgagctgaaggacctgctggccctgagccccgtgctgctgagcgacttcgagaaggccttcgccaagagattcggcagaagcttccagtacatgcagtacggcttcctgagcatgttcgaggtgctgaacgccgccagcgacgtgatcagcgtggagcagaccagagccggcagcctgctgatgctgaagaagagcgtgaccgaggagaagcccagaggctgccccgccggcaagatcttcacccagcccttcagaatgaagcagggcagctacagcaccggcttccccgtggccaagccctgcttcagccagcccaccagcaacatggagccccccaagcagatcatgagcatggagaagaccagcaagctgaacgtggtggagaccagcagactgaaccacaccgagaagctgaaccagctggagaacaccttcaagagcgtgatcgcccagatcggccccggcggcaccatcagcagcgagctgaagcacaagatcaagttcgtggtgagcaagttccccgagggcctgttcatcagcaagctgctgggcgagtacgaggtgatcttcaaggagcagctgagccccaagaagctgggcttcctgaacgtgaccgagctggtgggcgccctgagcgacatcctgcacgtggagttcagaaagggccaccaggacctgctggtgttcgacgccgacaagaagcccctgccccccgtgcagagcgacaagaagatcgaggccaaggcctgcgtgagcagcccccccagaaacagcctgagcaccgccgccgtgaaggagaccgtgtggaactgccccagcaagaagcagaaggagccccagcagaagatctgcaagaagcccaacctggtggtgaagcccctgcagctgcaggtggagaccaacaagagcgagctgaacctggccatggccaaccacgacatcccccccgacgccgtgcccaacaagaagctgtgcagactgccccccctggacaccagcagcctgatcggcgtgttcgtggagtacatcatcagccccagccagttctacatcagaatctacagcagagacagcagcgagctgctggaggacatgatgatcgagatgagaagatgctacagcaaccagctggtgagcgacagatacgtgatgcccgagtgcttcatccagcccggccacctgtgctgcgtgagaatcagcgaggacaagtggtggtacagagtgatcatccacagagtgctggagaagcaggaggtggaggtgttctaccccgacttcggcaacatcggcatcgtgcagaagagcagcctgagattcctgaagtgctgctacaccaagctgcccgcccaggccatcccctgcagcctggcctgggtgagacccgtggaggagcactggaccagcaaggccatcctgcagttccagaagctgtgcggcctgaagcccctggtgggcgtggtggacgagtacgtggacggcatcctgaacatcttcctgtgcgacaccagcagcaacgaggacgtgtacttccaccacgtgctgagaaccgagggccacgccatcgtgtgcagagagaacatcagcagcaagggcttcagcgagctgaaccccctggccctgtacaccaccagcagcggcggccccgaggacatcgtgctgaccgagctgggctaccccagccagcagcactacttcaacgaggacagaaagatcagcccccagagcaaggagagcgagctgagaatcctgcaggacatcaacgacgagaagagcctgagccacctgaagagcgagagcaaggagcccctgaaggacagcgagttcgagagcctgaagacctgcaacaagagcttcgaggaggaccccaagtggagcaaccccgagcccaacgacctgaaggaggagaacgaggacgagatccccaccggcatgccctgcctggagagcgtgaccatcggcgacgacatctgggacgagaactggctgcccctgcaggccaagatgggcaagggcggcgacgccgccagccacctgttcaccgccagcctgggcggcaagaaccagtacagcagctgcaaggagatgccccagaaggactggtgcttcagcacccccaaggacacctgggacgacagctggcagcccagcggcctggtgaacggcaccaaggtggaggtgcacaagcccgaggtgctgggcgcccaggagaagaacaccggcaccaacagaacccagaagcagctggacatcaacggcagcagcgacagcagcaccctgcccaagctggaggagttctgcaccagcctgacccagagcgagcagagcgccgacggcagccagagcgagcccaacaacagccagacccagcccaagcagatccagctgagcaccgccgccccctgcagcaccaccgccgtggacgacagcgccgagaagcccagcggcagcgtggagagcagccccgagatcctgaagaacgaggacttcagcagcagcagagccatcaccctgtacaaggacaagagacaggagagcgtggaccagctgagcctgatcctgagctacgagtgccagatcagccagaagctgtacatccccagaagcaccgccaccgccgccctgggcgccgccgccagactggccaccagcagaagcctgctgcactggtaccccagcgtgaagagaatggaggcctag

SEQ ID NO: 266196 - DNA, 1476 bp, Artificial Sequence
  derived and/or modified sequence
gtgataatacaccgggtgctagaaaagcaggaagtggaagttttctaccccgattttggcaatataggaattgtgcagaagagtagcctgcggttcctgaaatgctgttataccaagttgcctgctcaggctataccatgctcactcgcatgggtccgccccgtggaggagcattggacctcaaaggccattctgcaatttcaaaagttatgcggactgaagcctctagtgggcgtggtagatgagtacgttgatggtatattgaatatttttctgtgtgatactagttctaacgaggatgtctactttcatcacgtgcttcggacagaaggccatgccatcgtttgccgcgaaaatatcagttctaaaggatttagcgaactgaatccgctggccctctacacaacctcctcaggcggccccgaagacattgtactgacagaactcggctatccgtcccagcagcactacttcaatgaagacaggaaaattagcccgcaatccaaagaatccgagctcagaattctccaggatatcaatgacgagaaatctttatctcacctcaagtctgagagtaaggagcccctcaaagattccgaattcgagagcctcaaaacatgcaataaatcttttgaggaggatcctaaatggagcaatcctgagccaaacgacctaaaggaggagaacgaggatgagataccgaccggaatgccctgcctggaatccgttactataggggacgatatttgggatgaaaactggttacccctgcaggctaagatgggcaagggcggcgacgccgcaagccacttgtttactgctagtctcggcggaaaaaaccagtactccagttgtaaagagatgccgcagaaggattggtgcttctctactcccaaggacacatgggacgactcttggcaaccttctggactcgtgaacggtaccaaggtggaggtgcataagcctgaggtcctgggggcacaggagaaaaacactggaaccaaccggactcaaaaacagcttgacattaatggtagtagcgattcctctaccctcccgaaacttgaggagttctgtacatccctgacccagagcgaacagagcgctgacgggtcacagagcgaaccaaataacagccagacccagcccaaacagatccagctcagcacagcggcaccttgcagtactacagccgtagatgactcagcggagaaacccagcggtagtgtcgaaagcagcccggaaatcttaaagaatgaagatttctcctcaagccgggccattacgctgtataaagataaacgccaggagtccgttgatcagctgtcattaattctctcatatgaatgccagatttcccaaaagctgtacattccgaggagcactgctaccgccgctctgggggcggccgcccgcctggctacaagtcgtagtctgctgcattggtatcctagtgtcaaaaggatggaagcctag

SEQ ID NO: 266197 - DNA, 3108 bp, Artificial Sequence
  derived and/or modified sequence
atgagcgaacaggaaaggatacaggaatgtctccgcaaagaaattagaagtttgctgatctccaccaaggacggattgtctccacaggagctcgagaaggagtatctgctgatggtgggcaaccatttgcccctgcggatcctcggatatagaagcactatggaactagtcctggacatgcccgacgtcgtcagggtatgtcccggcgctggtggaactgtgatcctgaaggctattccggatgagtcaaccaagggaatagccagtctggtggctaagcaacgtagtagccacaaactaaggaactcaatgcacaagggcaggccttccatctatagtggccccaggagtcatcgccgggtgccttatagaggccgagttgcccccatattgcctgcggtggtgaagagcgagctcaaggacctgctggccctgtctcccgtactgctcagcgactttgaaaaagctttcgccaagagatttgggcgaagtttccagtatatgcagtacggcttcttaagcatgttcgaagtgcttaatgccgcatcagatgtgattagcgtggaacaaacaagagccggttccttgctgatgttaaagaaaagcgtgaccgaagaaaagccgcgtggatgtcccgctgggaaaatattcactcaaccgttccgaatgaagcaaggcagctactcaacaggcttcccagtggctaaaccatgctttagccagcccacttccaacatggaaccaccaaagcaaattatgtcgatggaaaaaacctccaagctgaatgtggtggagacttcacggcttaatcatacggagaagctcaaccagctggaaaacactttcaagtcagtgatcgcacagataggaccgggtggtacgatttcctccgaactcaagcataaaatcaagtttgtcgtgtctaagttcccagaagggctcttcatctccaagctgctgggcgagtatgaagtaatctttaaggagcagctttcaccgaagaagcttggcttcctgaacgtcaccgagctcgttggtgcactgtccgacatccttcatgtggaatttaggaaagggcaccaggacctgttggttttcgacgccgacaaaaaaccattgccaccggtgcagagcgacaagaagatcgaggccaaagcctgtgtgagttccccccctagaaacagtctgtccacagccgccgtgaaagagacagtctggaactgccccagcaagaaacagaaagagccacagcagaagatttgcaaaaagcccaatcttgtcgtcaagccccttcagcttcaagtggagactaataagagcgaactcaatctagccatggctaaccatgacattcccccagacgccgttccaaacaaaaagttgtgccgtcttccgcccctggatacgtcgtctctaatcggggtctttgtcgaatatataatctcccccagccaattttacatccgcatctattcgcgggactcaagcgaattgctggaagatatgatgattgagatgcggaggtgttatagcaaccagctggtgtccgatcgctacgtcatgcctgagtgctttatacaacccggccatctgtgctgcgtaagaatcagcgaggacaagtggtggtaccgtgtgatcattcaccgggtattagagaagcaggaagttgaggtgttttatccagacttcggtaacataggcatcgtgcagaaatcatccttacgcttcctgaagtgctgttataccaagctccctgcccaggctattccttgttcactcgcctgggtgcgcccagtggaagagcactggacctctaaggccattttgcagtttcagaaactgtgtgggcttaagcctctggtgggggtggtggatgaatacgttgacggaatcctcaatattttcctatgcgatacctctagcaatgaggatgtgtatttccaccatgtgctccgcacagaaggccacgccatagtctgcagggagaatatctcatccaagggcttctcggagctgaacccgctggccctttatacgacttcatctggcggacccgaggacatcgtgctcactgagcttggctaccccagccagcagcattacttcaatgaggatcggaagatttccccccaatccaaagagagtgagttacggatcctgcaggatattaacgacgaaaagagcttgagccatctgaagtctgaaagcaaggaaccattgaaggactctgaatttgagtcactaaagacttgcaataaaagctttgaggaggatcctaaatggtctaatcccgagcctaacgatctgaaggaggaaaacgaggatgaaatcccaactggcatgccatgtttagaatctgttactataggagacgacatatgggacgaaaactggcttccactgcaagcaaaaatgggaaagggcggcgacgccgcttcgcatttgtttacagccagcctcggggggaagaatcagtactcttcttgcaaagagatgccccaaaaagactggtgcttttccactcccaaggatacatgggacgactcttggcagccctcaggtctggttaacggaactaaagtcgaagtgcacaagccagaggtgttaggagctcaagagaaaaatactggcactaaccggactcagaaacagttggatatcaacggttcttccgattcttctacattgccgaagctggaagaattttgcacttctctgacacaaagcgagcagagcgccgacggatctcagtccgagcccaacaatagccagacgcagccgaaacagattcagctcagtactgccgccccatgctccactactgccgttgatgactctgccgagaagccgagcggttccgtcgagtcaagcccagagatcctgaaaaacgaggacttttcctcatcaagggctataactctgtataaagataagcggcaagagtcagtggaccagttgtcactgatcctgtcttacgaatgccaaatctctcagaagctatacatcccccggagcactgccacagccgctctcggggctgctgctcggctagccacctctcggagcctgctgcattggtatccgtcagtaaaaagaatggaagcttag

SEQ ID NO: 266198 - DNA, 1476 bp, Artificial Sequence
  derived and/or modified sequence
gtcatcatccaccgggtgctggagaagcaggaggtggaggtgttctacccagactttggaaacatcggcatcgtgcagaagagcagcctgcgcttcctgaagtgctgctacaccaagctgcctgcccaggccatcccctgcagcctggcctgggtgcggcctgtggaggagcactggaccagcaaggccatcctgcagttccagaagctgtgtggcctgaagcccctggtgggcgtggtggatgaatatgtggatggcatcctgaacatcttcctgtgtgacaccagcagcaatgaagatgtgtacttccaccacgtgctgaggacagagggccacgccatcgtgtgccgggagaacatcagcagcaagggcttcagcgagctgaaccccctggccctgtacaccaccagcagcggcggccctgaggacatcgtgctgacagagctgggctaccccagccagcagcactacttcaatgaagacaggaagatcagcccccagagcaaggagagcgagctgcgcatcctgcaggacatcaatgatgagaagagcctgagccacctgaagtctgagagcaaggagcccctgaaggacagcgagtttgagagcctgaagacctgcaacaagagctttgaggaggaccccaagtggagcaaccctgagcccaatgacctgaaggaggagaatgaagatgagatccccaccggcatgccctgcctggagagcgtgaccatcggagatgacatctgggatgagaactggctgcccctgcaggccaagatgggcaaaggaggagatgctgccagccacctgttcaccgccagcctgggcggcaagaaccagtacagcagctgcaaggagatgccccagaaggactggtgcttcagcacccccaaggacacctgggatgacagctggcagcccagcggcctggtgaatggcaccaaggtggaggtgcacaagccagaggtgctgggcgcccaggagaagaacacaggcaccaacagaacccagaagcagctggacatcaatggcagcagtgacagcagcaccctgcccaagctggaggagttctgcaccagcctgacccagagcgagcagagcgcagatggcagccagagcgagcccaacaacagccagacccagcccaagcagatccagctgagcacagctgccccctgcagcaccacagctgtggatgacagcgctgagaagcccagcggctctgtggagagcagccctgagatcctgaagaatgaagacttcagcagcagccgggccatcaccctgtacaaggacaagaggcaggagagcgtggaccagctgagcctcatcctgtcctatgagtgccagatcagccagaagctgtacatccccaggagcacagccacagctgccctgggcgccgccgcccggctggccaccagccgcagcctgctgcactggtaccccagcgtgaagaggatggaggcctag

SEQ ID NO: 266199 - DNA, 3108 bp, Artificial Sequence
  derived and/or modified sequence
atgtctgagcaggagcgcatccaggagtgcctgaggaaggagatccgcagcctgctgatcagcaccaaggatggcctgagcccccaggagctggagaaggagtacctgctgatggtgggcaaccacctgcccctgcgcatcctgggctaccgcagcaccatggagctggtgctggacatgccagatgtggtgcgggtgtgccctggggccggcggcaccgtcatcctgaaggccatcccagatgagagcaccaagggcatcgccagcctggtggccaagcagaggagcagccacaagctgagaaattccatgcacaagggccggcccagcatctacagcggccccaggagccacagaagagtgccctaccggggccgggtggcccccatcctgcctgctgtggtgaagtctgagctgaaggacctgctggccctgagccctgtgctgctgagtgactttgagaaggcctttgccaagagatttggccgctccttccagtacatgcagtatggcttcctgtccatgtttgaggtgctgaatgctgccagtgatgtgatctctgtggagcagaccagggctggcagcctgctgatgctgaagaagtctgtgacagaggagaagccccggggctgcccagctgggaagatcttcacccagcccttcaggatgaagcagggcagctacagcacaggcttccctgtggccaagccctgcttcagccagcccaccagcaacatggagccccccaagcagatcatgtccatggagaagaccagcaagctgaatgtggtggagaccagccggctgaaccacacagagaagctgaaccagctggagaacaccttcaagagcgtcatcgcccagatcggccctgggggcaccatcagcagcgagctgaagcacaagatcaagtttgtggtgtccaagtttcctgagggcctcttcatcagcaagctgctgggggagtatgaagtcatcttcaaggagcagctgagccccaagaagctgggcttcctgaatgtgacagagctggtgggcgccctgagtgacatcctgcacgtggagttcaggaagggccaccaggacctgctggtgtttgatgctgacaagaagcccctgccccctgtgcagagcgacaagaagattgaggccaaggcctgtgtgagcagccccccaagaaacagcctgagcacagctgctgtgaaggagaccgtgtggaactgccccagcaagaagcagaaggagccccagcagaagatctgcaagaagcccaacctggtggtgaagcccctgcagctgcaggtggagaccaacaagtctgagctgaacctggccatggccaaccacgacatccccccagatgctgtgcccaacaagaagctgtgccgcctgccccccctggacaccagcagcctgattggagtgtttgtggagtacatcatcagccccagccagttctacatccgcatctacagccgggacagcagcgagctgctggaggacatgatgattgagatgaggcgctgctacagcaaccagctggtgtctgacagatatgtgatgcctgagtgcttcatccagcccggccacctgtgctgcgtgcgcatcagcgaggacaagtggtggtacagagtcatcatccaccgggtgctggagaagcaggaggtggaggtgttctacccagactttggaaacatcggcatcgtgcagaagagcagcctgcgcttcctgaagtgctgctacaccaagctgcctgcccaggccatcccctgcagcctggcctgggtgcggcctgtggaggagcactggaccagcaaggccatcctgcagttccagaagctgtgtggcctgaagcccctggtgggcgtggtggatgaatatgtggatggcatcctgaacatcttcctgtgtgacaccagcagcaatgaagatgtgtacttccaccacgtgctgaggacagagggccacgccatcgtgtgccgggagaacatcagcagcaagggcttcagcgagctgaaccccctggccctgtacaccaccagcagcggcggccctgaggacatcgtgctgacagagctgggctaccccagccagcagcactacttcaatgaagacaggaagatcagcccccagagcaaggagagcgagctgcgcatcctgcaggacatcaatgatgagaagagcctgagccacctgaagtctgagagcaaggagcccctgaaggacagcgagtttgagagcctgaagacctgcaacaagagctttgaggaggaccccaagtggagcaaccctgagcccaatgacctgaaggaggagaatgaagatgagatccccaccggcatgccctgcctggagagcgtgaccatcggagatgacatctgggatgagaactggctgcccctgcaggccaagatgggcaaaggaggagatgctgccagccacctgttcaccgccagcctgggcggcaagaaccagtacagcagctgcaaggagatgccccagaaggactggtgcttcagcacccccaaggacacctgggatgacagctggcagcccagcggcctggtgaatggcaccaaggtggaggtgcacaagccagaggtgctgggcgcccaggagaagaacacaggcaccaacagaacccagaagcagctggacatcaatggcagcagtgacagcagcaccctgcccaagctggaggagttctgcaccagcctgacccagagcgagcagagcgcagatggcagccagagcgagcccaacaacagccagacccagcccaagcagatccagctgagcacagctgccccctgcagcaccacagctgtggatgacagcgctgagaagcccagcggctctgtggagagcagccctgagatcctgaagaatgaagacttcagcagcagccgggccatcaccctgtacaaggacaagaggcaggagagcgtggaccagctgagcctcatcctgtcctatgagtgccagatcagccagaagctgtacatccccaggagcacagccacagctgccctgggcgccgccgcccggctggccaccagccgcagcctgctgcactggtaccccagcgtgaagaggatggaggcctag

SEQ ID NO: 266200 - DNA, 1476 bp, Artificial Sequence
  derived and/or modified sequence
gtgatcatccaccgggtgctggagaagcaggaggtggaggtgttctacccagattttgggaacataggcatcgtccaaaaatcatcgctcagatttcttaagtgctgctacactaaactgcccgcgcaggccattccctgctccctcgcctgggtccgtccagttgaagaacactggacctcaaaagcgatcttgcagttccagaagttatgcgggttgaaaccactagtgggcgttgtggatgagtacgtggacggaatcctcaacatttttctctgcgacacctcttccaacgaagacgtgtactttcaccatgtccttcggactgaagggcatgccatcgtctgcagggaaaatatctcgagcaaaggattctccgaacttaacccactggcactgtacacaacaagcagtggcgggcccgaggacattgtactgacagaacttggctacccctcccagcagcattacttcaacgaggatcgcaaaatcagcccacaatccaaggagagtgaactgaggattttacaggacatcaacgacgagaagtctctctcacatctaaagtccgaaagcaaagaacccctaaaggactcagagtttgaaagcctgaagacatgtaataagagcttcgaggaggatcctaaatggagcaaccctgaacccaatgatctgaaggaggagaacgaagacgaaatccccacaggtatgccctgtcttgaatctgttactattggcgatgatatctgggacgaaaactggctgcctttacaggccaaaatgggcaagggcggagacgccgctagccatctcttcacagcatctctaggaggcaagaaccagtatagttcttgcaaagagatgccacagaaggactggtgcttctcaactccaaaggatacctgggacgacagctggcagccctccggtttagtgaacggaacaaaggttgaggtgcataaaccagaggtcctgggggcacaggagaaaaacacaggaacaaacaggacgcaaaagcagttggacataaacggtagttccgactcatccacactgcccaagctggaggaattttgtacatcccttactcagtcagagcagagcgctgatgggtcccagagtgaacccaacaattcacagacacagccaaagcaaatacaactcagtaccgccgcgccttgctcaaccaccgctgtggatgactccgcagagaaaccaagcggcagtgtcgaatctagccccgaaatcctgaaaaacgaagacttcagctcctcccgggccatcacactttacaaggacaagaggcaggaatctgtcgaccagctgtctcttatcctgtcctatgaatgccaaatttctcagaagctatacatccctaggtccaccgccacagccgccctgggcgctgccgctcgcctcgcaaccagtaggagcctcttacattggtatcctagtgtaaagaggatggaagcttag

SEQ ID NO: 266201 - DNA, 3108 bp, Artificial Sequence
  derived and/or modified sequence
atgagcgagcaggagcggatccaggagtgcctgcggaaggagatccgttccctgctaatttccacgaaggacgggttgagcccccaggagcttgaaaaagagtaccttctaatggtgggtaaccatctacctctacggattcttgggtacagatccaccatggaactggtattagatatgccggatgttgtgcgcgtgtgtccgggggcaggtgggaccgtgatccttaaggccattccagatgaatccactaagggcatcgcatctttggtggcaaagcagagatcctctcacaagctgagaaattccatgcacaaaggccggcctagcatatatagcggaccacggtcacacagacgggttccctacagaggaagagttgccccaatcctgccggccgtggtaaaaagtgagttgaaggatctgttagctctaagccccgtgctcctgagtgattttgaaaaggccttcgcaaagcgatttgggcgatccttccagtatatgcagtacgggttcctgagcatgttcgaagtgctgaacgctgcctctgacgttatcagcgtcgaacagacgcgcgccggttctctactgatgctgaagaagtccgttaccgaagagaagcctcgcgggtgccctgctgggaagatatttacgcaacccttcagaatgaaacaaggatcttacagcacaggcttcccagttgctaagccttgcttctcccagcctacttcgaacatggagcctcctaaacagattatgtcaatggagaagaccagcaaactcaacgtcgtggaaactagtagacttaaccataccgaaaagctgaaccaactagagaacactttcaagtctgtgatcgcccagatcggtccaggcggcaccattagttccgagctgaagcacaaaattaaatttgtagtctcgaaattcccagagggcctttttatcagtaaacttctcggcgaatatgaggtaatcttcaaggagcagctaagccccaaaaaactgggcttccttaatgtgacagaactggtgggcgccctaagcgacatcttgcatgtcgaatttagaaaaggccaccaggatctgcttgtgttcgatgccgataaaaaaccacttccccctgtgcagtccgacaagaagatcgaagcaaaggcctgcgtaagctcccccccacggaattctctgagtacagccgccgtgaaggagaccgtttggaattgtcctagcaaaaagcagaaggagccccagcagaagatttgcaaaaaacccaatttggtagtcaaacccttacaactccaggtcgaaacaaataaaagtgaactaaacctggccatggctaatcacgacataccccccgacgcagtgcctaataagaagctttgccgactgccgccattggacacctcatccctgattggagtatttgttgagtatattataagtccatctcagttctacatacgaatctactcaagggactccagcgagctgttagaggacatgatgattgaaatgcgccgatgctatagcaaccagctggtgtccgaccggtacgtcatgccagaatgcttcatccaacctggacacctgtgttgcgtgcgcatttcagaagacaagtggtggtatcgggtcattatacaccgcgttttggagaagcaagaggtcgaggtcttctatcctgactttggaaacatcgggatcgtgcagaagagctcacttcgctttttaaaatgctgctacaccaaacttcccgctcaggcaattccgtgcagcttggcatgggtccgccccgtggaagaacattggactagtaaagccattctgcagttccagaagctgtgtggccttaaaccattggtcggcgtagtcgacgagtacgtggatggtattcttaatatctttctctgtgacacctcctcgaacgaagatgtatattttcaccacgtgctgcgaaccgaaggacacgctattgtgtgtcgagagaatattagctccaaaggtttcagcgagctgaacccgcttgccttatacactacctcctcgggcggacccgaggacatagtgctcacggaactgggttacccatctcagcaacactatttcaatgaggatagaaaaatcagtcctcagagcaaggagagcgagctgaggattctgcaggatattaacgacgaaaaatccttatcccatctaaagtcagaatccaaagagcctttaaaggactctgagtttgagtccctcaagacctgcaataagagcttcgaggaggatcctaaatggtccaaccctgagcccaacgatctgaaggaggaaaacgaagacgaaatcccaaccgggatgccttgcctggagtccgttacgattggcgatgatatttgggatgagaattggctgccgttgcaggccaagatgggcaaaggaggcgatgctgcctctcacctgtttactgccagtctcgggggcaagaaccagtactctagctgcaaagagatgccacagaaggactggtgcttctccacccccaaagacacatgggacgatagctggcagcccagcggcttggtgaacggaaccaaagttgaagtacacaagcccgaagtgctgggcgcccaggagaaaaatactggaaccaaccgcacgcagaagcagctcgatattaacggatcatcagactccagtacactgccgaagctcgaggagttttgcacttcactcactcagtcagagcaatccgccgacggcagccagagcgagcctaacaacagccaaacacagcccaagcagatccagctatccactgctgctccttgctccaccacagcggtcgatgacagcgccgagaagccatccgggtcagtggagagctcacctgaaattcttaaaaatgaagacttctcatccagccgagccatcaccctctataaggataaacgccaggagtccgtggaccaacttagtctgattttatcttacgaatgccaaatttctcagaagctctacatccccagatcaacagctactgcggccctcggcgcggctgcccgtctagccaccagtagatccttactgcactggtacccgtctgttaagagaatggaagcctag

SEQ ID NO: 266202 - DNA, 1805 bp, Artificial Sequence
  derived and/or modified sequence
gtcattatccatcgagtccttgagaaacaggaagttgaagtgttctacccagactttggaaatattggaattgttcagaagtcctccctgaggttcctcaagtgctgctacacaaagcttccagctcaggctatcccttgttctttggcttgggtgagaccagtagaggaacactggacatcgaaagctattttgcagttccagaagttgtgcggtttgaagccattagtgggggtagtggatgaatatgtagatggaatccttaacatttttttgtgtgacacatcctcaaacgaagatgtctatttccatcatgtcttgagaacagagggccatgctattgtatgccgagaaaatatctcttctaagggtttcagtgagctcaaccctttagctttatacacgacatccagtggagggccagaggacattgtcttgacagaactgggttatccttcccagcagcactattttaatgaagaccgaaagataagtccacagtcaaaagagagtgagttacgtatcttgcaagatattaatgatgaaaagtctttaagtcatcttaaatctgagtcaaaggagccattaaaggattctgaatttgagtctttgaaaacctgtaataagagctttgaagaagatccaaagtggtccaacccagaaccaaacgatctgaaggaagaaaatgaggatgagatccccactggaatgccatgcctggagtcagtgaccataggtgatgatatttgggatgagaactggttacctctacaggctaagatgggaaaaggaggtgatgctgcctcccatctatttactgcaagccttggtggaaagaatcagtattcatcatgtaaagaaatgccacagaaggactggtgtttttctacccctaaagatacatgggatgattcttggcagccttcaggccttgtaaatggaacgaaagtagaagttcataagccagaagtactgggtgctcaggaaaaaaatactggcacaaacaggactcaaaagcaactagacataaatggttcttcagattcttccacactgcccaaattggaagaattctgtacctctcttacccagtcagagcagtcagcagacgggagccagtctgaacccaacaacagtcagactcagccaaagcaaattcagctttccacagcagcaccctgttcaacaactgcagtggatgattccgcagaaaagccctctggttctgtggaaagctcaccagagatcctaaagaatgaagatttttctagcagccgtgctattacattgtacaaagacaagcgtcaagaatctgtagaccagctgtctttgattttgtcttatgagtgccagatttctcagaagctctacattcctcgaagtacagccactgctgccttaggtgctgccgcacggttagctacatccaggagcctcctacactggtaccccagtgtgaaaaggatggaagcatgagggagggagggaggagggagaaaaacagaatccagccgcttaggctttgatgaactcccaggccaaaatgaggagttattgaagcaaaatagtatcttgatcattgatacttttgtctttctgtgactatatgttagctttattatgctaacagtctactttgatgtgtaagtaagtattgatatttactgttaatcttgatttttcttgattttattctgtgtcattttgttcacctttgtttttaatgtagtttaaaggaatttgtttttttgtgtttgtttttcttgtacattatcatgactgataaatgaaaattgaaaaactaa

SEQ ID NO: 266203 - DNA, 1476 bp, Artificial Sequence
  derived and/or modified sequence
gtaatcattcaccgagtgctggaaaaacaggaagtcgaggtcttctaccccgactttggcaacattggcatagtgcaaaaatcaagccttcgcttcctgaaatgctgctataccaaactacctgctcaggccatcccctgcagcctggcatgggtgcgacccgtcgaggagcattggacaagtaaagctattttgcaatttcagaagctgtgtggcctgaagccgctggtgggggtggtcgatgagtacgtcgacggcatcttgaacattttcctgtgtgatactagctcaaacgaagatgtttatttccatcacgtcctcaggactgaaggacatgccatcgtgtgtagggaaaatatcagcagcaagggcttttcagagctaaatccattggcactgtacaccacaagctctgggggacccgaggatatagtactaactgagctggggtaccccagtcaacagcactatttcaacgaggaccgcaagattagcccccagagcaaggaatcagaactgaggattctgcaggatattaacgatgagaagtcgctctcgcacctgaaatccgaatccaaggagccacttaaggactcagaattcgaatcactgaagacttgtaataaatcctttgaagaggaccctaagtggagcaaccccgaacctaacgatctgaaggaagagaacgaagatgaaattccaactggcatgccctgcctcgaatccgtgacgatcggcgatgatatttgggatgaaaattggctgccactgcaggccaagatgggcaaggggggtgacgccgcttctcacctgtttacagcctctctcggcggaaaaaaccaatacagttcctgtaaagagatgccccagaaggactggtgtttctctacccccaaggacacctgggacgactcttggcagccttcaggactcgtaaacggaaccaaagtggaggtccataaacccgaggtcctgggcgcacaggagaaaaacacgggtacaaatcgcacccagaaacaacttgatatcaacggctcctccgactccagcacccttcccaagttggaagaattttgcacctccttaacgcagagcgaacagagtgccgacggtagccagtccgagcctaataattcacagacccagcccaaacaaattcaactcagtacagcagccccttgcagtacaacagccgtggacgattccgccgagaagcccagcgggagtgtggagtcttccccggagatcctgaaaaacgaagatttttcctcaagccgagcaattactctttacaaggacaagcggcaggaaagcgtcgaccagctatctctcatcttgtcctacgaatgtcagatctcccaaaaactgtatatccccaggagtacagccacagccgcattgggagccgcagctaggctcgccactagccggtccttgcttcattggtatcctagtgtaaaaaggatggaagcttag

SEQ ID NO: 266204 - DNA, 3108 bp, Artificial Sequence
  derived and/or modified sequence
atgtctgagcaagagcggattcaggagtgtttaagaaaagaaataagatccctcttgatcagcaccaaggacggtctgtcgccccaagagttggagaaagaatacctgctgatggtgggcaatcacctcccactgaggattttgggataccggtccactatggaattggtgctcgacatgccagacgttgtccgagtgtgccctggagctggtggaactgtgattctcaaggctatccctgacgagtccaccaaaggaattgctagtcttgtggccaagcagcgaagtagtcacaagctacggaactccatgcacaagggtaggcctagtatttactcagggccacgttctcatcgcagggtgccatatagggggagggtggcccctatcctgccagccgtagtaaagtcagaattgaaagatctgctcgctctgagccccgtccttttgtccgacttcgagaaggcatttgccaaaaggttcgggcgttcattccagtatatgcagtacgggtttttatcaatgtttgaggtcctcaatgccgcatccgacgtaatctccgtggagcagacaagggccggatcccttctgatgttaaagaagtcagttacggaagaaaaacctaggggctgccccgcaggaaagatattcacccagcctttcaggatgaagcagggatcctattcaaccgggttcccagttgctaagccttgttttagtcagcccacttccaatatggaacccccaaaacagattatgtccatggagaaaacatccaaattaaatgtagtggagactagcagactaaaccacacggaaaagttaaaccaattggagaatacttttaaatctgttatcgcacagataggtcctggtgggacgattagctccgagctgaaacacaagatcaaatttgtggttagtaagtttcccgaggggctgttcattagcaaactactgggcgagtacgaggtcatctttaaagagcagctgagtcccaagaaactgggtttcttaaacgtgaccgagctcgtgggagcgctcagcgatattcttcacgtggagtttcggaaaggccaccaggatcttctcgttttcgacgccgataaaaagcccttgcctccggtccagagtgataaaaagatagaagctaaagcttgtgtgagcagcccgcctcgaaatagtctgagtaccgccgctgtgaaggagaccgtatggaattgcccttcaaaaaagcagaaagaaccacagcagaagatctgcaagaagcccaatctcgtcgttaagccccttcagcttcaggtggagacaaacaaaagcgaactgaaccttgccatggccaaccatgatatcccaccggatgcagtgcccaataaaaaactgtgccggctccccccactcgacacaagttcacttattggagtgtttgtggagtatattatcagcccgtcccaattttacatccgcatttattcccgagattcctcggaactactggaggacatgatgattgaaatgagaagatgctatagtaatcagctcgtaagcgaccggtacgtcatgccagaatgctttatacaacccggtcatctgtgttgcgtgcgcatctccgaggacaagtggtggtacagagtgattatccacagagttctggaaaagcaggaggtcgaggtattctatcccgacttcggcaatataggaatcgtgcagaagagcagtctgaggtttcttaaatgctgctacaccaagcttcccgcacaggccattccgtgttcccttgcatgggtgaggccagttgaagagcactggacaagcaaagcaattctgcaatttcagaaactgtgcggtctcaaacctctagtgggagtcgtcgacgagtacgttgatggaattctgaatatttttctttgcgacactagctctaatgaagacgtctactttcaccatgtcctcaggactgagggacacgccatcgtgtgtagggagaacatcagctccaaaggttttagcgagctaaaccccctggccctatacactactagctcgggaggaccagaggacatcgtgctgactgagttgggataccccagtcagcaacattatttcaatgaagatcgtaaaatttcccctcaatcaaaagagagcgagttgcgtattcttcaggatatcaacgacgaaaagagccttagtcatttgaagtctgaatccaaagagccgctgaaggacagtgaattcgaatcactgaaaacatgtaacaagtcatttgaagaggatccaaagtggagcaaccctgagccaaacgatctgaaggaggaaaacgaggatgagatccccaccggtatgccatgcctggaatcagtcacaataggagacgacatttgggatgaaaactggctgccactgcaggcgaagatgggtaagggcggagacgcagcttcacacctttttactgcctccctaggaggcaagaaccagtactccagctgcaaagagatgccacagaaagattggtgtttctctactccaaaggacacttgggatgatagctggcagccatctggtctcgtcaatggcaccaaggtggaagtacacaaaccggaagttctgggcgcacaggagaaaaatactgggaccaatagaacacagaaacagctcgacataaacggtagctcagactcatccactctccctaaactggaggaattctgtaccagtctcacacagtccgagcagtctgccgatggatcgcaatctgagcctaacaattcccagacccagcccaaacagatacagctcagtactgccgcaccttgcagtacgacagctgttgatgacagcgcagaaaagccttccgggtctgtagaatcatctccagagatcttgaagaatgaggatttcagttcatcaagagccattactttgtataaagataaacggcaagagagtgtggaccaactaagcctaatcctgtcatatgagtgtcagattagtcaaaagctgtatattcctcggagtactgctacagctgcgttgggtgctgccgctcggctggccacttcgcgtagtctactccactggtacccttcggttaaacggatggaagcatag

SEQ ID NO: 266205 - DNA, 3678 bp, Artificial Sequence
  derived and/or modified sequence
aatctctactcggcccgcaccagcagcgctggcgtcagggcgcggtgggggcaagacgggtgactggcagcagggcggtgccgggccgagaagggcgcctcacctggcgcctcctgccttcctttccacctcaggttgcagagagccgccagggcaggtggaagggccacgccccgctcccgtgagggtcaccgagagacgttgggggtggggcagggaccccaaccctagaccagtcctgtagggcacaatgtctgaacaagagcgtatacaggaatgtctgcggaaggaaataaggtcacttctcatttccaccaaagatggtttgagcccacaggagttggagaaggagtaccttttgatggttggcaaccatctaccactccgaatccttgggtatcggtccactatggagctggtattggacatgcctgatgttgttcgtgtctgccccggtgcaggtggtactgtaatactgaaagccattccagatgaatctaccaaaggaatagcaagcttagttgcaaaacagaggagcagccataagcttcgaaactcaatgcataagggaagacctagtatttattctggaccgagatctcatcggcgagtaccttaccgaggaagggttgcccctattcttccagctgttgtgaagagtgagttgaaggacctgttggcgttatctcctgttcttctttctgattttgaaaaggcatttgccaaaagatttggacgatcattccaatacatgcaatatggatttctctctatgtttgaagtgcttaatgcggcttcagatgtcatttctgtagagcagaccagagcaggttctttgttgatgctaaagaagagtgtaacagaggaaaagccgagaggatgtccagcaggtaaaatttttacccagccatttagaatgaaacaagggtcatactccacaggctttccggtagcaaagccatgcttttcacaacccacttcaaacatggaaccaccgaagcaaataatgagcatggaaaagacttccaagttaaatgtagtggagacttcaagactgaatcacactgaaaaattaaaccagctggagaacacattcaaatcagttattgcacagattggacctggaggaactatcagttcagaactaaaacataagataaaatttgttgtatctaagttcccagagggtttgtttatttctaaactgcttggagagtatgaggtaatttttaaagagcaactatcaccaaaaaaattaggcttcttaaatgtgacagaacttgttggagctcttagtgacattctccatgttgagttcaggaaaggacaccaagacttactagtgtttgatgcggataagaagcctctaccacctgttcagtcagataagaaaatagaagccaaagcttgtgtctccagtccacctagaaattcattgtctactgctgctgtcaaagagactgtatggaattgcccttcaaaaaaacaaaaagagccacaacagaagatttgcaagaagcctaatctggtggtaaagcctttacagctgcaagtagaaacaaacaaatcagagctcaacttggcaatggcaaatcatgacatcccgccagacgctgtgccgaacaagaaattatgcagactcccaccattagacaccagttccctcataggggtctttgtggagtatatcatctctcctagtcaattctacatccggatctatagcagggattcgtcagagttactcgaagacatgatgattgaaatgcggcgctgttattctaatcagctggtttctgatcgatatgtcatgccagaatgttttattcagccgggacatctctgttgtgtaaggatttctgaggataagtggtggtatcgggtcattatccatcgagtccttgagaaacaggaagttgaagtgttctacccagactttggaaatattggaattgttcagaagtcctccctgaggttcctcaagtgctgctacacaaagcttccagctcaggctatcccttgttctttggcttgggtgagaccagtagaggaacactggacatcgaaagctattttgcagttccagaagttgtgcggtttgaagccattagtgggggtagtggatgaatatgtagatggaatccttaacatttttttgtgtgacacatcctcaaacgaagatgtctatttccatcatgtcttgagaacagagggccatgctattgtatgccgagaaaatatctcttctaagggtttcagtgagctcaaccctttagctttatacacgacatccagtggagggccagaggacattgtcttgacagaactgggttatccttcccagcagcactattttaatgaagaccgaaagataagtccacagtcaaaagagagtgagttacgtatcttgcaagatattaatgatgaaaagtctttaagtcatcttaaatctgagtcaaaggagccattaaaggattctgaatttgagtctttgaaaacctgtaataagagctttgaagaagatccaaagtggtccaacccagaaccaaacgatctgaaggaagaaaatgaggatgagatccccactggaatgccatgcctggagtcagtgaccataggtgatgatatttgggatgagaactggttacctctacaggctaagatgggaaaaggaggtgatgctgcctcccatctatttactgcaagccttggtggaaagaatcagtattcatcatgtaaagaaatgccacagaaggactggtgtttttctacccctaaagatacatgggatgattcttggcagccttcaggccttgtaaatggaacgaaagtagaagttcataagccagaagtactgggtgctcaggaaaaaaatactggcacaaacaggactcaaaagcaactagacataaatggttcttcagattcttccacactgcccaaattggaagaattctgtacctctcttacccagtcagagcagtcagcagacgggagccagtctgaacccaacaacagtcagactcagccaaagcaaattcagctttccacagcagcaccctgttcaacaactgcagtggatgattccgcagaaaagccctctggttctgtggaaagctcaccagagatcctaaagaatgaagatttttctagcagccgtgctattacattgtacaaagacaagcgtcaagaatctgtagaccagctgtctttgattttgtcttatgagtgccagatttctcagaagctctacattcctcgaagtacagccactgctgccttaggtgctgccgcacggttagctacatccaggagcctcctacactggtaccccagtgtgaaaaggatggaagcatgagggagggagggaggagggagaaaaacagaatccagccgcttaggctttgatgaactcccaggccaaaatgaggagttattgaagcaaaatagtatcttgatcattgatacttttgtctttctgtgactatatgttagctttattatgctaacagtctactttgatgtgtaagtaagtattgatatttactgttaatcttgatttttcttgattttattctgtgtcattttgttcacctttgtttttaatgtagtttaaaggaatttgtttttttgtgtttgtttttcttgtacattatcatgactgataaatgaaaattg

SEQ ID NO: 266206 - protein, 431 aa, Artificial Sequence
  derived and/or modified sequence
MDSAITLWQFLLQLLQKPQNKHMICWTSNDGQFKLLQAEEVARLWGIRKNKPNMNYDKLSRALRYYYVKNIIKKVNGQKFVYKFVSYPEILNMDPMTVGRIEGDCESLNFSEVSSSSKDVENGGKDKPPQPGAKTSSRNDYIHSGLYSSFTLNSLNSSNVKLFKLIKTENPAEKLAEKKSPQEPTPSVIKFVTTPSKKPPVEPVAATISIGPSISPSSEETIQALETLVSPKLPSLEAPTSASNVMTAFATTPPISSIPPLQEPPRTPSPPLSSHPDIDTDIDSVASQPMELPENLSLEPKDQDSVLLEKDKVNNSSRSKKPKGLELAPTLVITSSDPSPLGILSPSLPTASLTPAFFSQTPIILTPSPLLSSIHFWSTLSPVAPLSPARLQGANTLFQFPSVLNSHGPFTLSGLDGPSTPGPFSPDLQKT

SEQ ID NO: 266207 - protein, 521 aa, Artificial Sequence
  derived and/or modified sequence
RPQDPRRRCRVRGRGGRGARSRGGGRCGRLRAPGGLGLAAAAFYGSAAGVAAAAAPSSSFQREEEAEGGEAHRVRGGDRGGAPRAASLIAMDSAITLWQFLLQLLQKPQNKHMICWTSNDGQFKLLQAEEVARLWGIRKNKPNMNYDKLSRALRYYYVKNIIKKVNGQKFVYKFVSYPEILNMDPMTVGRIEGDCESLNFSEVSSSSKDVENGGKDKPPQPGAKTSSRNDYIHSGLYSSFTLNSLNSSNVKLFKLIKTENPAEKLAEKKSPQEPTPSVIKFVTTPSKKPPVEPVAATISIGPSISPSSEETIQALETLVSPKLPSLEAPTSASNVMTAFATTPPISSIPPLQEPPRTPSPPLSSHPDIDTDIDSVASQPMELPENLSLEPKDQDSVLLEKDKVNNSSRSKKPKGLELAPTLVITSSDPSPLGILSPSLPTASLTPAFFSQTPIILTPSPLLSSIHFWSTLSPVAPLSPARLQGANTLFQFPSVLNSHGPFTLSGLDGPSTPGPFSPDLQKT

SEQ ID NO: 266208 - DNA, 1296 bp, Artificial Sequence
  derived and/or modified sequence
atggatagtgccatcaccctgtggcaattcctgctccagctgctgcaaaagcctcaaaacaagcacatgatttgctggacgtctaatgacgggcagttcaagctgctgcaggcggaagaggtcgcccgactctggggcattagaaagaacaagccaaacatgaactacgacaaactgagcagggccctccgttattattatgtgaagaacatcatcaagaaagtaaacgggcagaaatttgtgtataaattcgtgagttatccagagattcttaatatggaccctatgaccgtcgggcgtatcgaaggagactgtgaaagcctgaacttttcagaggtatctagctcaagcaaggacgtggagaatgggggtaaggataaacccccccagccaggtgcaaagacctcttctcgcaacgactacatccattctggactgtacagctctttcacgcttaattctctgaacagtagcaacgttaagctgtttaagctcataaaaactgagaacccagctgagaagctagctgagaagaagagtcctcaggaaccgacccccagtgtgatcaaatttgtcaccacccctagcaagaagcctcctgtagagccagtggcagccaccatttcaattggaccaagtatctccccaagcagcgaagagactatacaggctctcgagacgcttgttagtcccaagctccccagtctggaagcaccaacttctgctagtaatgtaatgacagcatttgcaaccactccacccattagctccattccccctctccaagagccccctcgcacgccatctccacccttgagctcccacccagatattgatacagacatcgattcagtcgccagccagcctatggaactgccggaaaatctttctctggagccaaaagaccaggactctgtcttactcgagaaggataaagtgaataactcgagccgtagcaagaagcccaaaggattggagctcgctcccacgcttgttatcaccagctccgacccttctccgttggggattctaagcccaagtctgccgacggcttccttgacccctgccttcttctctcagactcccattatccttacccctagtcctttactctcctctatacatttctggtcaactctcagcccagtggcacccttgagtccagcaaggctacagggcgcgaataccttgttccagttcccatcagtgctgaactcccatggtccattcacactgtctggtctcgatgggcccagcactccgggaccatttagtcctgacctacagaagacctag

SEQ ID NO: 266209 - DNA, 1566 bp, Artificial Sequence
  derived and/or modified sequence
cgaccacaggacccaagaagaagatgtcgggtgcggggcagaggagggaggggagcccggtcacgcggcggtggacggtgcggcaggttgcgggccccgggcgggcttgggctggccgcagcagctttctacgggtctgcagccggagtcgcagcagctgctgccccctcatcttcatttcaaagagaggaagaggccgagggtggtgaggcccaccgtgttcggggaggcgatcggggaggggcaccaagagccgcctctctgatagctatggactctgcaataaccctctggcagtttctcctgcagcttctgcagaaaccacagaacaaacatatgatatgttggacctctaacgacggccagttcaagcttcttcaagccgaggaggtcgctcggctttggggtattcgaaagaataagccgaatatgaactatgataaattgtcaagggcccttaggtactactatgtaaaaaacatcattaagaaggttaacggccaaaaattcgtctacaaattcgtgtcataccctgagatcctcaatatggatcccatgacagtcggtcgcattgagggcgattgcgagtccctgaatttcagcgaggtgagtagttcctccaaggacgtggagaacggtggaaaggacaaaccacctcagccgggagctaagacttcttcgcgtaacgattatatccactcaggcttgtactcaagctttactttaaatagtttgaacagctctaacgtaaagttgttcaagttaattaaaacagagaaccccgcggagaagttggcggagaaaaagagtccgcaggaaccaacaccgagcgttatcaagtttgtgaccaccccgtctaaaaaaccccctgtggagcccgtcgccgctacaatcagcatcggacctagtatctctcccagctccgaggagacaattcaggctttagagacactggttagtccaaagctcccttcactcgaggcaccaacatcagcttccaacgtgatgacagcatttgctaccactccccccatctcctcgatcccccctctgcaggagcccccgaggactccatcccctcccctgagttcccaccctgacatcgatactgacatcgatagcgtggcatcccagcctatggaactccccgaaaacctgtcactggaaccgaaggatcaggatagtgttctcctggaaaaggacaaggtgaacaactcttcaagaagcaagaaacctaaagggttggaactggcccccaccttggtaataacttcttccgacccgtctccacttgggatcctcagcccttctctgcccactgcctctctgacgccagcgttcttttcacaaacccccattatcctgaccccatctcccctactcagttctattcatttctggagcaccctctcgcccgtggctcctctgagccctgcccgcctgcagggggccaatacactcttccagttccctagtgttcttaattcccacggcccttttaccttgtcaggcttggatggtccgagtaccccaggaccattttcaccagacctacagaagacgtag

SEQ ID NO: 266210 - DNA, 1296 bp, Artificial Sequence
  derived and/or modified sequence
atggattctgccatcaccctgtggcagttcctgctgcagctgctgcagaagccccagaacaagcacatgatctgctggaccagcaatgatggccagttcaagctgctgcaggccgaggaggtggcccggctgtggggcatcaggaagaacaagcccaacatgaactatgacaagctgagccgggccctgcgctactactacgtgaagaacatcatcaagaaggtgaatggccagaagtttgtgtacaagtttgtgtcctacccagagatcctgaacatggaccccatgacagtgggcagaattgaaggagactgtgagagcctgaacttcagcgaggtgagcagcagcagcaaggatgtggagaatggaggcaaggacaagccaccccagcccggggccaagaccagcagcagaaatgactacatccacagcggcctgtacagcagcttcaccctgaacagcctgaacagcagcaatgtgaagctgttcaagctgatcaagacagaaaatcctgctgagaagctggccgagaagaagagcccccaggagcccaccccatctgtcatcaagtttgtgaccacccccagcaagaagccccctgtggagcctgtggccgccaccatcagcatcggccccagcatcagccccagcagcgaggagaccatccaggccctggagaccctggtgagccccaagctgcccagcctggaggcccccaccagcgccagcaatgtgatgacagcctttgccaccaccccacccatcagcagcatcccccccctgcaggagccccccaggacccccagcccccccctgagcagccacccagacatcgacacagacatcgacagcgtggccagccagcccatggagctgcctgagaacctgagcctggagcccaaggaccaggacagcgtgctgctggagaaggacaaggtgaacaacagcagccgcagcaagaagcccaagggcctggagctggcccccaccctggtgatcaccagcagtgaccccagccccctgggcatcctgagccccagcctgcccacagccagcctgaccccagccttcttcagccagacccccatcatcctgacccccagccccctgctgagcagcatccacttctggagcaccctgagccctgtggcccccctgagccctgcccggctgcagggcgccaacaccctcttccagttccccagcgtgctgaacagccacggccccttcaccctgagcggcctggatggccccagcaccccaggccccttctccccagacctgcagaagacctag

SEQ ID NO: 266211 - DNA, 1566 bp, Artificial Sequence
  derived and/or modified sequence
cggccccaggacccccggcggcgctgccgggtgcggggccggggcggccgcggggcccggagcagaggaggcggccgctgtggccgcctgcgggcccctgggggcctgggcctggccgctgctgccttctacggcagcgctgctggggtggccgctgctgctgcccccagcagcagcttccagcgggaggaggaggccgagggcggggaggcccaccgggtgcggggcggggaccggggcggggcccccagggctgccagcctgattgccatggattctgccatcaccctgtggcagttcctgctgcagctgctgcagaagccccagaacaagcacatgatctgctggaccagcaatgatggccagttcaagctgctgcaggccgaggaggtggcccggctgtggggcatcaggaagaacaagcccaacatgaactatgacaagctgagccgggccctgcgctactactacgtgaagaacatcatcaagaaggtgaatggccagaagtttgtgtacaagtttgtgtcctacccagagatcctgaacatggaccccatgacagtgggcagaattgaaggagactgtgagagcctgaacttcagcgaggtgagcagcagcagcaaggatgtggagaatggaggcaaggacaagccaccccagcccggggccaagaccagcagcagaaatgactacatccacagcggcctgtacagcagcttcaccctgaacagcctgaacagcagcaatgtgaagctgttcaagctgatcaagacagaaaatcctgctgagaagctggccgagaagaagagcccccaggagcccaccccatctgtcatcaagtttgtgaccacccccagcaagaagccccctgtggagcctgtggccgccaccatcagcatcggccccagcatcagccccagcagcgaggagaccatccaggccctggagaccctggtgagccccaagctgcccagcctggaggcccccaccagcgccagcaatgtgatgacagcctttgccaccaccccacccatcagcagcatcccccccctgcaggagccccccaggacccccagcccccccctgagcagccacccagacatcgacacagacatcgacagcgtggccagccagcccatggagctgcctgagaacctgagcctggagcccaaggaccaggacagcgtgctgctggagaaggacaaggtgaacaacagcagccgcagcaagaagcccaagggcctggagctggcccccaccctggtgatcaccagcagtgaccccagccccctgggcatcctgagccccagcctgcccacagccagcctgaccccagccttcttcagccagacccccatcatcctgacccccagccccctgctgagcagcatccacttctggagcaccctgagccctgtggcccccctgagccctgcccggctgcagggcgccaacaccctcttccagttccccagcgtgctgaacagccacggccccttcaccctgagcggcctggatggccccagcaccccaggccccttctccccagacctgcagaagacctag

SEQ ID NO: 266212 - DNA, 1296 bp, Artificial Sequence
  derived and/or modified sequence
atggacagcgccatcaccctgtggcagttcctgctgcagctgctgcagaagccccaaaacaagcacatgatttgctggacatccaacgatgggcagttcaagttactgcaggccgaggaagtcgcgagactctggggcatacggaagaacaagcctaacatgaactatgacaaactgtctagagctctgagatactactatgtcaaaaatatcatcaagaaggttaacggtcagaagttcgtgtacaagtttgttagctacccagagatcctcaacatggatcccatgactgttggacgaattgagggggattgcgagagcctgaacttttccgaggtttcttcctctagcaaagacgtggaaaatgggggcaaggacaaaccacctcaaccaggggcaaagacctcatcacgcaatgattatatccactctggactctactccagttttacactgaactctctcaatagctcgaatgtgaaactttttaaacttataaagactgagaatccagccgagaaattagctgaaaagaagtctccacaggaacctactcccagtgtaataaaatttgtaacaactccatccaaaaagcctcctgttgaacctgtcgccgcgaccatcagtatcggtccatcaatcagtccgtccagtgaggagactatccaagccctcgagacactggtcagccctaagttaccatctctggaagctccaacttccgcatccaatgtcatgactgccttcgcgactactccacctatttctagtatcccgcccctccaagaacccccgcgcaccccaagtcctcccctgagttcccatcctgacatcgatacagacatagactcagtggcttcacagccaatggagttgcctgagaacttgtctcttgaacctaaagatcaggacagcgtcttgctcgagaaggataaagtaaataattctagcaggagcaaaaagccaaagggtctagaactagccccaaccctggtgattacttcaagtgacccatcccccttgggtatactgtcaccatctttacccaccgcatctctgacacctgcctttttctctcagacaccgataatcctaaccccctctcccttgctcagttccatccacttctggagcacactgtcaccagtcgcacccctgtctcctgccaggctacaaggcgctaataccctgtttcagtttcccagcgtccttaattcgcatgggcctttcaccctgagcggccttgatggacccagcacacctggcccttttagcccagacctgcaaaaaacatag

SEQ ID NO: 266213 - DNA, 1566 bp, Artificial Sequence
  derived and/or modified sequence
cggccccaggacccccggcggcggtgccgggtgcggggccggggcggacggggggccagatcaaggggcgggggcaggtgcggcagactacgtgccccaggaggactcggtctcgcggcggccgccttttacggatctgccgccggcgtggcagctgcggcagccccatcttcttcctttcagagagaagaagaggccgagggcggggaggctcatcgcgtgcgcggtggcgataggggcggcgcgccacgggcagcctctctgattgccatggatagcgccatcacactctggcagttcctcttgcagctcctgcagaagccccagaacaagcatatgatttgctggacgtccaatgacggacaatttaaactgttacaggccgaggaggtagcccggctgtggggcatccgaaagaataaacccaatatgaattacgacaagctgagcagagcactgagatactactatgtgaaaaacattatcaagaaggtgaatggacaaaagttcgtgtataagttcgtgagctatcctgagattctgaatatggacccgatgaccgtggggagaattgaaggcgattgtgagagtcttaattttagcgaggtcagctcgagctcgaaggacgtggaaaatggaggaaaggataaacctcctcaaccgggtgccaagacaagtagcagaaatgactacattcactctggcctatattcctcctttaccctaaacagtctgaatagctccaatgtgaaactgttcaagctaataaaaaccgaaaatccggcagagaagctggctgaaaaaaagtcgccacaggagcctactcctagtgtcattaaattcgtcactacaccgagtaagaaacctccagtggaaccagtcgcagctacgattagtattggcccctccatctcgccctcatctgaggaaacgatccaggccctcgagacactagtttcccccaaattgccaagtctcgaagctccaacttctgcttccaacgttatgaccgcctttgccacaacaccccctatatcgtcaataccccccttgcaggagccacctagaactccttcacctcctctcagctcacaccccgacatcgacacagacattgattccgttgcatcgcaaccaatggaattaccagagaacttgtccctcgagccaaaggaccaggactctgttctgcttgagaaggacaaagtcaataattcttctaggagtaaaaaaccaaagggattggaactagccccaactctggtgatcacatcctcggatccttcccccctgggaatccttagcccatcactgccaaccgcttcccttacacccgcgttcttctctcagactccgatcatattaactccttcccccttgctgagctcaattcatttctggagcacactctcaccggtcgcacccctgtcaccagcaaggctgcagggagcgaatacacttttccagtttccatcagtgctcaatagtcacgggccattcaccctgagcggtctcgatggccctagcacccctgggccattttcccccgaccttcagaagacttag

SEQ ID NO: 266214 - DNA, 1296 bp, Artificial Sequence
  derived and/or modified sequence
atggatagtgcaatcaccttatggcagtttcttctgcaattgttgcagaaacctcaaaataaacatatgatctgctggactagcaacgacggccagtttaagctgttgcaggccgaggaggtggcacgcctttggggcatccgcaagaacaaacctaacatgaactacgataaactttccagggcactacgctattactacgtgaaaaatatcatcaaaaaggttaatgggcaaaaatttgtatacaagtttgtaagttacccagagatcctgaacatggacccgatgaccgttgggcgaatcgagggagactgcgaaagtctaaacttctctgaggttagctcctcctccaaggacgtcgaaaacggcggtaaggacaaacccccacaaccgggagcaaagacgtcatctagaaacgattacatccactctggtctctattcctcctttactcttaacagtctcaactcctcaaacgtcaagttattcaagctgattaaaacggagaaccctgcggaaaaactcgctgaaaagaaatccccccaagaaccgacccccagcgtgattaagtttgtcacaactccttcgaagaagccccctgttgagccagttgccgcaactattagcatcggcccttcaatcagtccttcaagcgaagagaccattcaagccctggagacccttgtgtcccccaagcttccctccctcgaggcgcctaccagtgctagcaacgtgatgactgctttcgccaccacaccccctatatcctcaattccgcctctgcaggagccaccgcgaacaccctccccacccttaagtagtcacccggatattgataccgatatcgatagcgtagcctcccagcccatggaattgcctgaaaatctcagccttgaaccgaaggaccaagactctgtattgttagagaaagataaggttaataacagtagtcggagcaagaaaccaaagggtttggagttagcaccgacgctggtgatcacatcatcagacccttctcccctcggcattctgagtccgtctctgcctaccgcttcactcactcccgcatttttctctcagacacccatcattcttaccccgagcccacttttgagctctatccacttctggtccacactgtcccctgtggcccctctgagtcctgctcgactgcagggtgctaacacactctttcaatttcctagtgtgctaaactctcatggcccttttacattgtctggtttagacggacccagcacccccggacctttcagcccagacttgcagaagacctag

SEQ ID NO: 266215 - DNA, 1566 bp, Artificial Sequence
  derived and/or modified sequence
cggcctcaggatccacgacgacgctgtcgcgtgcggggtcgtggtggcaggggggcacgatcccggggtggcggtcggtgtggccgtctccgcgcacccggaggcctcggcttggcggcagccgcattttatggtagtgccgcaggggtggcagcagcagccgctcccagctcctccttccagcgtgaggaagaggctgaaggcggtgaagcacacagagtccggggaggtgaccggggaggagctccacgtgccgcttccctgattgccatggactctgctatcacactatggcaatttcttttacagctgctccagaaaccccagaataagcacatgatttgttggacttctaacgacgggcagtttaaactgctccaggctgaggaagttgccaggctttgggggatccgcaagaacaaacccaacatgaactatgacaagctgtctcgagcactccggtattactatgtgaagaatatcattaaaaaagtcaacggccaaaaattcgtttataagtttgtgagttacccagaaatcttgaacatggatcccatgaccgtgggcagaatagaaggcgactgtgagtccctgaatttcagcgaggtgtccagctcatccaaagacgttgaaaacggtgggaaggacaaacccccacaacctggtgctaagactagctcacgtaacgactacatacacagcggtttgtactcatcttttactctgaactcactgaattcctctaacgtgaaactcttcaaacttattaagacggaaaaccccgcagaaaaactcgctgagaaaaaatcaccccaggagcccaccccttctgtgattaagttcgtcactaccccatcaaaaaaacctccagtggagcccgtggccgctacaatatctattgggccttcaatcagtccttcctccgaagaaacaatccaggcactcgagacgttggtgtcgcccaaactgccctccctggaggcacctacttccgccagtaatgtcatgacagcatttgccaccactccccctattagctcaatcccaccactgcaagaaccacccaggactccaagcccccctctcagtagccaccccgacatcgacacggacattgattccgtggcctcccagccgatggagttacccgaaaatttgtccctagagcccaaggaccaagattctgtgctgttggagaaagataaggtgaataattcttcgaggtcgaagaagcccaaaggcctggagctggccccaactctcgttatcacaagcagcgacccctcacccctcggcatcctgtccccctctctcccaaccgcaagcctgacccctgccttcttttcccagacccctatcatactgaccccctcacccctgctatcatccattcacttctggtcgactctgtctccggtggcccctctctcccctgcaagattgcagggagccaacaccctatttcagtttccaagcgtgctgaacagccacggaccttttacactgtctgggctcgacggcccatcaacccctgggccattttcccccgacctccaaaagacctag

SEQ ID NO: 266216 - DNA, 1296 bp, Artificial Sequence
  derived and/or modified sequence
atggacagcgccatcaccctgtggcagttcctgctgcagctgctgcagaagccccagaacaagcacatgatctgctggaccagcaacgacggccagttcaagctgctgcaggccgaggaggtggccagactgtggggcatcagaaagaacaagcccaacatgaactacgacaagctgagcagagccctgagatactactacgtgaagaacatcatcaagaaggtgaacggccagaagttcgtgtacaagttcgtgagctaccccgagatcctgaacatggaccccatgaccgtgggcagaatcgagggcgactgcgagagcctgaacttcagcgaggtgagcagcagcagcaaggacgtggagaacggcggcaaggacaagcccccccagcccggcgccaagaccagcagcagaaacgactacatccacagcggcctgtacagcagcttcaccctgaacagcctgaacagcagcaacgtgaagctgttcaagctgatcaagaccgagaaccccgccgagaagctggccgagaagaagagcccccaggagcccacccccagcgtgatcaagttcgtgaccacccccagcaagaagccccccgtggagcccgtggccgccaccatcagcatcggccccagcatcagccccagcagcgaggagaccatccaggccctggagaccctggtgagccccaagctgcccagcctggaggcccccaccagcgccagcaacgtgatgaccgccttcgccaccaccccccccatcagcagcatcccccccctgcaggagccccccagaacccccagcccccccctgagcagccaccccgacatcgacaccgacatcgacagcgtggccagccagcccatggagctgcccgagaacctgagcctggagcccaaggaccaggacagcgtgctgctggagaaggacaaggtgaacaacagcagcagaagcaagaagcccaagggcctggagctggcccccaccctggtgatcaccagcagcgaccccagccccctgggcatcctgagccccagcctgcccaccgccagcctgacccccgccttcttcagccagacccccatcatcctgacccccagccccctgctgagcagcatccacttctggagcaccctgagccccgtggcccccctgagccccgccagactgcagggcgccaacaccctgttccagttccccagcgtgctgaacagccacggccccttcaccctgagcggcctggacggccccagcacccccggccccttcagccccgacctgcagaagacctag

SEQ ID NO: 266217 - DNA, 1566 bp, Artificial Sequence
  derived and/or modified sequence
agaccccaggaccccagaagaagatgcagagtgagaggcagaggcggcagaggcgccagaagcagaggcggcggcagatgcggcagactgagagcccccggcggcctgggcctggccgccgccgccttctacggcagcgccgccggcgtggccgccgccgccgcccccagcagcagcttccagagagaggaggaggccgagggcggcgaggcccacagagtgagaggcggcgacagaggcggcgcccccagagccgccagcctgatcgccatggacagcgccatcaccctgtggcagttcctgctgcagctgctgcagaagccccagaacaagcacatgatctgctggaccagcaacgacggccagttcaagctgctgcaggccgaggaggtggccagactgtggggcatcagaaagaacaagcccaacatgaactacgacaagctgagcagagccctgagatactactacgtgaagaacatcatcaagaaggtgaacggccagaagttcgtgtacaagttcgtgagctaccccgagatcctgaacatggaccccatgaccgtgggcagaatcgagggcgactgcgagagcctgaacttcagcgaggtgagcagcagcagcaaggacgtggagaacggcggcaaggacaagcccccccagcccggcgccaagaccagcagcagaaacgactacatccacagcggcctgtacagcagcttcaccctgaacagcctgaacagcagcaacgtgaagctgttcaagctgatcaagaccgagaaccccgccgagaagctggccgagaagaagagcccccaggagcccacccccagcgtgatcaagttcgtgaccacccccagcaagaagccccccgtggagcccgtggccgccaccatcagcatcggccccagcatcagccccagcagcgaggagaccatccaggccctggagaccctggtgagccccaagctgcccagcctggaggcccccaccagcgccagcaacgtgatgaccgccttcgccaccaccccccccatcagcagcatcccccccctgcaggagccccccagaacccccagcccccccctgagcagccaccccgacatcgacaccgacatcgacagcgtggccagccagcccatggagctgcccgagaacctgagcctggagcccaaggaccaggacagcgtgctgctggagaaggacaaggtgaacaacagcagcagaagcaagaagcccaagggcctggagctggcccccaccctggtgatcaccagcagcgaccccagccccctgggcatcctgagccccagcctgcccaccgccagcctgacccccgccttcttcagccagacccccatcatcctgacccccagccccctgctgagcagcatccacttctggagcaccctgagccccgtggcccccctgagccccgccagactgcagggcgccaacaccctgttccagttccccagcgtgctgaacagccacggccccttcaccctgagcggcctggacggccccagcacccccggccccttcagccccgacctgcagaagacctag

SEQ ID NO: 266218 - DNA, 10239 bp, Artificial Sequence
  derived and/or modified sequence
gcggccgcggagggcctggcaggccccgccgctgcaaggaacgccccgaacgcgcgcgcccggcgtgtagcggccccaagacccgcgccgccgctgccgcgtgcgggggcggggagggcggggcgccaggagccgcggcggcgggagatgcgggcggctgcgggcacccggcgggctcggcttggccgccgccgccttctacggctccgccgcgggggtcgcagcggctgccgcgccgtcctcgagtttccagcgtgaggaggaggctgagggcggagaggcgcatcgtgttcgaggcggagaccgagggggagccccgcgcgcggcgtcgctcattgctatggacagtgctatcaccctgtggcagttccttcttcagctcctgcagaagcctcagaacaagcacatgatctgttggacctctaatgatgggcagtttaagcttttgcaggcagaagaggtggctcgtctctgggggattcgcaagaacaagcctaacatgaattatgacaaactcagccgagccctcagatactattatgtaaagaatatcatcaaaaaagtgaatggtcagaagtttgtgtacaagtttgtctcttatccagagattttgaacatggatccaatgacagtgggcaggattgagggtgactgtgaaagtttaaacttcagtgaagtcagcagcagttccaaagatgtggagaatggagggaaagataaaccacctcagcctggtgccaagacctctagccgcaatgactacatacactctggcttatattcttcatttactctcaactctttgaactcctccaatgtaaagcttttcaaattgataaagactgagaatccagccgagaaactggcagagaaaaaatctcctcaggagcccacaccatctgtcatcaaatttgtcacgacaccttccaaaaagccaccggttgaacctgttgctgccaccatttcaattggcccaagtatttctccatcttcagaagaaactatccaagctttggagacattggtttccccaaaactgccttccctggaagccccaacctctgcctctaacgtaatgactgcttttgccaccacaccacccatttcgtccataccccctttgcaggaacctcccagaacaccttcaccaccactgagttctcacccagacatcgacacagacattgattcagtggcttctcagccaatggaacttccagagaatttgtcactggagcctaaagaccaggattcagtcttgctagaaaaggacaaagtaaataattcatcaagatccaagaaacccaaagggttagaactggcacccacccttgtgatcacgagcagtgatccaagcccactgggaatactgagcccatctctccctacagcttctcttacaccagcatttttttcacagacacccatcatactgactccaagccccttgctctccagtatccacttctggagtactctcagtcctgttgctcccctaagtccagccagactgcaaggtgctaacacacttttccagtttccttctgtactgaacagtcatgggccattcactctgtctgggctggatggaccttccacccctggcccattttccccagacctacagaagacataacctatgcacttgtggaatgagagaaccgaggaacgaagaaacagacattcaacatgattgcatttgaagtgagcaattgatagttctacaatgctgataatagactattgtgatttttgccattccccattgaaaacatctttttaggattctctttgaataggactcaagttggactatatgtataaaaatgccttaattggagtctaaactccacctccctctgtcttttccttttctttttctttccttccttccttttcttttctcctttaaaaatattttgagctttgtgctgaagaagtttttggtgggctttagtgactgtgctttgcaaaagcaattaagaacaaagttactccttctggctattgggaccctttggccaggaaaaattatgcttagaatctattatttaaagaaatatttgtgaaatgaattggcatctttaggactaagtgtgctctgttgaatgacttaaagtgagctgttcctaagcagtggaagaagaagaatcattcctattcatacaaagtaagattggagcagtcatactggggagattgttttgtgtgaactataacgtgtaagcaactccatgaaaaggcatcttgtttacctttattcagggtggatctcttagccatatgtatgatcctgtctgaacctgtcaacagagcatggagctagtctatttcactatagaaagatttttagacctggggtttaagacagtttttggaacacctagtaagaatatgggacctcacatctagcacagaaatgctctttgccctctgggtggtatgattatatgcccatggaatacagcatgggaaatgatcacttttaggaggatgaacttggattttgaatatttgaaacatctctgagtaaaagattcgatcagataacttgaaacaacatgtagtggttttctcaattagaagataaccaagtgaaggacctgtctttttcctgttcattttacctcattttctactatacatttatcacctttcctttatgtttaaggttgttagaggttatgatagttttaaagatgcagttaggaaggtagaattcaaagtgaagcctccccagtcaggagcgaagatgtgcttatttcctttttttttttttttttttttttttgagacagagtcttgctctatcacccaggctggagtgcagtggcgcgatctcagctcactgtaagctccgcctcccgggttcaagcaattctcctgcctcagcctcctgagtagctgggactacaggcatgcgccactacgcctggctaatttttgtatttttagtagagacggggtttcaccatgttggccaggatggtcttgatctcttgaccttgtgatccgcccacctcagcctcccaaaggcgcaggctcagatgtgcttatttctttcaactttttttttttaaatggggaagagcagagttcatttgggaatgcttatacatagggattggattgttcatattagtagtaaaaaatgtaggccttattctctacattaccaaatttttaaaatattactatatggtaatcaatgccaggtacagatttgttggttccccaaactgaattgatatcagtatcacagtggagtcttttgaaaattaaagtccaggattaaattatatgttgtcaccattcaccaccactaccaccctcccccaccaatctctcccaccggttaaactcgtcttctaatcctgtagaatcacatgaactaaatgaagaagtaagaacttgaaggctcagactgacactgttacaaactagcatcttcagatgcatggtatttactttaaatgtgcttatatacagtgtagagaagctcttgtataagaagacatctatgctagctaacttagtagtagtagagggaacatattcagtgagctgcctttatatctgtagtgtcggagacttgttactggttcatttgtggttatcagttgaaggttctgttcctgagatgtgcaatagtagtgttgaaaggtattgtttaatagtgatggggaacagacatattggacttttttttccatattaaattatttagtttgcatgcctgtttgaaattggacctctcagcagcactttgaaatagttttaattaggttaacattttgtacattaaataagtagatatagatggttgatttaactagatgtgttaaattttgaaagcacaaaggtattttatctttttgaattaaaggagaaaagccattgatttgttttcacagacagtatttttaataattaactgtctcagcacagaggtaccttggaaccaagggcaccattgaaactcagttgaagcaacttcctagtaaaccattttagtgagtcctttttgcataaatctatagcctctcagaggtgtgaggctgtcacagattggtgatctgctatctctttgagatcaactaatttggagaagtgtgtgtgtgcgtatccttttttaagtcaaagtttacaaccttactgcaggtgtatgaggcagacagttctgtttatagactacctccttcctggaaaagtctcagcttcatattctgttgaatatatgcagaattcttagtgtgaaaggtgatgtaccacttcagatcagttttcactggagagacttgtaattggtagctgtagctcgtatccatccctagtcactttgccaggatgaatgctgttgggcagcagtagcctaagttacggaaggggagcagattgaatggggttttgagacatcttctctgataccttagctttccttctgctctggtcgctatccactcagtcgtgtgctagaaatgtttaacaaccaggatctctggggtgggggtgggggggagcgctgaatttgtagcatttgctgcaaatataaattataaataaaattctaatataaattagaattttatatcaaattctttgatataaattagttactcctcctgtggctgatttcaagctaccaccttagagttcagaaaggatgtgcacagttggctcagagccagtgctggcaaaccattgcatttactccacccaagagtggattttcacataatttctaaaataattttttcttatttatatactgacttttcaaaatacaaaattaaaatatcatgtctgacttcagtgatctttttctttttctttttttagaaatgagatctttcagtaatcctttaatttaattttttagagatggagtcttggtgtgttacccagggtggactcaaactcccgggctcaagtgatcctcctgcctcagcctcctgcatagctgggctacaggcatgcaccaccacacctggcttagtaatccttctttattaatggtttgtcacagtacgtttgtgatgttatattgctcatggcatactttatgtgttcgaacaaaggtggaaatttccattgatttttttttttttaaatgtatgcacaaacaatctggattttgaggagtacggtcaggaaaaaaaaaaaagaattagaggcccttgaaaggtcaaccgtaagcttcttagagttaaaatatgagtttaattttttcccacattttgacagttgaaattttgatagggacagtaaacctatgagcctctattaggctactggattttttttaactggaaaattccttgaagatttacatactatattacagattttaaaagtcaagactgacttaagtaaatcagaggtttggaattctggagctgtaactccaggctgttgatagtatcacttcagttccattcacccctgcattgtgtgacgtccagtctgacaacattgtttcatcctgatctgactttctactatgattcttaagttcttaaaggtgtccttttatgtttttggtgaatgtaagcacatttagagccactcagtaccacttctcaatacctctgaagcagtggttcagaaaaggagtgtccagcctttttgaacacacaaattgatcagtaagagttattgaacataaaaactttccctattaaaaattcatatgggtatatgttaaattatataccgctataccaaagtaatatgtgtgttataaaaaaatacacaaaaattgaagtgaaggatggcataaaaagtaattcttgagtagcagttatagtattttcttcccacaccccagttggttgtcttgtgcaccctccagaagcacacgcttttcctaaagactgctgactcaggatattctcattctaatctccaaacatatatgatgctctcttatgatatatggagaaatcctagagatttggagtttttcaggagagcttattgtcaacttttgaaatttcacattaattctttttgataaattcccaaataataatccattaccacatgttttccacagctttattcctattactttcgtcagcctgttgtctcttatcttcatgttaggtatgactctatttttattttactagtctgctcacagacttctttgggacttatgttatattttaccaacaaatttagaattatttcaagttgctttatgttaaaatatataacaagttacattttcttgctgcattaataagtttttgatttttaaaatctgatatttcagcaactaaaggaatacttttctttataggtctgttctgtttttaacctcattgactgtatatgttttatttacccgtgccaggagtctagaatcgtgcttaggtgccattcttaggtatgaaaacaagtttggagaccaatgcaggtctctgtgcagaaatctggggctctaaatgaattaccaaaccaataggaaagttaaaatactactcatgatgtagtgtgtcatctgaagctatgatagaatatattatttctaaaatagtattgagaagttaattgttcagtccatagtagtgtaagtgaagtgtggaggtcagccatagttgtctttcttcagcaggtactctaaccagagactgggttctgtggaaaatagaattatattcttggtttgggatcaacaaatgttttgttattgttttaatgttgctggcattgcctgaaacaaagtgccctgttattcctcttatgtcatcagaactctgcttactgaagttgaagtttaatcttaggatctagaattcttgtggttggtcgtgtattaagaaaagaaggtggtttgattttatttcttgtacttggtggaacctgttactatacaagtcatgttttgacctgtaagccgagcaaatctgaaaggtgaatcgttaatggtagtataattgtttcatttgaaactgtcagtttcttcaagtcacttctctgaaaaaaattatgatagattgatagcctgccagaaaatagcaatttctaaggtgctgccatccacacttacttattgtgaaatatgaaaatccagagtggtttgtatgagaggggaaatactggctctaagctttctacagaaaacaggaaattcatgctgttgttgacataattttaaaggaaacttttaacaagaaaattcatgagggatacaatcaaacatagttaatctcttgagtgctaatcatttgagtatagtccacatcaggaagttttatgaggttgaaaactttactttgaaatatttaattgggagactagaccatttctttttccaagtcattctgatttattgtcctagtaaatgtatgtgtatgcatatatactgatgtattgactgaatgtgtgtgtgtgtgtgtgtgcgcgtgtaaatctgttttcatagggaacatacattgatggctcctagtctattttatactaaaacttaaaaaaatttgctgcactttgcagttgccactttttaaaagattaatgctttgcacatttcagtaggccttaaagatgaattgctcaccaacattttagaaatacactgcttacatgtgacatactctaaacaaagtcatagtaaactgttctcttaggttcatgtattattgagcaaataaggatgtcctttcttaaaatttctacatttatgtttgcttttgtgtaaaatctttattagtttgtaagtttctcaaagaggaggtttatactggaagcagtatttctaaagtacagagattcgaccatggattgaatacagtagtggaggaatgctggtattgtggcctaatttatccttttaaactgtatgtcattagtattagccaaaacctcagagtggagtgtcttgggctgaatgatcttctcaactttgccttgtttcccatctcataaaggctccttctggttcttttcccttccaaggattgtgagtcatgctcacataggcctgggatcttctggatggggtcggggaggaggtgggggtttcctgtggctggcccagagttctagccaatggaatcattcaagaatgcctaaagttcaggggtgggaatgccatatattggtgttaatcacttggcactttcttgggcaccaatattagcactgtttcatttttaataactggaagcacttaatgattattttgtttgtttaatttcaacttaaggatattgagggtcagagaagtaaggtttatttcttgtttatgttttctggaatttatagggtgtttgtagaagggataaatgggttacctaatgagccattcttctaggctctgtaaggtatgcccttttggctaggatattttaaaataatttgcaagcttttaatattgtgctttgtagaaatttacgatttttaaaaataatttgcaattgatagattacacttaaatttataaagtatccaattttaagtttcttttctgtttggtcattgttgcttattgtctattgtgtaggggacacaatcctgacatttcattgttttgttacttggggcagtattaaccagtggcctttgtatgtacattcattgcttacatttattgtttaagtggtagagtagcatttttatgaacttccctgttcagtattagtgaaattgacagatgcgtatatgtaaagatagaaaagaaacgaatacaattaattttttattccttgaggcctatttatttgttttggccctggatcttttctaatcacaattatatttctttatttttgcctttgagcagtttcatttatctttgtgggcagggaagattaaatatgaaattcagtccagtcattttgctactggttagctttagtttgaggcaagtaaaaatttttgattaaaattagtttcttaaaattatgcccttgctttaccaaataatcaaattggctaaaaaataagggtatgtaactttgcattttgaagaacaaaccaataatttttcatgagccctactcgatcttctttaaagaagaccttcctaagagacaattagggatgagtttgattaatgggaaatagctctaggttagattattttaaattccatacaccaagtgatttaaccacagtggcagtggcagtttctgaaccgtcaagtatgaacatcacttaaaaattaaaagatgcttaataataaactcttaattttcattaagccaatctgtaattcagaagaaaagcatatgtctgccatgggactattgcagtgcgtctccatcagtgttaacacaggagagatatgttattttatgtgtatgtcttagtttgggatatgtggtagtaagaacatgtcaagagtgctttcttcaaacctgtcagctcaactgagaagacagttacttcattgcttattttttcccttgttttattgaaatctgtatctcatatccagtatctaacactttgtagagatacttacatataatgtaagtgcacacctacccagaggaatggataactgttaaagtgttaataatagctcgtcttagttgatttcagcataatttacattagggagacctaaaaagcaccttcaaagtattaaaagcaccttttttttttctttttcctaaaaaagcaattaaaatggtcactgctaacatttattaaacttcatgttagttgatgaaacagctggagggaagctgccacatctcctagctaagcagtctgacttacctgttgggaaacaaagggatattgctctaagattgattaggatgattgtagctagagtcttgaattctatctgtatacggcagagaaactttatagagtgtagagaggtgagcgaaaggatgcaaaagcactttgagggctttataataatatgctgcttgaaaaaaaaaatgtgtagttgatactcagtgcatctccagacatagtaaggggttgctctgaccaatcaggtgatcattttttctatcacttcccaggttttatgcaaaaattttgttaaattctataatggtgatatgcatcttttaggaaagatatacatttttaaaaatctattttatgtaagaactgacagaggaatttgctttgtataatgcaggctggctttacaaaagcactgtagcaaatttactacaagtctaaaagtatacatatatgttaatagatatatgtgcaactagatatggacagcagttgtatttttttaaataaatatttttaacaaaatga

SEQ ID NO: 266219 - DNA, 2512 bp, Artificial Sequence
  derived and/or modified sequence
gcggccccaagacccgcgccgccgctgccgcgtgcgggggcggggagggcggggcgccaggagccgcggcggcgggagatgcgggcggctgcgggcacccggcgggctcggcttggccgccgccgccttctacggctccgccgcgggggtcgcagcggctgccgcgccgtcctcgagtttccagcgtgaggaggaggctgagggcggagaggcgcatcgtgttcgaggcggagaccgagggggagccccgcgcgcggcgtcgctcattgctatggacagtgctatcaccctgtggcagttccttcttcagctcctgcagaagcctcagaacaagcacatgatctgttggacctctaatgatgggcagtttaagcttttgcaggcagaagaggtggctcgtctctgggggattcgcaagaacaagcctaacatgaattatgacaaactcagccgagccctcagatactattatgtaaagaatatcatcaaaaaagtgaatggtcagaagtttgtgtacaagtttgtctcttatccagagattttgaacatggatccaatgacagtgggcaggattgagggtgactgtgaaagtttaaacttcagtgaagtcagcagcagttccaaagatgtggagaatggagggaaagataaaccacctcagcctggtgccaagacctctagccgcaatgactacatacactctggcttatattcttcatttactctcaactctttgaactcctccaatgtaaagcttttcaaattgataaagactgagaatccagccgagaaactggcagagaaaaaatctcctcaggagcccacaccatctgtcatcaaatttgtcacgacaccttccaaaaagccaccggttgaacctgttgctgccaccatttcaattggcccaagtatttctccatcttcagaagaaactatccaagctttggagacattggtttccccaaaactgccttccctggaagccccaacctctgcctctaacgtaatgactgcttttgccaccacaccacccatttcgtccataccccctttgcaggaacctcccagaacaccttcaccaccactgagttctcacccagacatcgacacagacattgattcagtggcttctcagccaatggaacttccagagaatttgtcactggagcctaaagaccaggattcagtcttgctagaaaaggacaaagtaaataattcatcaagatccaagaaacccaaagggttagaactggcacccacccttgtgatcacgagcagtgatccaagcccactgggaatactgagcccatctctccctacagcttctcttacaccagcatttttttcacagacacccatcatactgactccaagccccttgctctccagtatccacttctggagtactctcagtcctgttgctcccctaagtccagccagactgcaaggtgctaacacacttttccagtttccttctgtactgaacagtcatgggccattcactctgtctgggctggatggaccttccacccctggcccattttccccagacctacagaagacataacctatgcacttgtggaatgagagaaccgaggaacgaagaaacagacattcaacatgattgcatttgaatgaatccgatgtgcctgatgggttagatttccatatacaagtagcagaggaaaatctgggaacagggtgattccacaggattctgaaatgtccaaattcctgaaaggaagatgaggaagaaagtcctacttgtgtaactgagaagcgtgtggtaatgatctcaaacccagagtatggtccatgcatgaggtgacaaatggagtgaagcgcgcggctgtctccttccttcccatctgggtatctggacagctcttaccaacagtctgaaccagggaagaagataacttgagaagccagggaggacagagtctccgcctgggcaccttctcttaagaactggctttgcacacagccgatgcagtccctgggcactttgaaagcagtgggcaaaagggcaggttacactaaagcaagtcccagatgtcacatcatttcaatgaggagggtatggtgagatgcagctcttcccctccctccagcagggcaaaagaggaggaaaggagaatggagtcacaatgagggagattttggaggccggaagatctagatgtgaggtcctctctgtcagtttctggaagtgtgactgacctagggtccccacataccgaaccaaccagcatctgcagcaccatctcgccaactcctgcccctgtcaccagcactgtggttgcacagcctaacaaaaagagaaggtttggtttggtaaaagcaagttaaggagacagaagccagcattacaatccaggttgctggccaggcacagtggcatatgcatttcggaaggcacatcccagtactttaggagtcagaagtgggaggatctcttgaggccaggagttcaagaccagtctgggcaatatcacaagacttggtctct

SEQ ID NO: 266220 - protein, 1068 aa, Artificial Sequence
  derived and/or modified sequence
MSNKTGGKRPATTNSDIPNHNMVSEVPPERPSVRATRTARKAVAFGKRSHSMKRNPNAPVTKAGWLFKQASSGVKQWNKRWFVLVDRCLFYYKDEKEESILGSIPLLSFRVAAVQPSDNISRKHTFKVTVCWVDEAEASSTRCLSPQAEHAGVRTYFFSAESPEEQEAWIQAMGEAARVQIPPAQKSVPQAVRHSHEKPDSENVPPSKHHQQPPHNSLPKPEPEAKTRGEGDGRGCEKAERRPERPEVKKEPPVKANGLPAGPEPASEPGSPYPEGPRVPGGGEQPAQPNGWQYHSPSRPGSTAFPSQDGETGGHRRSFPPRTNPDKIAQRKSSMNQLQQWVNLRRGVPPPEDLRSPSRFYPVSRRVPEYYGPYSSQYPDDYQYYPPGVRPESICSMPAYDRISPPWALEDKRHAFRNGGGPAYQLREWKEPASYGRQDATVWIPSPSRQPVYYDELDAASSSLRRLSLQPRSHSVPRSPSQGSYSRARIYSPVRSPSARFERLPPRSEDIYADPAAYVMRRSISSPKVPPYPEVFRDSLHTYKLNEQDTDKLLGKLCEQNKVVREQDRLVQQLRAEKESLESALMGTHQELEMFGSQPAYPEKLRHKKDSLQNQLINIRVELSQATTALTNSTIEYEHLESEVSALHDDLWEQLNLDTQNEVLNRQIQKEIWRIQDVMEGLRKNNPSRGTDTAKHRGGLGPSATYSSNSPASPLSSASLTSPLSPFSLVSGSQGSPTKPGSNEPKANYEQSKKDPHQTLPLDTPRDISLVPTRQEVEAEKQAALNKVGVVPPRTKSPTDDEVTPSAVVRRNASGLTNGLSSQERPKSAVFPGEGKVKMSVEEQIDRMRRHQSGSMREKRRSLQLPASPAPDPSPRPAYKVVRRHRSIHEVDISNLEAALRAEEPGGHAYETPREEIARLRKMELEPQHYDVDINKELSTPDKVLIPERYIDLEPDTPLSPEELKEKQKKVERIKTLIAKSSMQNVVPIGEGDSVDVPQDSESQLQEQEKRIEISCALATEASRRGRMLSVQCATPSPPTSPASPAPPANPLSSESPRGADSSYTMRV

SEQ ID NO: 266221 - DNA, 3207 bp, Artificial Sequence
  derived and/or modified sequence
atgagcaacaagaccggcggcaagagacccgccaccaccaacagcgacatccccaaccacaacatggtgagcgaggtgccccccgagagacccagcgtgagagccaccagaaccgccagaaaggccgtggccttcggcaagagaagccacagcatgaagagaaaccccaacgcccccgtgaccaaggccggctggctgttcaagcaggccagcagcggcgtgaagcagtggaacaagagatggttcgtgctggtggacagatgcctgttctactacaaggacgagaaggaggagagcatcctgggcagcatccccctgctgagcttcagagtggccgccgtgcagcccagcgacaacatcagcagaaagcacaccttcaaggtgaccgtgtgctgggtggacgaggccgaggccagcagcaccagatgcctgagcccccaggccgagcacgccggcgtgagaacctacttcttcagcgccgagagccccgaggagcaggaggcctggatccaggccatgggcgaggccgccagagtgcagatcccccccgcccagaagagcgtgccccaggccgtgagacacagccacgagaagcccgacagcgagaacgtgccccccagcaagcaccaccagcagcccccccacaacagcctgcccaagcccgagcccgaggccaagaccagaggcgagggcgacggcagaggctgcgagaaggccgagagaagacccgagagacccgaggtgaagaaggagccccccgtgaaggccaacggcctgcccgccggccccgagcccgccagcgagcccggcagcccctaccccgagggccccagagtgcccggcggcggcgagcagcccgcccagcccaacggctggcagtaccacagccccagcagacccggcagcaccgccttccccagccaggacggcgagaccggcggccacagaagaagcttcccccccagaaccaaccccgacaagatcgcccagagaaagagcagcatgaaccagctgcagcagtgggtgaacctgagaagaggcgtgcccccccccgaggacctgagaagccccagcagattctaccccgtgagcagaagagtgcccgagtactacggcccctacagcagccagtaccccgacgactaccagtactacccccccggcgtgagacccgagagcatctgcagcatgcccgcctacgacagaatcagccccccctgggccctggaggacaagagacacgccttcagaaacggcggcggccccgcctaccagctgagagagtggaaggagcccgccagctacggcagacaggacgccaccgtgtggatccccagccccagcagacagcccgtgtactacgacgagctggacgccgccagcagcagcctgagaagactgagcctgcagcccagaagccacagcgtgcccagaagccccagccagggcagctacagcagagccagaatctacagccccgtgagaagccccagcgccagattcgagagactgccccccagaagcgaggacatctacgccgaccccgccgcctacgtgatgagaagaagcatcagcagccccaaggtgcccccctaccccgaggtgttcagagacagcctgcacacctacaagctgaacgagcaggacaccgacaagctgctgggcaagctgtgcgagcagaacaaggtggtgagagagcaggacagactggtgcagcagctgagagccgagaaggagagcctggagagcgccctgatgggcacccaccaggagctggagatgttcggcagccagcccgcctaccccgagaagctgagacacaagaaggacagcctgcagaaccagctgatcaacatcagagtggagctgagccaggccaccaccgccctgaccaacagcaccatcgagtacgagcacctggagagcgaggtgagcgccctgcacgacgacctgtgggagcagctgaacctggacacccagaacgaggtgctgaacagacagatccagaaggagatctggagaatccaggacgtgatggagggcctgagaaagaacaaccccagcagaggcaccgacaccgccaagcacagaggcggcctgggccccagcgccacctacagcagcaacagccccgccagccccctgagcagcgccagcctgaccagccccctgagccccttcagcctggtgagcggcagccagggcagccccaccaagcccggcagcaacgagcccaaggccaactacgagcagagcaagaaggacccccaccagaccctgcccctggacacccccagagacatcagcctggtgcccaccagacaggaggtggaggccgagaagcaggccgccctgaacaaggtgggcgtggtgccccccagaaccaagagccccaccgacgacgaggtgacccccagcgccgtggtgagaagaaacgccagcggcctgaccaacggcctgagcagccaggagagacccaagagcgccgtgttccccggcgagggcaaggtgaagatgagcgtggaggagcagatcgacagaatgagaagacaccagagcggcagcatgagagagaagagaagaagcctgcagctgcccgccagccccgcccccgaccccagccccagacccgcctacaaggtggtgagaagacacagaagcatccacgaggtggacatcagcaacctggaggccgccctgagagccgaggagcccggcggccacgcctacgagacccccagagaggagatcgccagactgagaaagatggagctggagccccagcactacgacgtggacatcaacaaggagctgagcacccccgacaaggtgctgatccccgagagatacatcgacctggagcccgacacccccctgagccccgaggagctgaaggagaagcagaagaaggtggagagaatcaagaccctgatcgccaagagcagcatgcagaacgtggtgcccatcggcgagggcgacagcgtggacgtgccccaggacagcgagagccagctgcaggagcaggagaagagaatcgagatcagctgcgccctggccaccgaggccagcagaagaggcagaatgctgagcgtgcagtgcgccacccccagcccccccaccagccccgccagccccgccccccccgccaaccccctgagcagcgagagccccagaggcgccgacagcagctacaccatgagagtgtag

SEQ ID NO: 266222 - DNA, 3207 bp, Artificial Sequence
  derived and/or modified sequence
atgagcaataagaccggcggcaaaaggcctgccacaaccaacagcgacatcccaaatcacaacatggtaagtgaggtgccacctgagagacctagcgtgagggccacccgtaccgcacgcaaggcggtggcatttggcaaaagaagccattccatgaagagaaatcctaacgctccagttactaaggctgggtggctgttcaagcaggcttcatcaggagtgaagcagtggaataagaggtggttcgtcttggtggaccgatgtctgttctattataaggacgagaaagaagagtccattttgggaagcattccccttttatccttccgtgtggccgctgtgcagcccagcgacaacatatctcgcaaacatacctttaaagtcaccgtatgctgggttgacgaagcagaggcatcaagcactcggtgcctgagtccacaggccgaacacgccggcgtccgcacatacttcttctcagctgaatcaccggaagagcaggaggcatggattcaagcaatgggtgaggccgctagagtccaaattccaccagctcagaagagtgtcccccaggcagtgcggcattcccacgagaaacccgacagtgagaatgtccctcctagtaaacatcatcagcagcccccgcacaattcactaccaaaacctgagcctgaagctaagacccggggtgaaggggatggtcgcggatgtgaaaaggcagagagaaggcccgaacgccccgaggtcaagaaggaaccccccgtaaaggccaatggactcccagccggtcccgaaccagcctcagagccggggagtccttacccagagggccccagagtgcccggcggaggcgagcaacccgcgcagccaaacggttggcagtaccacagcccgtctcgcccagggtccactgccttcccctctcaagacggcgagacagggggtcacagaaggagtttccctccgaggacaaaccccgacaagatcgcccagcgtaaatcttccatgaaccaactgcagcagtgggtgaacctccggcgtggcgtgccgccacccgaagacctccgatctccgtcccggttttatcccgtatcccgtcgggtccccgagtactacggtccatactctagtcagtaccccgacgactaccagtactacccccccggggtccgacctgagagtatctgttccatgcctgcttatgacaggatttccccaccctgggccctggaggataaacgccacgctttccggaacgggggtgggcctgcctatcaactgcgcgagtggaaagagcctgcttcttacggccgacaggacgcgacagtttggatcccttcaccctccagacagccagtctattatgacgaactggacgccgcttctagcagcttgcggaggcttagcctgcagcctaggagccatagcgtgccacgcagcccgtcccagggttcctatagtagggcaaggatctactctcccgtgcggtcaccatccgcgagatttgaaaggctgccgcccagatccgaggatatctacgccgaccctgccgcctacgtgatgcgacggagcatctccagcccaaaagttcccccctatccagaggtcttcagggactctttacacacttataagctgaacgaacaggacaccgataagctgttgggcaagctatgcgaacagaacaaggtggttagggagcaagaccgcctcgtgcagcagctacgcgctgaaaaggagagtctcgagtcagcgctgatgggtacccaccaggaactggagatgttcggatctcagccagcctacccagagaagctccgccacaaaaaagactctctgcagaaccagcttatcaatattcgagtggagttatctcaggcaacaacggcacttactaactcaaccattgagtacgagcacctggaatctgaggtgagcgccctgcacgatgatttgtgggaacagctgaacctcgacactcagaatgaggtgctgaatagacaaatccagaaggagatctggcgcatccaagacgtgatggagggtctacggaagaataatcctagtcggggcaccgatacagccaagcaccgcggcgggctgggcccatctgccacgtactcttctaattctccagcctcacccctcagctctgcatcacttaccagccctctttcccccttctccctggtatctgggtcgcaggggagcccaaccaagcccggctccaatgagcccaaagccaattatgagcagagcaagaaggacccacaccagacactccccctggacacacccagggatatctctctggtgccaaccagacaggaagttgaagctgagaagcaggccgccctgaacaaagtcggcgtggttcctccccgcaccaaatcaccgaccgatgacgaagtgactccctccgcggtggtgaggcgcaatgcgtcaggcttaacaaacggactttcaagtcaggagagacctaaatctgctgtcttccctggagagggtaaggtcaagatgagtgttgaggagcaaatcgaccgaatgagaagacaccaaagcggaagtatgcgcgaaaagagaagatctctacagttaccggcctcaccagcccccgatcctagtccccggccagcctacaaggttgtgaggagacaccgatctatccacgaggtggacatttcgaacctggaggctgctctgcgagccgaggaaccaggtggccatgcttacgagacaccgcgggaagaaatcgcccggctccgtaaaatggaactggaaccccaacactacgacgtagatatcaataaggaattgagcacccccgacaaagttctgatcccagagcggtacatagatcttgaaccagatacgccgctttcacccgaagaactcaaagaaaaacagaagaaagtggaaagaatcaaaacactgatcgcaaagagcagcatgcagaacgtcgtgcccattggggaaggggatagtgtggatgtgccacaggactctgagtcccagctccaggagcaggaaaagagaattgagatttcatgcgcgcttgctaccgaggcctcgcgacgtggccgcatgctatctgtgcagtgcgccaccccgtctccgccgacatcgcctgcttcccctgcgcctcctgccaacccgttgtcaagcgagtcacctcgcggagctgacagcagttataccatgcgggtttag

SEQ ID NO: 266223 - DNA, 3207 bp, Artificial Sequence
  derived and/or modified sequence
atgagcaacaagacaggaggcaagaggcctgccaccaccaacagcgacatccccaaccacaacatggtgtctgaggtgcccccagagcggcccagcgtgcgggccaccaggacagccaggaaggctgtggccttcggcaagaggagccacagcatgaagaggaaccccaatgcccctgtgaccaaggccggctggctgttcaagcaggccagcagcggcgtgaagcagtggaacaagcgctggtttgtgctggtggaccgctgcctcttctactacaaggatgagaaggaggagagcatcctgggcagcatccccctgctgtccttccgggtggccgctgtgcagcccagcgacaacatcagcaggaagcacaccttcaaggtgacagtgtgctgggtggatgaggccgaggccagcagcacccgctgcctgagcccccaggccgagcacgccggcgtgaggacctacttcttctctgctgagagccctgaggagcaggaggcctggatccaggccatgggagaggccgcccgggtgcagatccccccagcccagaagtctgtgccccaggccgtgcgccacagccatgagaagccagattctgaaaatgtgccccccagcaagcaccaccagcagcccccccacaacagcctgcccaagccagagcctgaggccaagaccagaggagaaggagatggccggggctgtgagaaggccgagaggaggcctgagaggcctgaggtgaagaaggagccccctgtgaaggccaacggcctgcctgctggccctgagcccgccagcgagcccggcagcccctacccagagggcccccgggtgcctgggggcggggagcagcctgcccagcccaacggctggcagtaccacagccccagccggcccggcagcacagccttccccagccaggatggagagaccggcggccaccggcgctccttcccccccaggaccaacccagacaagatcgcccagaggaagagctccatgaaccagctgcagcagtgggtgaacctgcggcggggcgtgcccccacctgaggacctgcggagccccagccgcttctaccctgtgtccagaagagtgcctgagtactacggcccctacagcagccagtacccagatgactaccagtactacccacctggggtgcggcctgagagcatctgcagcatgcctgcctatgaccgcatcagccccccctgggccctggaggacaagagacatgccttcagaaatggaggcggccctgcctaccagctgcgggagtggaaggagcccgccagctatggccggcaggatgccaccgtgtggatccccagccccagccggcagcctgtgtactatgatgagctggatgctgccagcagcagcctgcggcggctgagcctgcagcccaggagccacagcgtgcccaggagccccagccagggcagctacagccgggcccgcatctacagccctgtgcgcagccccagcgccaggtttgagcggctgcccccaagaagtgaggacatctatgctgaccctgctgcctacgtgatgagaagaagcatcagcagccccaaggtgcccccctacccagaggtgttccgggacagcctgcacacctacaagctgaatgagcaggacacagacaagctgctgggcaagctgtgtgagcagaacaaggtggtgcgggagcaggaccggctggtgcagcagctgcgggcagagaaggagagcctggagagcgccctgatgggcacccaccaggagctggagatgtttggcagccagcctgcctacccagagaagctgcggcacaagaaggacagcctgcagaaccagctgatcaacatccgggtggagctgagccaggccaccacagccctgaccaacagcaccattgaatatgagcacctggagagcgaggtgtctgccctgcatgatgacctgtgggagcagctgaacctggacacccagaatgaggtgctgaaccggcagatccagaaggagatctggaggatccaggatgtgatggagggcctgaggaagaacaaccccagccggggcacagacacagccaagcaccggggcggcctgggccccagcgccacctacagcagcaacagccctgccagccccctgagcagcgccagcctgaccagccccctgagccccttcagcctggtgtctggcagccagggcagccccaccaagccaggcagcaatgagcccaaggccaactatgagcagagcaagaaggacccccaccagaccctgcccctggacaccccccgggacatcagcctggtgcccacccggcaggaggtggaggccgagaagcaggccgccctgaacaaggtgggcgtggtgccccccaggaccaagagccccacagatgatgaggtgacccccagcgctgtggtgagaagaaatgccagcggcctgaccaacggcctgagcagccaggagcggcccaagtctgctgtgtttcctggagagggcaaggtgaagatgtctgtggaggagcagattgacaggatgagaagacaccagagcggctccatgagggagaagaggaggagcctgcagctgcctgccagccctgccccagaccccagccccaggcctgcctacaaggtggtgagaagacacaggagcatccacgaggtggacatcagcaacctggaggccgccctgcgggcagaggagcccggcggccacgcctatgagaccccccgggaggagatcgcccggctgaggaagatggagctggagccccagcactatgatgtggacatcaacaaggagctgagcaccccagacaaggtgctgatccctgagcgctacatcgacctggagccagacacccccctgagccctgaggagctgaaggagaagcagaagaaggtggagcgcatcaagaccctcatcgccaagagctccatgcagaatgtggtgcccatcggggagggggacagcgtggatgtgccccaggacagcgagagccagctgcaggagcaggagaagagaattgagatcagctgtgccctggccacagaggccagccggcggggccgcatgctgtctgtgcagtgtgccacccccagcccccccaccagccctgccagccctgcccccccagccaaccccctgagcagcgagagccccagaggagctgacagcagctacaccatgagggtgtag

SEQ ID NO: 266224 - DNA, 3207 bp, Artificial Sequence
  derived and/or modified sequence
atgagcaacaagaccggcggcaagcggcccgccaccaccaacagcgacattcccaaccacaatatggtctctgaagttcccccagagaggccatctgtgcgggcaactcggacagccaggaaggccgttgccttcggcaaacggagccacagtatgaagcggaatccaaatgctccagtgaccaaagctggctggttattcaaacaggccagctctggagtgaaacagtggaacaagcggtggtttgttttagtggatcgatgcctgttctattacaaggacgagaaagaagagagtattcttggaagtatcccactcctgtccttccgagtcgcagccgtacagcccagcgataatatttctcgcaaacatacctttaaggttactgtctgttgggtcgacgaagccgaagcatcatctaccaggtgtctctcacctcaggcagaacacgctggcgtgcgtacgtatttctttagcgccgaatctcctgaagagcaggaggcttggattcaggcgatgggcgaggcagcacgggtccaaatacctccggcacagaaatccgttccccaggcagtacggcactctcacgaaaaacccgacagtgaaaatgtgcccccatccaagcaccaccagcagccacctcacaactcattaccgaaacctgaaccagaggccaagacacgtggcgaaggtgacgggagaggatgcgaaaaagcagaaaggcgtcccgagcggcctgaagtgaaaaaggagccccccgtaaaggcgaacggccttccagctggccctgagccagcctcggagcctggctcaccatacccagagggacctcgtgtacccgggggaggcgagcagcctgcccagcctaatggttggcaatatcacagcccatctcggcctggctccacggcctttccatcccaggacggcgagaccggaggtcacaggaggagcttccctcctcgaactaatcctgacaagattgcacaacgaaagagctctatgaatcagctgcaacagtgggtgaacttgcggcgaggcgtcccccctcctgaggacctgaggagcccgtccagattttaccccgtttccaggagagtgcctgagtactacggtccatatagctctcagtatcccgatgactatcagtattacccacccggcgtgcgcccagagagcatctgctccatgcctgcttacgatcggatctctccaccatgggcccttgaagacaaacgccatgcattccgaaacggcgggggcccagcctatcagttgcgcgaatggaaagaacccgcctcttatggacgccaggacgctaccgtgtggattccatctccctctagacagccggtgtattacgatgagttggacgctgcctctagctccctccgcagactcagtctccagcctagaagccatagcgttcctagaagcccctcccagggctcatacagcagagccaggatttattccccggtgaggtcccccagcgcccgctttgagcgcttgcccccccggtcagaggatatctacgctgacccagcagcctacgtcatgaggcggtcgatcagttcccctaaagtgcccccctaccccgaagtgttccgagactcactccacacctataagctgaatgagcaggacaccgacaaattgctgggaaagttgtgtgaacagaataaagtggtcagggagcaagatcggctggtccaacaactgcgcgccgagaaggagagcctggagtcagcactgatgggcacacaccaagagttggagatgtttgggtcccaacccgcttatcccgagaaactgcgccataagaaggacagcctccagaaccaactcattaacatcagagtcgagttaagtcaggccaccacagctctgacaaattctacaatcgagtacgagcatcttgagtcagaagtgtccgctctgcatgatgacctgtgggagcagttgaacctggacacacagaatgaagtgctgaaccgccagattcagaaagagatatggcgaattcaagacgtcatggagggacttagaaaaaataatccttctcgaggtacagataccgcgaagcacagaggcggcctgggcccaagcgccacctactctagcaattcccctgcctctccattatcttctgctagcctgacttctccgctttcccctttttcactggtgtcggggtctcagggcagcccaacaaaacctggttctaatgagcctaaagccaactacgagcagtccaaaaaggatcctcaccagacactgcccctagataccccaagggacatttccctggtgcctacgcggcaggaggtggaagcagagaagcaggcagctctcaataaggtaggagtggtcccaccccgcacaaagtccccaacagatgacgaggtgacaccaagcgccgtggtgcggcgcaacgcaagcggcctgaccaacggcctctctagtcaggaacggccgaaaagtgcagtcttccccggggaggggaaggtgaagatgtcagtagaggaacagattgacaggatgaggcgccaccagagcggatctatgcgggagaagcggaggtcccttcagctgcccgcttccccagcacccgatccatctccccggcctgcctacaaagtggtcaggcgtcataggtcaattcatgaggtggatatctctaaccttgaggctgcactgcgagctgaggaaccggggggccacgcctacgagacaccgcgggaagagattgctcgcttaagaaaaatggagctggagccccagcactacgatgtcgatatcaataaggaactcagtactccagacaaggtgctcatcccggaacggtacatcgacctggagcccgacacccctctctctcctgaagaattgaaggagaaacagaaaaaagtggagcggattaagactcttattgcaaagtctagcatgcagaacgtggtgcccattggtgagggggactccgtggacgtgccacaggactcagaaagccaactgcaggagcaggagaagcgcatcgaaatttcttgcgccttggctactgaggctagccgacgcggcaggatgctgtccgttcagtgcgccacgcctagccctccgacgtcccctgccagcccagcaccacccgcaaatcctcttagctcagagtcaccaagaggcgccgacagttcatacacgatgcgggtttag

SEQ ID NO: 266225 - DNA, 5091 bp, Artificial Sequence
  derived and/or modified sequence
gctggatcctgcagtaaccacaacagcatcctctccctgcgccagggacctgccagccggagagatgactgattagatcagattagatccggagccccgctctgcagaagggggccccaggggcgggggaggaggaccccagctggcctgagctggggggaggggtgccttggggctcgcagagttagagctttccagcgcggggatcacacctcagaagccgccacaatgaaagacggaacacatttctacacccagtgactggccaggtcccagaggaaaacaaaaaatttgacttgaaaatatcgaccttggacatgtccaataaaacaggtgggaaacgcccggctaccaccaacagtgacatacccaaccacaacatggtgtccgaggtccctccagagcggcccagcgtccgggcaactcgcacagcccgcaaagccgtcgcctttggcaagcgctcacactccatgaagcggaaccccaatgcacctgtcaccaaggcgggctggctcttcaaacaggccagctccggggttaagcagtggaacaagcgctggttcgtcctggtggatcgctgcctcttctactataaagatgagaaggaagagagtatcctgggcagcatccccctcctgagcttccgggtagccgcagtgcagccctcagacaacatcagccggaaacacacgtttaaggtgactgtgtgctgggtggatgaggccgaggccagctccacacgctgcctctccccacaggctgagcatgccggggtccgcacctacttcttcagtgccgagagccccgaggagcaagaggcctggatccaggccatgggggaggctgctcgagtacagatccctccagcccagaagtcagtgccccaagctgtgcggcacagccatgagaagccagactcggagaacgtcccacccagcaagcaccaccagcagccaccccacaacagcctccctaagcctgagccagaggccaagactcgaggggagggtgatggccgaggctgtgagaaggcagagagaaggcctgagaggccagaagtcaagaaagagcctccggtgaaagccaatggcctcccagctggaccggagccagcctcagagccgggcagcccttaccccgagggcccaagagtgccagggggtggggaacagcctgcccagcccaatggctggcagtaccactccccaagccggccagggagcacagctttcccgtctcaggatggagagactgggggacaccggcggagtttcccaccacgcaccaaccctgacaaaattgcccagcgcaagagctccatgaaccagcttcagcagtgggtgaatctgcgccggggggtacccccgcctgaagaccttcggagtccctctaggttctatcctgtgtctcgcagggtccctgagtactatggcccctactcctcccagtaccccgatgattatcagtactacccgccaggagtgcggccggagagcatctgttccatgccggcctatgatcggatcagcccgccctgggccctggaggacaagcgccatgccttccgcaatgggggtggccctgcctaccagctgcgagagtggaaggagcccgccagctacgggcggcaggatgccaccgtctggatcccaagcccctcccggcagccagtctattatgatgagctggatgccgcctctagctccctgcgccgcctgtccctgcagccccgctcccactctgtgccccgctcacccagccagggctcctacagccgtgcccgcatttactcccctgtccgctcacccagtgcccgttttgagcggctgccacctcgcagtgaggacatctatgctgaccctgctgcctatgtgatgaggcgatccatcagctcccccaaggtccctccatacccagaagtgttccgggacagcctccacacctacaagttaaacgagcaagacacagataagctgctgggaaaattgtgtgagcagaacaaggtggtgagggagcaggaccggctggtgcagcagctccgagctgagaaggagagcctggaaagtgccttgatggggacccaccaggagctggagatgtttggaagccagcccgcctacccagaaaagctgcgacacaaaaaggattcactgcagaaccagctcatcaacatccgcgtggagctgtctcaggcgaccacggccctgacaaacagcaccatagagtatgagcacctcgagtctgaggtctctgccctgcacgatgacctctgggagcagctcaatttggacacccagaatgaggtgctgaaccggcaaatccaaaaggagatctggaggatccaggacgtgatggaggggctgaggaagaacaacccctcccggggcacggacaccgccaagcacagaggaggacttggcccctcagccacctacagctccaacagcccggccagccccctcagctctgccagcctcaccagccccctgagccccttttcactggtgtcgggctctcaggggtcccccaccaagcctggctccaacgagcccaaggcaaactatgaacaaagcaagaaagacccccaccagacattgcccctggacacccccagagacatcagccttgtgcccaccaggcaagaggtagaggcagagaagcaggcagctctcaacaaagttggcgttgtgccccctcggacaaaatcgcccactgatgatgaggtgaccccatcagcagtggtaagaaggaatgccagtgggctcaccaatggactctcctcccaggaacgccccaagagtgctgtgtttcctggcgaggggaaggtcaagatgagcgtggaggagcagattgaccgaatgcggcggcaccagagtggctccatgagggagaagcggaggagcctgcagctcccggccagcccggcccccgaccccagtccccggccagcctacaaagtggtgcgccgccaccgcagcatccatgaggtagacatctccaacctggaggcagccctgcgggcagaggagcctggcgggcatgcctacgagacaccccgggaggaaattgcccggcttcgcaaaatggagctagagccccagcattatgacgtggacatcaataaggagctctccactccagacaaagtcctcatccctgaacggtacattgacctggagcctgacactcccctgagccctgaggagttgaaggagaagcagaagaaggtggagaggatcaagacactcattgccaaatccagtatgcagaacgtggtgcccatcggcgagggggactctgtggacgtgccccaggactcagagagccagctgcaggagcaggagaagcggattgaaatctcctgcgccctggcgaccgaggcctcccgcaggggccgcatgctgtctgtgcaatgtgccaccccaagccctcccacctcccctgcttccccggctcctccagcaaaccccctgtcgtctgaatccccacggggcgccgacagcagctataccatgcgggtctgagctctgactgcaagccctggctgaggccaatgctgtgaagctccacagagccacattctgaagccgtcctctgcccacctgaggtcctggctccccaccctggccccctgcccctgcactcccatgggaatgccgcagggagccaggctggggccatgggctgctgccagaggaccgtggatacctcagtgtccacacacccaccatgcccagccctggagccatcactactcacaccgtggtcctgggccagggcctgagatgacagtggggagcaccatcctcattaatgtccaagtcacagggagcctcagccttgccctggctggggttgtggtgactccagtggaacattccctgatgggggacatgccgtggtggagaacacacctgtggctatcttatgtgaggactagaggtgaagaggagatggacactgcctctggagccagcctgacaccaaggacagcacttgtcatcatccctatcctcgtcagccccaccctactgcctcagctggacccagggctttgacacaaacccagtgctttgcttatgggtgctcgctggggtccggtggagactgaccaccctgcttgagccaaagacaaggtgatgagagatggggagaggccattggctcccagagggaacagtgctggctgtggctagagaacagcaggtctgtgcagtgtctgagggcaggttgggaagggtagcagagagagagagacagaaagagagagagagagagagagagagagagatcctcagagtggaaggagggggaagcagcaggacacattggcaagtcaagcaggaaggagggagatggaaaggggatatcagattggtttcccccggtggagccttaggttagtgcccagtgcagtgccagactgtctcctctgctcctcccacctcatccctaggaggacccaccagtggagcacatgcagcctcagtggagatgcttggtgtggggatctgggtgaagggggttgagtagcgactgcctgggagatggctgttagtaggtctgtgcctggtgtctgcctcgccatcctggggtaaggggcagagagaaggacttgtcttatgtagggtgtggtcagccttggggccttacctacccagttccatgatatttcttgccctgttccccctggaatgtgcagtgggccagctgagagtacgccttgaggaggggggatgaggccttaatctgggaggcctatccccctatcccaggcatcccagacgaggactggctgaggctaggcgctctcatgatccacctgccccgggagggcagcggggaagacagagaaaagcaaacgcattcctcctcagctccacccacctggagacgaatgtagccagagaggaggaaggagggaaactgaagacaccgtggcccctcggccttctctctgctagagttgccgctcagaggcttcagcctgacttccagcggtcccaagaacacctactaattcctctgcactccttcatggctgggacagttactggttcatatgcaagtaaagatgacaatttactcaac

SEQ ID NO: 266226 - DNA, 3207 bp, Artificial Sequence
  derived and/or modified sequence
atgtccaataaaacaggcggaaaaagacctgccacaaccaattcggacatcccaaatcacaacatggtgtctgaagtaccacccgaaagacccagcgtccgagccactcgtacagccaggaaggcagtggcgttcggcaaaaggtcacacagtatgaaacggaatcccaacgccccagtgaccaaagctggctggctgtttaagcaggcatccagcggcgttaaacagtggaataagagatggtttgtgctagttgatcgctgcttgttctattacaaggatgaaaaagaagagtccattctgggatccatacccctacttagcttcagagtggccgcagttcagccctctgacaacatatcccggaagcacactttcaaagtgaccgtatgctgggttgacgaagctgaagcaagttctacgcgttgcctttcaccccaggccgaacacgctggagttcgtacttactttttcagcgccgagtcccccgaagagcaggaggcttggattcaggctatgggggaagccgctcgtgtgcagattccaccagctcagaaatcagtcccacaagcggttagacattcccatgagaagcctgattccgagaatgtgccaccctctaaacatcaccagcagccaccgcacaactcattgccaaaaccagaaccggaggctaaaactcggggagagggcgatggcagggggtgtgaaaaggcagagcgtcggcctgagcggcctgaagtgaagaaggagccccctgtgaaggccaacggcctccctgctgggccagagcccgcttctgaacccggaagtccctaccctgagggccctagagtcccaggagggggtgaacaacccgctcagcctaatgggtggcagtatcatagtcccagtcggccaggatccactgcattcccttctcaggatggcgagacaggcggacatagaagatcgttcccacctcgcaccaatccagacaagatcgcccaaaggaagagctctatgaatcagctgcaacagtgggtgaatctgcggaggggagtgccaccacccgaggacctgaggtctcccagtcgtttttaccctgtgtcccgtcgagtgccagaatattacggaccatattccagtcaataccctgacgactaccagtactacccacctggtgtcagacctgagagtatctgtagcatgcctgcctacgaccgcatctcccccccttgggcgctcgaggacaagaggcatgccttcagaaacggaggcggacccgcataccagttacgtgagtggaaagagcccgcttcttacggcaggcaggatgcaaccgtgtggatcccctcacccagtagacagcctgtttattacgacgaactggacgcagcaagttcgtccctccggagactctccctgcagcctagaagccactctgttcctaggtcaccgtcccaagggagctatagcagggccaggatctactctccagtccgcagtccaagcgctcggttcgaaaggctaccgccaaggtccgaagatatctacgcagaccctgcggcttacgtaatgaggcgcagtatcagctccccgaaggtcccaccgtatcctgaggtcttccgggactcacttcatacatacaagctgaacgagcaagacacagataaactactcgggaagctgtgtgagcaaaacaaagtcgtgcgagagcaggaccgcctggttcaacagctgcgcgcagaaaaggaatctctagagagcgctcttatggggacacatcaagaactggagatgttcggcagtcagccagcatatcctgagaagctgcgccataagaaagactccctccagaatcagttaattaacatccgcgtcgaactctctcaggccacaaccgcccttaccaattcgactattgaatatgaacacctagagagcgaagtgtcagccctgcatgatgatctgtgggaacaactaaatctcgacacccagaacgaggtgttgaacagacagattcagaaagagatttggagaatccaggacgttatggaaggcctcagaaaaaacaacccaagtcgaggtaccgatacggcgaagcatcgtgggggattaggcccatcagcaacctactctagcaattctccagctagcccattaagctcagcatccctgacatctccactctcccctttcagcctcgtaagtggatctcaagggtcaccaactaagcccggatccaatgagccgaaagctaattatgagcaatctaagaaggatccacaccaaactcttcctctggatactcctcgcgacatcagcctggtgcctactcgccaagaagtggaggccgaaaagcaggctgcactgaataaagtgggcgttgttccaccaagaaccaaaagcccaacagacgatgaggtgaccccgtcggctgtggttaggaggaacgccagcggccttacaaacgggttatcctcccaggagaggccaaaaagcgctgtattccctggggaaggcaaagttaagatgtctgtggaggaacaaatcgataggatgagaaggcaccagtccggatctatgagggagaagcggaggagccttcagcttccagcttctccagccccagaccctagtccaagacccgcttacaaagttgttcggagacaccgtagcattcacgaggtggacattagcaatttggaagccgcactgcgtgcagaggagcccggtggccacgcatacgaaacccctcgcgaggagattgccaggcttcgtaagatggagctagaaccccaacactatgacgtagatatcaataaggaactgtccaccccagacaaggtcctgatccccgagcgatacattgatctcgaacccgataccccactttctcccgaggaactgaaggaaaaacaaaaaaaagtggaacgcattaagacgctgatcgcaaagtcttctatgcagaatgtagttccaattggcgagggggattcagttgacgtgccacaggatagtgagtctcaactacaggaacaggagaaacgaatcgagatttcctgtgcgctggctactgaagctagccgacgagggaggatgctgtccgttcagtgtgcaactcccagtccgcctaccagtcccgcatcccccgcaccaccagcaaatccattatcctctgagagcccaagaggcgcagatagcagctacacgatgagggtgtag

SEQ ID NO: 266227 - protein, 1189 aa, Artificial Sequence
  derived and/or modified sequence
MARQPPPPWVHAAFLLCLLSLGGAIEIPMDLTQPPTITKQSAKDHIVDPRDNILIECEAKGNPAPSFHWTRNSRFFNIAKDPRVSMRRRSGTLVIDFRSGGRPEEYEGEYQCFARNKFGTALSNRIRLQVSKSPLWPKENLDPVVVQEGAPLTLQCNPPPGLPSPVIFWMSSSMEPITQDKRVSQGHNGDLYFSNVMLQDMQTDYSCNARFHFTHTIQQKNPFTLKVLTNHPYNDSSLRNHPDMYSARGVAERTPSFMYPQGTASSQMVLRGMDLLLECIASGVPTPDIAWYKKGGDLPSDKAKFENFNKALRITNVSEEDSGEYFCLASNKMGSIRHTISVRVKAAPYWLDEPKNLILAPGEDGRLVCRANGNPKPTVQWMVNGEPLQSAPPNPNREVAGDTIIFRDTQISSRAVYQCNTSNEHGYLLANAFVSVLDVPPRMLSPRNQLIRVILYNRTRLDCPFFGSPIPTLRWFKNGQGSNLDGGNYHVYENGSLEIKMIRKEDQGIYTCVATNILGKAENQVRLEVKDPTRIYRMPEDQVARRGTTVQLECRVKHDPSLKLTVSWLKDDEPLYIGNRMKKEDDSLTIFGVAERDQGSYTCVASTELDQDLAKAYLTVLADQATPTNRLAALPKGRPDRPRDLELTDLAERSVRLTWIPGDANNSPITDYVVQFEEDQFQPGVWHDHSKYPGSVNSAVLRLSPYVNYQFRVIAINEVGSSHPSLPSERYRTSGAPPESNPGDVKGEGTRKNNMEITWTPMNATSAFGPNLRYIVKWRRRETREAWNNVTVWGSRYVVGQTPVYVPYEIRVQAENDFGKGPEPESVIGYSGEDYPRAAPTEVKVRVMNSTAISLQWNRVYSDTVQGQLREYRAYYWRESSLLKNLWVSQKRQQASFPGDRLRGVVSRLFPYSNYKLEMVVVNGRGDGPRSETKEFTTPEGVPSAPRRFRVRQPNLETINLEWDHPEHPNGIMIGYTLKYVAFNGTKVGKQIVENFSPNQTKFTVQRTDPVSRYRFTLSARTQVGSGEAVTEESPAPPNEGSPLAAYTNNQADIATQGWFIGLMCAIALLVLILLIVCFIKRSRGGKYPVREKKDVPLGPEDPKEEDGSFDYSDEDNKPLQGSQTSLDGTIKQQESDDSLVDYGEGGEGQFNEDGSFIGQYTVKKDKEETEGNESSEATSPVNAIYSLA

SEQ ID NO: 266228 - protein, 1165 aa, Artificial Sequence
  derived and/or modified sequence
IEIPMDLTQPPTITKQSAKDHIVDPRDNILIECEAKGNPAPSFHWTRNSRFFNIAKDPRVSMRRRSGTLVIDFRSGGRPEEYEGEYQCFARNKFGTALSNRIRLQVSKSPLWPKENLDPVVVQEGAPLTLQCNPPPGLPSPVIFWMSSSMEPITQDKRVSQGHNGDLYFSNVMLQDMQTDYSCNARFHFTHTIQQKNPFTLKVLTNHPYNDSSLRNHPDMYSARGVAERTPSFMYPQGTASSQMVLRGMDLLLECIASGVPTPDIAWYKKGGDLPSDKAKFENFNKALRITNVSEEDSGEYFCLASNKMGSIRHTISVRVKAAPYWLDEPKNLILAPGEDGRLVCRANGNPKPTVQWMVNGEPLQSAPPNPNREVAGDTIIFRDTQISSRAVYQCNTSNEHGYLLANAFVSVLDVPPRMLSPRNQLIRVILYNRTRLDCPFFGSPIPTLRWFKNGQGSNLDGGNYHVYENGSLEIKMIRKEDQGIYTCVATNILGKAENQVRLEVKDPTRIYRMPEDQVARRGTTVQLECRVKHDPSLKLTVSWLKDDEPLYIGNRMKKEDDSLTIFGVAERDQGSYTCVASTELDQDLAKAYLTVLADQATPTNRLAALPKGRPDRPRDLELTDLAERSVRLTWIPGDANNSPITDYVVQFEEDQFQPGVWHDHSKYPGSVNSAVLRLSPYVNYQFRVIAINEVGSSHPSLPSERYRTSGAPPESNPGDVKGEGTRKNNMEITWTPMNATSAFGPNLRYIVKWRRRETREAWNNVTVWGSRYVVGQTPVYVPYEIRVQAENDFGKGPEPESVIGYSGEDYPRAAPTEVKVRVMNSTAISLQWNRVYSDTVQGQLREYRAYYWRESSLLKNLWVSQKRQQASFPGDRLRGVVSRLFPYSNYKLEMVVVNGRGDGPRSETKEFTTPEGVPSAPRRFRVRQPNLETINLEWDHPEHPNGIMIGYTLKYVAFNGTKVGKQIVENFSPNQTKFTVQRTDPVSRYRFTLSARTQVGSGEAVTEESPAPPNEATPTAAYTNNQADIATQGWFIGLMCAIALLVLILLIVCFIKRSRGGKYPVREKKDVPLGPEDPKEEDGSFDYSDEDNKPLQGSQTSLDGTIKQQESDDSLVDYGEGGEGQFNEDGSFIGQYTVKKDKEETEGNESSEATSPVNAIYSLA

SEQ ID NO: 266229 - DNA, 3570 bp, Artificial Sequence
  derived and/or modified sequence
atggccagacagcccccccccccctgggtgcacgccgccttcctgctgtgcctgctgagcctgggcggcgccatcgagatccccatggacctgacccagccccccaccatcaccaagcagagcgccaaggaccacatcgtggaccccagagacaacatcctgatcgagtgcgaggccaagggcaaccccgcccccagcttccactggaccagaaacagcagattcttcaacatcgccaaggaccccagagtgagcatgagaagaagaagcggcaccctggtgatcgacttcagaagcggcggcagacccgaggagtacgagggcgagtaccagtgcttcgccagaaacaagttcggcaccgccctgagcaacagaatcagactgcaggtgagcaagagccccctgtggcccaaggagaacctggaccccgtggtggtgcaggagggcgcccccctgaccctgcagtgcaaccccccccccggcctgcccagccccgtgatcttctggatgagcagcagcatggagcccatcacccaggacaagagagtgagccagggccacaacggcgacctgtacttcagcaacgtgatgctgcaggacatgcagaccgactacagctgcaacgccagattccacttcacccacaccatccagcagaagaaccccttcaccctgaaggtgctgaccaaccacccctacaacgacagcagcctgagaaaccaccccgacatgtacagcgccagaggcgtggccgagagaacccccagcttcatgtacccccagggcaccgccagcagccagatggtgctgagaggcatggacctgctgctggagtgcatcgccagcggcgtgcccacccccgacatcgcctggtacaagaagggcggcgacctgcccagcgacaaggccaagttcgagaacttcaacaaggccctgagaatcaccaacgtgagcgaggaggacagcggcgagtacttctgcctggccagcaacaagatgggcagcatcagacacaccatcagcgtgagagtgaaggccgccccctactggctggacgagcccaagaacctgatcctggcccccggcgaggacggcagactggtgtgcagagccaacggcaaccccaagcccaccgtgcagtggatggtgaacggcgagcccctgcagagcgccccccccaaccccaacagagaggtggccggcgacaccatcatcttcagagacacccagatcagcagcagagccgtgtaccagtgcaacaccagcaacgagcacggctacctgctggccaacgccttcgtgagcgtgctggacgtgccccccagaatgctgagccccagaaaccagctgatcagagtgatcctgtacaacagaaccagactggactgccccttcttcggcagccccatccccaccctgagatggttcaagaacggccagggcagcaacctggacggcggcaactaccacgtgtacgagaacggcagcctggagatcaagatgatcagaaaggaggaccagggcatctacacctgcgtggccaccaacatcctgggcaaggccgagaaccaggtgagactggaggtgaaggaccccaccagaatctacagaatgcccgaggaccaggtggccagaagaggcaccaccgtgcagctggagtgcagagtgaagcacgaccccagcctgaagctgaccgtgagctggctgaaggacgacgagcccctgtacatcggcaacagaatgaagaaggaggacgacagcctgaccatcttcggcgtggccgagagagaccagggcagctacacctgcgtggccagcaccgagctggaccaggacctggccaaggcctacctgaccgtgctggccgaccaggccacccccaccaacagactggccgccctgcccaagggcagacccgacagacccagagacctggagctgaccgacctggccgagagaagcgtgagactgacctggatccccggcgacgccaacaacagccccatcaccgactacgtggtgcagttcgaggaggaccagttccagcccggcgtgtggcacgaccacagcaagtaccccggcagcgtgaacagcgccgtgctgagactgagcccctacgtgaactaccagttcagagtgatcgccatcaacgaggtgggcagcagccaccccagcctgcccagcgagagatacagaaccagcggcgccccccccgagagcaaccccggcgacgtgaagggcgagggcaccagaaagaacaacatggagatcacctggacccccatgaacgccaccagcgccttcggccccaacctgagatacatcgtgaagtggagaagaagagagaccagagaggcctggaacaacgtgaccgtgtggggcagcagatacgtggtgggccagacccccgtgtacgtgccctacgagatcagagtgcaggccgagaacgacttcggcaagggccccgagcccgagagcgtgatcggctacagcggcgaggactaccccagagccgcccccaccgaggtgaaggtgagagtgatgaacagcaccgccatcagcctgcagtggaacagagtgtacagcgacaccgtgcagggccagctgagagagtacagagcctactactggagagagagcagcctgctgaagaacctgtgggtgagccagaagagacagcaggccagcttccccggcgacagactgagaggcgtggtgagcagactgttcccctacagcaactacaagctggagatggtggtggtgaacggcagaggcgacggccccagaagcgagaccaaggagttcaccacccccgagggcgtgcccagcgcccccagaagattcagagtgagacagcccaacctggagaccatcaacctggagtgggaccaccccgagcaccccaacggcatcatgatcggctacaccctgaagtacgtggccttcaacggcaccaaggtgggcaagcagatcgtggagaacttcagccccaaccagaccaagttcaccgtgcagagaaccgaccccgtgagcagatacagattcaccctgagcgccagaacccaggtgggcagcggcgaggccgtgaccgaggagagccccgccccccccaacgagggcagccccctggccgcctacaccaacaaccaggccgacatcgccacccagggctggttcatcggcctgatgtgcgccatcgccctgctggtgctgatcctgctgatcgtgtgcttcatcaagagaagcagaggcggcaagtaccccgtgagagagaagaaggacgtgcccctgggccccgaggaccccaaggaggaggacggcagcttcgactacagcgacgaggacaacaagcccctgcagggcagccagaccagcctggacggcaccatcaagcagcaggagagcgacgacagcctggtggactacggcgagggcggcgagggccagttcaacgaggacggcagcttcatcggccagtacaccgtgaagaaggacaaggaggagaccgagggcaacgagagcagcgaggccaccagccccgtgaacgccatctacagcctggcctag

SEQ ID NO: 266230 - DNA, 3498 bp, Artificial Sequence
  derived and/or modified sequence
atcgagatccccatggacctgacccagccccccaccatcaccaagcagagcgccaaggaccacatcgtggaccccagagacaacatcctgatcgagtgcgaggccaagggcaaccccgcccccagcttccactggaccagaaacagcagattcttcaacatcgccaaggaccccagagtgagcatgagaagaagaagcggcaccctggtgatcgacttcagaagcggcggcagacccgaggagtacgagggcgagtaccagtgcttcgccagaaacaagttcggcaccgccctgagcaacagaatcagactgcaggtgagcaagagccccctgtggcccaaggagaacctggaccccgtggtggtgcaggagggcgcccccctgaccctgcagtgcaaccccccccccggcctgcccagccccgtgatcttctggatgagcagcagcatggagcccatcacccaggacaagagagtgagccagggccacaacggcgacctgtacttcagcaacgtgatgctgcaggacatgcagaccgactacagctgcaacgccagattccacttcacccacaccatccagcagaagaaccccttcaccctgaaggtgctgaccaaccacccctacaacgacagcagcctgagaaaccaccccgacatgtacagcgccagaggcgtggccgagagaacccccagcttcatgtacccccagggcaccgccagcagccagatggtgctgagaggcatggacctgctgctggagtgcatcgccagcggcgtgcccacccccgacatcgcctggtacaagaagggcggcgacctgcccagcgacaaggccaagttcgagaacttcaacaaggccctgagaatcaccaacgtgagcgaggaggacagcggcgagtacttctgcctggccagcaacaagatgggcagcatcagacacaccatcagcgtgagagtgaaggccgccccctactggctggacgagcccaagaacctgatcctggcccccggcgaggacggcagactggtgtgcagagccaacggcaaccccaagcccaccgtgcagtggatggtgaacggcgagcccctgcagagcgccccccccaaccccaacagagaggtggccggcgacaccatcatcttcagagacacccagatcagcagcagagccgtgtaccagtgcaacaccagcaacgagcacggctacctgctggccaacgccttcgtgagcgtgctggacgtgccccccagaatgctgagccccagaaaccagctgatcagagtgatcctgtacaacagaaccagactggactgccccttcttcggcagccccatccccaccctgagatggttcaagaacggccagggcagcaacctggacggcggcaactaccacgtgtacgagaacggcagcctggagatcaagatgatcagaaaggaggaccagggcatctacacctgcgtggccaccaacatcctgggcaaggccgagaaccaggtgagactggaggtgaaggaccccaccagaatctacagaatgcccgaggaccaggtggccagaagaggcaccaccgtgcagctggagtgcagagtgaagcacgaccccagcctgaagctgaccgtgagctggctgaaggacgacgagcccctgtacatcggcaacagaatgaagaaggaggacgacagcctgaccatcttcggcgtggccgagagagaccagggcagctacacctgcgtggccagcaccgagctggaccaggacctggccaaggcctacctgaccgtgctggccgaccaggccacccccaccaacagactggccgccctgcccaagggcagacccgacagacccagagacctggagctgaccgacctggccgagagaagcgtgagactgacctggatccccggcgacgccaacaacagccccatcaccgactacgtggtgcagttcgaggaggaccagttccagcccggcgtgtggcacgaccacagcaagtaccccggcagcgtgaacagcgccgtgctgagactgagcccctacgtgaactaccagttcagagtgatcgccatcaacgaggtgggcagcagccaccccagcctgcccagcgagagatacagaaccagcggcgccccccccgagagcaaccccggcgacgtgaagggcgagggcaccagaaagaacaacatggagatcacctggacccccatgaacgccaccagcgccttcggccccaacctgagatacatcgtgaagtggagaagaagagagaccagagaggcctggaacaacgtgaccgtgtggggcagcagatacgtggtgggccagacccccgtgtacgtgccctacgagatcagagtgcaggccgagaacgacttcggcaagggccccgagcccgagagcgtgatcggctacagcggcgaggactaccccagagccgcccccaccgaggtgaaggtgagagtgatgaacagcaccgccatcagcctgcagtggaacagagtgtacagcgacaccgtgcagggccagctgagagagtacagagcctactactggagagagagcagcctgctgaagaacctgtgggtgagccagaagagacagcaggccagcttccccggcgacagactgagaggcgtggtgagcagactgttcccctacagcaactacaagctggagatggtggtggtgaacggcagaggcgacggccccagaagcgagaccaaggagttcaccacccccgagggcgtgcccagcgcccccagaagattcagagtgagacagcccaacctggagaccatcaacctggagtgggaccaccccgagcaccccaacggcatcatgatcggctacaccctgaagtacgtggccttcaacggcaccaaggtgggcaagcagatcgtggagaacttcagccccaaccagaccaagttcaccgtgcagagaaccgaccccgtgagcagatacagattcaccctgagcgccagaacccaggtgggcagcggcgaggccgtgaccgaggagagccccgccccccccaacgaggccacccccaccgccgcctacaccaacaaccaggccgacatcgccacccagggctggttcatcggcctgatgtgcgccatcgccctgctggtgctgatcctgctgatcgtgtgcttcatcaagagaagcagaggcggcaagtaccccgtgagagagaagaaggacgtgcccctgggccccgaggaccccaaggaggaggacggcagcttcgactacagcgacgaggacaacaagcccctgcagggcagccagaccagcctggacggcaccatcaagcagcaggagagcgacgacagcctggtggactacggcgagggcggcgagggccagttcaacgaggacggcagcttcatcggccagtacaccgtgaagaaggacaaggaggagaccgagggcaacgagagcagcgaggccaccagccccgtgaacgccatctacagcctggcctag

SEQ ID NO: 266231 - DNA, 3570 bp, Artificial Sequence
  derived and/or modified sequence
atggctagacagccacctcctccctgggtgcacgcagctttcctcctatgtcttttgtccctaggaggtgcaatcgaaatcccaatggatctgactcagccaccgaccattacaaagcagagcgccaaggaccacatcgtagaccctagagacaacattctcatcgaatgcgaggccaagggcaaccccgctccttctttccattggactaggaattcgcgctttttcaacatcgccaaagacccacgcgtgtccatgcgtcgacggtcaggtaccctggtgatcgattttcggtccggggggcgccctgaggaatacgagggggagtaccagtgtttcgctaggaataagtttggaacagccttaagtaatcgtatccgcctgcaagtgtcaaaaagtcctctgtggcctaaagagaacttggatccagtggtggttcaggaaggcgcccccctgaccctgcagtgcaacccaccacctgggctgccctcccccgtgatcttttggatgtcttcgtctatggaacccataacacaggataagcgggttagtcagggacataatggagacctgtactttagtaacgtgatgctgcaagacatgcagacagactactcttgcaatgcccgcttccatttcactcatacaatccagcaaaaaaatcctttcaccctgaaagtgctgacaaatcatccctacaatgatagcagcttgcgtaaccacccagacatgtattcagcacggggagtggccgagcgcaccccatcttttatgtacccacagggcacagcctcaagtcaaatggtactgcgcggaatggatttgctactggagtgtatcgccagtggagttccaaccccagacatagcgtggtataaaaaaggcggggacctgcctagcgacaaggccaagttcgaaaactttaacaaagccctccggataaccaatgtctccgaagaggattctggtgaatatttttgcttggcttctaataagatgggctcgattcgccataccatatcagtgagggtgaaagcagctccctattggctggatgaacctaaaaatctcattctggcacctggtgaggatggccggctggtgtgccgtgcaaatggaaatcctaaaccaaccgttcagtggatggtaaatggagaaccccttcagagcgcgcccccgaaccctaaccgggaagtagccggcgacaccattatctttagagatacccagatcagctcccgagctgtttaccaatgtaacacgagtaatgaacacggatatctgctagcaaatgctttcgtttcagtcctggatgtcccgcccaggatgctgagccccaggaatcagctcattcgtgtgattctctacaatagaacgcgcctggactgccctttttttggcagcccaatacctaccctgcgatggttcaagaacggccagggcagtaacctagacggcgggaattatcacgtgtacgaaaacggatcactggagattaagatgatccggaaggaggaccaaggcatttatacttgtgtggctaccaatatcctaggtaaagcggaaaatcaagtccgtctggaggtcaaggacccaacaagaatctacagaatgccagaggaccaagtagccagacgcggaacaacagtgcagcttgagtgtagagtgaaacacgacccttcactgaagttaactgtcagttggttgaaggacgatgagcctctttacataggaaaccgtatgaaaaaagaagacgactccctgactatcttcggagtcgcagagcgggaccagggatcgtatacctgtgtggcaagcacagagctggaccaggatctggcaaaagcttatctgaccgtcctggcggatcaggcaactccgactaaccgactcgccgctcttcctaaaggtcggccagataggccgagggaccttgaattgactgatctcgcagagagatctgtgaggctgacttggattccgggagatgcaaacaacagcccgattaccgactacgtggtccagttcgaggaggatcaatttcaacctggagtgtggcacgatcattccaagtaccccggcagtgtgaactctgccgttctccgcctgagcccttacgtcaactaccaattcagagtgatcgccatcaacgaggttggtagctcccacccctccctcccatctgaaagataccgaacgagcggggcccctcctgagagcaatcctggcgacgttaaaggcgaaggaacaagaaagaataacatggagatcacatggactccaatgaatgctacatcagcattcggccctaacctgcggtacatcgtgaagtggagacggcgcgagacccgcgaggcctggaacaacgtcactgtgtggggtagccggtacgtcgtgggtcagaccccagtttatgttccttacgaaatacgggtgcaggcagaaaatgacttcggtaaggggcctgaacctgagtctgtgatcgggtacagcggcgaggactatcctagagcagccccaaccgaagtgaaagtacgagtcatgaattcaaccgctataagtttgcagtggaacagggtatatagtgacactgtgcaggggcagttacgcgaatacagggcttactactggcgggagtcatcacttttaaaaaacctctgggtgagccaaaaacgccagcaagcctctttcccaggcgacagacttcggggcgttgtgagccgcctgttcccctattcgaactataagcttgaaatggttgtagtgaatggacgcggtgacggtccacggtcggaaacaaaggagtttaccacacctgaaggcgtcccaagtgcaccccgacggttccgggtcagacagccaaatctggagaccatcaatttagagtgggatcatccggaacaccccaatggaatcatgatcgggtatacacttaaatatgttgcttttaatggaactaaagtggggaaacagatcgtggaaaattttagccccaatcaaactaagttcaccgtacagagaactgatccggtgagtagatatcgctttacattaagtgcccgcactcaagtcgggtcgggcgaggccgtgaccgaggagtctccggcacccccaaacgaggggtctcccctagcagcctacactaacaaccaggcggatatcgctactcagggatggttcattgggctcatgtgtgccatcgccctgctcgtcctcattcttttgattgtgtgttttatcaagcgtagcagaggagggaaataccccgtcagagagaagaaggacgtaccgctgggtccagaagatcctaaggaggaagacggatcattcgactactccgacgaagacaataagccccttcaagggagccagacatccttagacggaacgatcaaacagcaagagagcgacgattcactggtggattatggggagggcggggagggccagtttaacgaagacggctcctttattgggcagtacactgttaaaaaagataaggaggagacggagggcaatgaatccagtgaggctacatcccctgtcaatgcaatctactctcttgcttag

SEQ ID NO: 266232 - DNA, 3498 bp, Artificial Sequence
  derived and/or modified sequence
atcgagataccaatggacttgactcagccacctactattacgaagcagtcagccaaagatcacattgtagatccaagggacaacatcctgatagaatgtgaagccaaggggaaccctgcgcccagttttcactggacgcggaactcaagatttttcaacatagctaaggatccgagagtaagcatgagaaggcggagcggaacccttgttatcgatttccgaagcggtggacgccctgaggaatatgaaggcgaataccagtgtttcgcccgaaacaagttcggcaccgcattatcgaaccgaataagactgcaggtgtctaagagccccctctggccaaaagagaacctggaccctgtcgtggtacaagaaggcgctcctctgactctgcagtgtaatcctccgcccgggctccccagccccgtaatcttttggatgtcctccagcatggagcctattactcaggataagcgcgtgagccagggtcataatggcgatctctacttttccaatgtcatgctgcaggatatgcaaactgattacagttgcaatgctcggttccactttacgcatacaatacagcagaaaaatccgttcacccttaaggttctgactaatcatccatataatgacagctccctgcgtaaccaccctgacatgtattcggcgaggggagtggcagagcggacccctagctttatgtatccacagggaacagccagttcacagatggtgctcagaggaatggacttactcctggagtgtattgcgtcgggggtgcccacccctgacatcgcatggtacaagaaaggcggagatctcccttccgacaaggccaagttcgagaacttcaataaggcactgaggattactaacgttagcgaggaggattcaggcgagtatttctgcctggcttccaacaaaatgggtagcattcgccatacaatttcagtgagagttaaggcagcaccttattggctggacgaaccgaaaaacctgatcctggcaccaggtgaggacggccggcttgtgtgccgggctaatggcaatcccaaacccaccgtccagtggatggtgaatggggagccactgcaaagtgctccacccaaccccaatcgagaggttgcgggggacactatcatctttagggatacccagattagttcccgggccgtctaccagtgcaacaccagtaacgagcatggctacctgctggccaatgcttttgtctcagtcctggacgtgcccccacggatgctgagcccaaggaatcaactgatcagggtcatcctgtacaatagaactcgactcgactgcccctttttcggatcaccaattcccacgctgcgttggttcaaaaacggtcaggggtcaaacttggacgggggaaactatcatgtgtacgagaatggatccctggaaatcaaaatgattaggaaagaagaccaggggatctatacctgcgttgcaaccaacatcctcgggaaagcagaaaaccaagtgaggctggaggtcaaagatcctacacggatctacaggatgcctgaagaccaagttgctaggcgggggacgactgttcaactcgagtgtcgggtcaaacatgacccttccctcaagctcacagtctcctggctgaaggacgacgaaccgctgtacatcgggaatcggatgaagaaagaagatgatagcttaaccatcttcggggtagcagagcgtgatcaggggtcctacacatgtgtggcttctaccgaactggaccaggacctggctaaagcttacctgactgttttggctgaccaggccacaccaaccaatagactcgccgcactgcctaaggggaggccggataggccgagagacctggaactgacagatcttgctgaaagatccgtccgacttacatggattcctggggacgccaacaactcaccaataaccgactacgtggtgcagtttgaggaagatcagtttcagcccggggtgtggcacgaccacagcaagtacccaggaagcgttaattctgctgttctgcggttgagtccatacgtcaactatcagttcagggtgattgccataaatgaagtcggttcaagccatcctagcctacccagcgagagatacaggacgtctggggctccacccgagagcaacccaggggacgtcaagggggagggtacaagaaaaaataacatggaaatcacttggaccccgatgaacgcaactagcgctttcgggcccaaccttagatatatcgttaaatggagaagaagagagacacgcgaggcatggaacaatgtcacggtttggggaagccgttatgtcgtcggccaaacccctgtgtatgtcccatacgagatcagggttcaggccgagaatgacttcgggaaaggaccagagcctgaatctgtgatcggatactcaggcgaagattacccccgtgcagcaccaacagaggtcaaggtgagggtgatgaatagtacagctatctccctacaatggaaccgggtttactccgacaccgttcagggccaactaagggagtatagggcctactactggcgggagtcgtcactgctcaaaaatctgtgggtatcacagaaacgtcagcaggcgagcttccccggcgataggctgagaggcgtagtttccagacttttcccctattcaaactacaaactggagatggtggtggtaaatggcagaggagatgggccaaggtcagagaccaaggaatttacaactcccgagggggtgccatccgcccctcgtagatttcgtgtgagacagcctaacctggagaccattaacttagagtgggatcaccccgaacatccaaatggtatcatgatcggttacaccttaaagtatgttgctttcaacggcacaaaggtgggtaagcagatcgtggagaacttttcccccaaccaaacaaagtttaccgtacaaagaaccgaccctgtgtcgaggtatagattcacactgagcgctcgaacccaggtagggtcaggggaggctgtgacggaggaaagtcccgcccctcccaacgaggctactcccactgccgcttatacgaacaatcaggcagatatcgcgacccagggctggttcataggcctcatgtgtgcaatcgcccttctggtgcttatcctgctgattgtatgctttatcaagaggtctaggggaggcaagtatccagtccgtgaaaagaaggacgtgcctctcgggccagaggatccaaaggaggaggatggttccttcgattactcagacgaagacaacaagccactccaagggagccagacgtctctggacggcaccatcaagcagcaggaatccgatgatagtctcgtggattacggcgagggcggcgagggccagtttaatgaagacggaagcttcatcggacagtacacagtgaagaaggacaaggaggagacagagggcaatgagtcctccgaggccacgtcccctgtaaacgcaatctattcactggcatag

SEQ ID NO: 266233 - DNA, 3570 bp, Artificial Sequence
  derived and/or modified sequence
atggcccggcagcccccaccaccctgggtgcacgccgccttcctgctgtgcctgctgagcctgggcggggccatcgagatccccatggacctgacccagccccccaccatcaccaagcagagcgccaaggaccacatcgtggacccccgggacaacatcctgattgaatgtgaggccaagggcaacccagcccccagcttccactggaccaggaacagccgcttcttcaacatcgccaaggacccccgggtgtccatgagaagaagaagtggcaccctggtgattgacttccgcagcggcggccggcctgaggagtatgaaggagagtaccagtgctttgccaggaacaagtttggaacagccctgagcaaccgcatccggctgcaggtgtccaagagccccctgtggcccaaggagaacctggaccctgtggtggtgcaggagggcgcccccctgaccctgcagtgcaaccccccacctggcctgcccagccctgtgatcttctggatgagcagctccatggagcccatcacccaggacaagagggtgtcccagggccacaacggggacctgtacttcagcaatgtgatgctgcaggacatgcagacagactacagctgcaatgcccgcttccacttcacccacaccatccagcagaagaaccccttcaccctgaaggtgctgaccaaccacccctacaatgacagcagcctgaggaaccacccagacatgtacagcgcccggggcgtggccgagaggacccccagcttcatgtacccccagggcacagccagcagccagatggtgctgcggggcatggacctgctgctggagtgcatcgccagcggcgtgcccaccccagacatcgcctggtacaagaagggcggggacctgcccagcgacaaggccaagtttgagaacttcaacaaggccctgcgcatcaccaacgtgtctgaggaggacagcggggagtacttctgcctggccagcaacaagatgggcagcatccgccacaccatctctgtgcgggtgaaggccgccccctactggctggatgagcccaagaacctgatcctggcccctggagaagatggccgcctggtgtgccgggccaacggcaaccccaagcccaccgtgcagtggatggtgaatggagagcccctgcagagcgccccacccaaccccaaccgggaggtggccggggacaccatcatcttccgggacacccagatcagcagcagagctgtgtaccagtgcaacaccagcaatgaacatggctacctgctggccaatgcctttgtgtctgtgctggatgtgccccccaggatgctgagccccaggaaccagctgatccgggtcatcctgtacaacagaacccggctggactgccccttcttcggcagccccatccccaccctgcgctggttcaagaatggccagggcagcaacctggatggcggcaactaccacgtgtatgaaaatggcagcctggagatcaagatgatcagaaaagaagaccagggcatctacacctgtgtggccaccaacatcctgggcaaggccgagaaccaggtgcggctggaggtgaaggaccccacccgcatctacaggatgcctgaggaccaggtggcccggcggggcaccaccgtgcagctggagtgccgggtgaagcatgaccccagcctgaagctgactgtgtcctggctgaaggatgatgagcccctgtacatcggcaacaggatgaagaaggaggatgacagcctgaccatctttggagtggccgagcgggaccagggcagctacacctgtgtggccagcacagagctggaccaggacctggccaaggcctacctgactgtgctggccgaccaggccacccccaccaaccggctggccgccctgcccaagggccgcccagaccggccccgggacctggagctgacagacctggccgagaggtctgtgcggctgacctggatccctggagatgccaacaacagccccatcacagattatgtggtgcagtttgaggaggaccagttccagcccggggtgtggcatgaccacagcaagtacccaggctctgtgaacagcgctgtgctgcggctgagcccctacgtgaactaccagttccgggtcatcgccatcaatgaggtgggcagcagccaccccagcctgcccagcgagcgctaccgcaccagcggggcccctcctgagagcaaccctggagatgtgaagggggagggcaccaggaagaacaacatggagatcacctggacccccatgaatgccaccagcgccttcggccccaacctgcgctacatcgtgaagtggaggcggcgggagacccgggaggcctggaacaacgtgacagtgtggggcagccgctacgtggtgggccagacccctgtgtatgtgccctatgagatccgggtgcaggctgaaaatgactttgggaagggccctgagcctgagagcgtcatcggctacagcggggaggactacccccgggccgcccccacagaggtgaaggtgcgggtgatgaacagcacagccatcagcctgcagtggaacagagtgtacagcgacacagtgcagggccagctgcgggagtaccgggcctactactggagggagagcagcctgctgaagaacctgtgggtgtcccagaagaggcagcaggccagcttccctggggaccggctgcggggcgtggtgagccgcctcttcccctacagcaactacaagctggagatggtggtggtgaatggaagaggagatggccccaggtctgagaccaaggagttcaccaccccagagggcgtgcccagcgccccccggcgcttccgggtgcggcagcccaacctggagaccatcaacctggagtgggaccaccctgagcaccccaacggcatcatgattggctacaccctgaagtatgtggccttcaacggcaccaaggtgggcaagcagatcgtggagaacttcagccccaaccagaccaagttcaccgtgcagaggacagatcctgtgagccgctaccgcttcaccctgagcgcccggacccaggtgggcagcggggaggccgtgacagaggagagccctgcccccccaaatgaaggcagccccctggccgcctacaccaacaaccaggccgacatcgccacccagggctggttcatcggcctgatgtgtgccatcgccctgctggtgctgatcctgctgattgtgtgcttcatcaagaggagcagaggaggcaagtaccctgtgcgggagaagaaggatgtgcccctgggccctgaggaccccaaggaggaggatggcagctttgactacagtgatgaggacaacaagcccctgcagggcagccagaccagcctggatggcaccatcaagcagcaggagagtgatgacagcctggtggactatggagagggcggggagggccagttcaatgaagatggcagcttcatcggccagtacacagtgaagaaggacaaggaggagacagagggcaatgaaagcagcgaggccaccagccctgtgaatgccatctacagcctggcctag

SEQ ID NO: 266234 - DNA, 3498 bp, Artificial Sequence
  derived and/or modified sequence
attgagatccccatggacctgacccagccccccaccatcaccaagcagagcgccaaggaccacatcgtggacccccgggacaacatcctgattgaatgtgaggccaagggcaacccagcccccagcttccactggaccaggaacagccgcttcttcaacatcgccaaggacccccgggtgtccatgagaagaagaagtggcaccctggtgattgacttccgcagcggcggccggcctgaggagtatgaaggagagtaccagtgctttgccaggaacaagtttggaacagccctgagcaaccgcatccggctgcaggtgtccaagagccccctgtggcccaaggagaacctggaccctgtggtggtgcaggagggcgcccccctgaccctgcagtgcaaccccccacctggcctgcccagccctgtgatcttctggatgagcagctccatggagcccatcacccaggacaagagggtgtcccagggccacaacggggacctgtacttcagcaatgtgatgctgcaggacatgcagacagactacagctgcaatgcccgcttccacttcacccacaccatccagcagaagaaccccttcaccctgaaggtgctgaccaaccacccctacaatgacagcagcctgaggaaccacccagacatgtacagcgcccggggcgtggccgagaggacccccagcttcatgtacccccagggcacagccagcagccagatggtgctgcggggcatggacctgctgctggagtgcatcgccagcggcgtgcccaccccagacatcgcctggtacaagaagggcggggacctgcccagcgacaaggccaagtttgagaacttcaacaaggccctgcgcatcaccaacgtgtctgaggaggacagcggggagtacttctgcctggccagcaacaagatgggcagcatccgccacaccatctctgtgcgggtgaaggccgccccctactggctggatgagcccaagaacctgatcctggcccctggagaagatggccgcctggtgtgccgggccaacggcaaccccaagcccaccgtgcagtggatggtgaatggagagcccctgcagagcgccccacccaaccccaaccgggaggtggccggggacaccatcatcttccgggacacccagatcagcagcagagctgtgtaccagtgcaacaccagcaatgaacatggctacctgctggccaatgcctttgtgtctgtgctggatgtgccccccaggatgctgagccccaggaaccagctgatccgggtcatcctgtacaacagaacccggctggactgccccttcttcggcagccccatccccaccctgcgctggttcaagaatggccagggcagcaacctggatggcggcaactaccacgtgtatgaaaatggcagcctggagatcaagatgatcagaaaagaagaccagggcatctacacctgtgtggccaccaacatcctgggcaaggccgagaaccaggtgcggctggaggtgaaggaccccacccgcatctacaggatgcctgaggaccaggtggcccggcggggcaccaccgtgcagctggagtgccgggtgaagcatgaccccagcctgaagctgactgtgtcctggctgaaggatgatgagcccctgtacatcggcaacaggatgaagaaggaggatgacagcctgaccatctttggagtggccgagcgggaccagggcagctacacctgtgtggccagcacagagctggaccaggacctggccaaggcctacctgactgtgctggccgaccaggccacccccaccaaccggctggccgccctgcccaagggccgcccagaccggccccgggacctggagctgacagacctggccgagaggtctgtgcggctgacctggatccctggagatgccaacaacagccccatcacagattatgtggtgcagtttgaggaggaccagttccagcccggggtgtggcatgaccacagcaagtacccaggctctgtgaacagcgctgtgctgcggctgagcccctacgtgaactaccagttccgggtcatcgccatcaatgaggtgggcagcagccaccccagcctgcccagcgagcgctaccgcaccagcggggcccctcctgagagcaaccctggagatgtgaagggggagggcaccaggaagaacaacatggagatcacctggacccccatgaatgccaccagcgccttcggccccaacctgcgctacatcgtgaagtggaggcggcgggagacccgggaggcctggaacaacgtgacagtgtggggcagccgctacgtggtgggccagacccctgtgtatgtgccctatgagatccgggtgcaggctgaaaatgactttgggaagggccctgagcctgagagcgtcatcggctacagcggggaggactacccccgggccgcccccacagaggtgaaggtgcgggtgatgaacagcacagccatcagcctgcagtggaacagagtgtacagcgacacagtgcagggccagctgcgggagtaccgggcctactactggagggagagcagcctgctgaagaacctgtgggtgtcccagaagaggcagcaggccagcttccctggggaccggctgcggggcgtggtgagccgcctcttcccctacagcaactacaagctggagatggtggtggtgaatggaagaggagatggccccaggtctgagaccaaggagttcaccaccccagagggcgtgcccagcgccccccggcgcttccgggtgcggcagcccaacctggagaccatcaacctggagtgggaccaccctgagcaccccaacggcatcatgattggctacaccctgaagtatgtggccttcaacggcaccaaggtgggcaagcagatcgtggagaacttcagccccaaccagaccaagttcaccgtgcagaggacagatcctgtgagccgctaccgcttcaccctgagcgcccggacccaggtgggcagcggggaggccgtgacagaggagagccctgcccccccaaatgaggccacccccacagctgcctacaccaacaaccaggccgacatcgccacccagggctggttcatcggcctgatgtgtgccatcgccctgctggtgctgatcctgctgattgtgtgcttcatcaagaggagcagaggaggcaagtaccctgtgcgggagaagaaggatgtgcccctgggccctgaggaccccaaggaggaggatggcagctttgactacagtgatgaggacaacaagcccctgcagggcagccagaccagcctggatggcaccatcaagcagcaggagagtgatgacagcctggtggactatggagagggcggggagggccagttcaatgaagatggcagcttcatcggccagtacacagtgaagaaggacaaggaggagacagagggcaatgaaagcagcgaggccaccagccctgtgaatgccatctacagcctggcctag

SEQ ID NO: 266235 - DNA, 3570 bp, Artificial Sequence
  derived and/or modified sequence
atggcccggcagcccccccccccctgggtgcacgccgccttcctgctgtgcctcttatctcttggaggagccatcgagatccccatggacttgactcaaccccctaccatcacaaagcagagtgcaaaagaccacatcgtcgatccccgtgataacatcctgatcgagtgcgaggccaaaggcaaccctgcgcctagcttccactggaccaggaacagtaggttctttaacatcgcgaaagacccccgggtctcaatgcggcgacggtctggaaccctcgtgatagactttcgcagcgggggcagaccagaagagtatgaaggtgagtaccagtgttttgctcggaataagtttggtacagccctcagtaatcgcattaggttgcaagtctcaaaatctcccctctggcccaaggaaaacttggaccccgtggtcgtccaggaaggtgcccctctaacactgcagtgcaacccccccccaggactgccttcgccagtcatcttttggatgtctagcagcatggaacccattactcaggacaagcgtgttagccagggccacaacggggacctttacttttctaacgtaatgttacaggatatgcagacagattatagttgtaacgctcggttccatttcacccatacaattcagcagaaaaatcctttcaccctgaaggtccttactaaccacccttacaatgactcctccctcagaaatcaccctgacatgtacagcgcgcgaggggtggctgaaaggacccccagcttcatgtacccacagggtaccgcctcttcacaaatggtgctgcgggggatggatctgctactggaatgtatcgcctccggagttccaactcctgacatcgcgtggtataagaagggcggggatctgccttcagacaaggcaaagttcgaaaattttaataaagccttgcgcatcactaacgtgtctgaagaggactccggggaatacttttgtttagcctctaataaaatgggatcaatcaggcacaccatcagtgtacgggtcaaagctgccccgtactggctggacgagccgaaaaatctaatcctggcccccggggaagatggccggctcgtttgtagggccaatggaaatcccaagcccacagtgcagtggatggttaacggggaacccttgcaaagtgcaccacccaaccccaacagggaggtcgcaggcgacaccattatatttcgagatacgcaaatctcttcacgagctgtatatcagtgtaacacatcaaacgagcatggctaccttctagctaacgcgtttgtcagcgttttggacgtcccaccacgtatgttgtctcccaggaatcagctcatccgagtcatcctgtacaaccgtacaaggctggactgtcccttctttggttccccgattccaactttgagatggtttaaaaatggtcagggtagcaaccttgacggggggaattatcatgtttatgaaaatggatcactggagattaaaatgatccgcaaggaagatcagggaatttatacttgtgtggccactaacattcttgggaaggccgagaaccaagtgcgtctcgaggtaaaggaccctacacgcatctaccggatgcccgaagaccaagtggcccgccgcggaaccacggtccagctggagtgtcgcgtgaagcacgaccccagcctgaaactcactgtctcatggttgaaggacgacgagcccctctacatcgggaacaggatgaaaaaggaggatgattccctgactatctttggcgtggccgagcgggatcagggttcctatacatgtgtggcctccactgagctggatcaggacttggctaaggcttatttgacagtactggctgaccaggcaaccccaacgaatcggttggcagctctgccaaaagggagacctgatcgcccccgcgatctggaactaactgacttagccgagcgcagcgttagattgacctggatccccggcgatgcgaataattcgcccattaccgactacgtggtccaatttgaggaagatcagtttcagccaggcgtctggcatgatcacagtaaatacccagggtctgtcaactctgccgttctgcggctttcaccgtacgttaattatcagttccgcgtgatcgcaatcaacgaagtaggcagcagtcacccctccttgccttccgagagataccgaacctccggcgccccacctgagagcaatcccggtgatgtcaagggtgaaggcacacggaagaacaacatggaaattacctggacacccatgaatgccactagcgcattcgggcctaaccttcgatacatcgttaaatggagacggagagaaaccagagaagcctggaataacgtcacagtgtggggctccagatacgtagtcggacagaccccagtgtacgtcccctatgagatccgcgtccaggctgagaacgattttggcaaaggcccagagccagagagcgtgattggatatagcggggaagattaccccagggctgcccctactgaggtgaaagtgagagtcatgaactctaccgccatcagcctgcagtggaatcgcgtgtactccgatacagtgcaggggcaactgagggaatacagagcctattactggcgggagtcttctttgctcaagaacctgtgggtcagccagaaaagacagcaggcctcctttcccggcgataggctgcgcggagtcgtgtctaggctttttccctattcaaactataagctggagatggttgtagtcaacggcaggggagacggcccgcgctctgaaacaaaggaatttactacaccagaaggcgtcccatccgccccccggcggttcagggtgagacagcccaacttagagaccataaatttggaatgggaccaccccgagcatcctaacggcatcatgatcggatacacactgaagtatgtggcattcaatggaaccaaagtgggcaaacaaatcgtggaaaatttttcacccaatcagactaaattcactgtgcagcgaaccgatcccgtaagtcggtaccggttcaccctgagcgctagaacccaggtgggatccggcgaagcagtcacagaggaaagcccagctccccccaatgagggttccccattagcagcatatactaacaatcaggcagacatcgccacacaaggatggtttattgggcttatgtgtgcaatagctctgctggtcctcatcttgctaattgtctgtttcatcaaacgctcccgaggtggaaagtaccctgttcgcgagaaaaaagatgttcccctcggccccgaagaccctaaggaggaagacggctcctttgattacagcgacgaggataataagcccctccagggcagccagacttcgttggacgggaccatcaaacagcaggaaagcgacgactccctggtggattatggagaggggggggaaggccagtttaacgaggacggctcctttattgggcagtacacagtgaagaaggataaggaagagactgagggaaacgagtctagtgaagcaaccagccctgtaaacgccatatattccttagcttag

SEQ ID NO: 266236 - DNA, 3498 bp, Artificial Sequence
  derived and/or modified sequence
atcgagatccccatggacctgacccagccccccaccatcaccaagcaatccgctaaggatcacatcgtcgatcccagagataatattctgatagaatgtgaggcaaaagggaaccccgccccttcttttcattggacacggaactcaagattctttaacatagcgaaagacccccgggtttccatgcgcagacggagcgggacgctggttatagactttaggtcagggggccgcccagaagaatacgagggcgaatatcaatgcttcgccagaaacaaatttgggacagctctgagcaaccgaattagactccaagtgtccaagagtcctctctggccaaaagagaatctggatcccgtggtggtgcaggagggagctccgctgactctgcagtgtaacccaccccccgggttgccatcccctgtgattttttggatgtctagtagcatggagccgatcacacaggataaacgggtgagtcagggccataacggagatctatatttttctaacgtcatgctacaggacatgcagaccgattacagttgcaacgctcgctttcacttcacgcacaccatccagcaaaaaaacccctttacattgaaggtgttaactaatcacccctacaatgactcctccctgagaaatcatccagatatgtactctgcccgaggcgtggccgagcggacaccctcttttatgtaccctcaggggaccgcatcaagtcagatggtcctgagagggatggacctgttacttgagtgcatagcatccggcgtgcccacacccgacatcgcatggtacaaaaagggtggagatctgccctccgataaagctaagttcgaaaacttcaataaagccctcaggataaccaatgtgagcgaggaggattccggcgaatatttttgtttggcctccaataaaatgggcagcatcagacacacaatttcggtacgcgtgaaggcggccccgtattggctggatgagccaaagaatcttatcctggccccaggggaggatggtcgcttagtgtgtcgcgccaatgggaatcccaagccaactgtgcagtggatggtaaacggcgagccccttcagtcagcgcctcccaatccaaaccgggaggtggctggcgatactataatcttcagggatacccagatcagtagtagagcggtctaccagtgtaacacatccaatgagcacgggtacttacttgctaatgcgtttgtgtccgttctggatgtaccccctagaatgctgtcaccgcggaaccaactaatcagagtgatcttgtacaacagaacccgtttggactgtccctttttcggatccccgatacccacactccgttggtttaaaaatggccaggggtccaatttggatggaggaaattatcacgtgtacgagaacgggtccctggaaatcaaaatgatccgcaaggaggaccaggggatctacacatgcgtggctaccaacatacttgggaaagccgagaatcaagtgaggctggaagttaaagacccaaccagaatctaccggatgccagaggatcaggtcgcgcgcagagggacaaccgtccagctggaatgcagagtgaaacacgacccatctctcaagctcaccgtgagctggctcaaggacgacgaacccctgtatatagggaatcgcatgaagaaggaggacgattctctgactattttcggtgtcgctgagagagatcagggtagttatacctgcgtggcatcgacagagctcgaccaggacctggcaaaggcctatcttacggttcttgccgatcaagctacccctacgaatagactagccgccctgcccaaaggccgacccgatcgaccacgggatcttgagctcacagaccttgcggaacgctcagtgagactaacatggatcccaggcgacgccaacaactcccccatcactgactatgtagtgcagtttgaagaggatcaatttcagcccggggtatggcacgaccatagcaagtatccaggaagtgtgaactctgccgtgctccgactatctccatatgtcaactaccaattccgggtcattgccattaatgaggtcgggagtagtcatcccagcctgccgagcgagcggtacaggacatcaggggccccaccagagtcaaaccccggggatgtgaaaggcgagggaacccggaagaacaatatggaaataacctggacccccatgaacgcaaccagcgcctttgggccaaacctccggtacatcgtgaagtggcgccgaagggagaccagggaagcctggaacaacgtgaccgtgtggggaagccgatacgtggtgggtcaaacccctgtttacgtcccatatgaaatccgcgtgcaggccgagaatgacttcgggaagggaccagagcccgaatcagtgatcggatatagcggcgaggactatccccgcgcagcacctacagaggtaaaggtgcgtgtcatgaattccaccgctatttccctgcagtggaatagagtgtattcagatacagtacaggggcagttgagagagtacagggcgtactattggcgcgagtctagccttctgaagaatctgtgggtgtcccaaaaaagacagcaggcctcatttcccggggatagactgcgtggcgtcgtatcgagactgttcccatattctaattacaaactggagatggttgtggtcaatggaagaggtgatggtccacgaagcgaaacaaaagaatttacaactcccgaaggcgttccgagcgcccccaggagattcagagtgcgacagccaaatctcgaaacaatcaacttagagtgggaccacccagagcatcccaatggtatcatgataggctatacactgaagtacgtcgcctttaatggcacgaaagttggcaaacagattgtagaaaatttttctcctaatcagaccaaatttaccgtacaaagaaccgaccccgtgtctcggtataggttcacactttcagctcggacccaggtgggctcaggtgaagccgtaacagaagagtcacccgctccaccaaatgaggcaactccaaccgcggcctacaccaataatcaagcagacatagctactcagggctggttcattggcctgatgtgcgctatagcactgctcgtcctcattttgctgatcgtctgctttatcaaaaggtccagggggggcaaatatccagtgagagaaaaaaaggacgttccactgggaccagaagacccaaaggaagaggatgggtcatttgattactccgacgaagacaacaaacctttacaaggctctcagacaagcttggacggcactatcaagcaacaggaatctgacgactccctcgtcgattacggtgagggtggagaaggacagtttaacgaggacggttccttcattggacaatacactgtgaagaaggacaaggaggaaacggagggcaatgagtccagcgaggctacttctcctgtaaacgcaatatactcactggcttag

SEQ ID NO: 266237 - DNA, 10180 bp, Artificial Sequence
  derived and/or modified sequence
gcacgggctggtctctgccctaatgcggcggctggcggcgagaggcgctgcaggggacgcgggggaagtggcggcgccggcagcggacagctcggacagcgcccagggccggagcccgagcccttggaggttgattgacttatgtgcaatttgggacgctggagtttaccttccctccgcagcctggaacagagcctcctctggtgttgcaaggaagaggctgaatgaggcagagaagctgagtgctgtccaggaggcccagttaaagcggctcgaggtgacaagaccccgagtgctggggagcagggagcagggccaggtgccgaggatggccaggcagccaccgccgccctgggtccatgcagccttcctcctctgcctcctcagtcttggcggagccatcgaaattcctatggatctgacgcagccgccaaccatcaccaagcagtcagcgaaggatcacatcgtggacccccgtgataacatcctgattgagtgtgaagcaaaagggaaccctgcccccagcttccactggacacgaaacagcagattcttcaacatcgccaaggacccccgggtgtccatgaggaggaggtctgggaccctggtgattgacttccgcagtggcgggcggccggaggaatatgagggggaatatcagtgcttcgcccgcaacaaatttggcacggccctgtccaataggatccgcctgcaggtgtctaaatctcctctgtggcccaaggaaaacctagaccctgtcgtggtccaagagggcgctcctttgacgctccagtgcaaccccccgcctggacttccatccccggtcatcttctggatgagcagctccatggagcccatcacccaagacaaacgtgtctctcagggccataacggagacctatacttctccaacgtgatgctgcaggacatgcagaccgactacagttgtaacgcccgcttccacttcacccacaccatccagcagaagaaccctttcaccctcaaggtcctcaccaaccacccttataatgactcgtccttaagaaaccaccctgacatgtacagtgcccgaggagttgcagaaagaacaccaagcttcatgtatccccagggcaccgcgagcagccagatggtgcttcgtggcatggacctcctgctggaatgcatcgcctccggggtcccaacaccagacatcgcatggtacaagaaaggtggggacctcccatctgataaggccaagtttgagaactttaataaggccctgcgtatcacaaatgtctctgaggaagactccggggagtatttctgcctggcctccaacaagatgggcagcatccggcacacgatctcggtgagagtaaaggctgctccctactggctggacgaacccaagaaccttattctggctcctggcgaggatgggagactggtgtgtcgagccaatggaaaccccaaacccactgtccagtggatggtgaatggggaacctttgcaatcggcaccacctaacccaaaccgtgaggtggccggagacaccatcatcttccgggacacccagatcagcagcagggctgtgtaccagtgcaacacctccaacgagcatggctacctgctggccaacgcctttgtcagtgtgctggatgtgccgcctcggatgctgtcgccccggaaccagctcattcgagtgattctttacaaccggacgcggctggactgccctttctttgggtctcccatccccacactgcgatggtttaagaatgggcaaggaagcaacctggatggtggcaactaccatgtttatgagaacggcagtctggaaattaagatgatccgcaaagaggaccagggcatctacacctgtgtcgccaccaacatcctgggcaaagctgaaaaccaagtccgcctggaggtcaaagaccccaccaggatctaccggatgcccgaggaccaggtggccagaaggggcaccacggtgcagctggagtgtcgggtgaagcacgacccctccctgaaactcaccgtctcctggctgaaggatgacgagccgctctatattggaaacaggatgaagaaggaagacgactccctgaccatctttggggtggcagagcgggaccagggcagttacacgtgtgtcgccagcaccgagctagaccaagacctggccaaggcctacctcaccgtgctagctgatcaggccactccaactaaccgtttggctgccctgcccaaaggacggccagaccggccccgggacctggagctgaccgacctggccgagaggagcgtgcggctgacctggatccccggggatgctaacaacagccccatcacagactacgtcgtccagtttgaagaagaccagttccaacctggggtctggcatgaccattccaagtaccccggcagcgttaactcagccgtcctccggctgtccccgtatgtcaactaccagttccgtgtcattgccatcaacgaggttgggagcagccaccccagcctcccatccgagcgctaccgaaccagtggagcaccccccgagtccaatcctggtgacgtgaagggagaggggaccagaaagaacaacatggagatcacgtggacgcccatgaatgccacctcggcctttggccccaacctgcgctacattgtcaagtggaggcggagagagactcgagaggcctggaacaacgtcacagtgtggggctctcgctacgtggtggggcagaccccagtctacgtgccctatgagatccgagtccaggctgaaaatgacttcgggaagggccctgagccagagtccgtcatcggttactccggagaagattatcccagggctgcgcccactgaagttaaagtccgagtcatgaacagcacagccatcagccttcagtggaaccgcgtctactccgacacggtccagggccagctcagagagtaccgagcctactactggagggagagcagcttgctgaagaacctgtgggtgtctcagaagagacagcaagccagcttccctggtgaccgcctccgtggcgtggtgtcccgcctcttcccctacagtaactacaagctggagatggttgtggtcaatgggagaggtgatgggcctcgcagtgagaccaaggagttcaccaccccggaaggagtacccagtgcccctaggcgtttccgagtccggcagcccaacctggagacaatcaacctggaatgggatcatcctgagcatccaaatgggatcatgattggatacactctcaaatatgtggcctttaacgggaccaaagtaggaaagcagatagtggaaaacttctctcccaatcagaccaagttcacggtgcaaagaacggaccccgtgtcacgctaccgctttaccctcagcgccaggacgcaggtgggctctggggaagccgtcacagaggagtcaccagcacccccgaatgaaggtagtcctttagcagcttacaccaacaaccaagcggacatcgccacccagggctggttcattgggcttatgtgcgccatcgccctcctggtgctgatcctgctcatcgtctgtttcatcaagaggagtcgcggcggcaagtacccagtacgagaaaagaaggatgttccccttggccctgaagaccccaaggaagaggatggctcatttgactatagtgatgaggacaacaagcccctgcagggcagtcagacatctctggacggcaccatcaagcagcaggagagtgacgacagcctggtggactatggcgagggtggcgagggtcagttcaatgaagacggctccttcatcggccagtacacggtcaaaaaggacaaggaggaaacagagggcaacgaaagctcagaggccacgtcacctgtcaatgctatctactctctggcctaacggagcccacccaggcacagccaccactttgcaagtgggaggaggggagaaggggagacaaaaccactgcagacctaccacgaagccaccaccaccttcagtaacaagggtacgatatgggggtctgccaagctgtgaggaccagtagccaccaagccacccacaagccccctcccaatgaccccccttcagccccgggtgccaccagtgtgggagagctggagccgtggctgagctcagctggagggagcctggccccttgcccggtctcgcagccaccccgagcgttccaccacactgtccgcccttggcctcggcacacgctcaccttttctgttggttacgggacttctcattgtcttaatttcgctttgtgcatcttcccctccagacccaatgtctctgttttcttttccttttgaaaaagagtccctggaaaagaaagaataagtggattctcccccaggagaatcctttttgcaaagataggcaaaaaggattgaatccataccagaacacgtagacaggctgtaatattcaaaccacctctgggccaatgcatttccaaaggatgcctttctcgccatatgcctcccctggcccccagcccctctgcctcggccttgtcagttgctgagctgggcttggctcctttctggaaaatgacagtatttttggcagggagaaggtgcgcaggcctccttgctgctctctggtttggttgggaggtgtgtttacctcttgctcctcattcctcccctgcccttttctctggaatatctaagatgtgagctgcattgactctgaagacgtttgaggaacaggagtgggcactgatagaaaggacttcaacgccagtgactgtgtacctccagcagaagaaaatcaggtgtctggtcttgggggcactgtgctcacttctagagagaagaaaaaggctgggtttggacttcatgcctcctcactggtgaaacccaggatgtagatagagggccacacccaccctgtccagagtagagggcacctgtccacgtggccagggcccatgctgccaccctcgaggagatggaaccctgtgatgcaaaagctttgctggtgtgtttggggcataaggcactgctccccttccatctctagcagatatcatcttctcagccaattctgtaggacactgaggctcttgtttgacatggtgtgtggatggggacttgccccaagactgagcaggtctgccctttcattggggtgtatacatatcaggggaccctgaggtggcaccgtactcagtgttgtgatgcccccacctagggaggactcaatgctctttgtatgccttatgcagcgctgatctgtccctggagttcccaggttcccagctccccccctgcaagccttgaagcctccagcaacgtctatctccaggagagcagggcagcctatgcaagtgttccggcaggaccagaagtggccactcaacacacgtcctcaccagtcaccccaaatggagacactcgcagacctgcagttctcagaccgaaggtgctgccttcatcctccccacctaatgcatttttgaaaccaaaggtacctagcctcagagacagagaaggagagggggagatcttgagtctaagaggaaccctttagctgtttctgcagctgaggtcagtttcaggagggtgaagctgatccccaggaatggatcagctgccatgggcacagcctccgatttgagcctctccggctgccagccagggggcctgggccagaccagggctctgtccttccgtgactttattaaagcaacatttgccacatgtttaagccgcaaaggtattagcaatgcttgcatcattaataatcattcagttgaaggtcaagcccatagacacacactctctgctggtaagaaaccatagcccagaactgagccaataaggttgtttgaacctgagagtgtgtaatggtcatttgggccaagcctcagctagggctgctgcctggacgcctgaggggcagcttatcacagtgcaaggggacagggtaaacagcagggggtggggtgtgagcttggagggcccctcccctggatttcctccaacacctgcttggatactaggcccactgtccctgaagggaatgtcagggaagtgtgcctgtgagctgaattaaaggactggcctttccagaaaacgctttggatctgagcagagtagtcagtttctcagacactcattccatactgcaccgtacatgccagcgtacccattgcaccgaaagcaggcccttagggcaggaagggacgatgagcaagtctgccacaccacctggtgactgggaagggctgcttctctcgtaagggtcttggggagaagtaagcccgcagcctgcctctgcacctcgttccagtgtcctgccaggctctgtactgtcctttgtgtatgaagaaaatgctgttagccctctctcaggctgctgttctgtgggtgctgagagctgccccccatcaccacgccatcacacccctctgagcagaagcaaatctgaggctgaagaattaagttttccccaagcaaggaaggcaggtggtcagagagatcaaacgctgaggcgtggggattgcaggattcaggaggcagcccctttggggaagaggagggtgcattttccatggagcccatgtcagagtccactccagctcagcaggaaagtggaattgcccagtactgcctgccagctgggtctcccaagcaactaccccaagacataccaacagtgaagccaggacagcaccatgccatcggcgctccagtctgtctggctgggaggaaagtgctgggcatcttacagtaactctagaagttcctttgactaggctgcaatcccacctatatgctcagccctaagagctgtggtttcctgtgctctcatttgtccattcattcattcattcattcattcagcaaataatctgaaatccagtctgaactaaggcctgagctgtggataccatggcgcgtgagttagatgtggtccctgccctcatggggctgacagtcctaaaatcaagtgctaggacacagtggccattgagctgggagcattcttccctctaccgcttaagccactgatggctgcgagcttgaagagagggattctgagggagagcttggtccatctggtcaccaaggctgggcgggacagagcagtcaagaaccacggtgtggcttgagaaacagtcctgcttcctgagcctctttgctctgcctcttggggcaagctccttaacctgtctgtatttttatgcctctgtctcccattcagttcctccttgaatacctctttctacagagaggcacgggctcccctgaaggattgtcgaggccagggttcgggaagtacactgccatcggtcaggggacagctgcctcccaccttgcctgggtgatggtgaatgggactcatcttttcctgccttgcttttgaggagatggttgaatttaagctaacaggaaagccaaaccagcaccctcctttgtgctctgagaggttggagacatctggtccaccccattgcccctgcccctggcaagccctgaagtcgggagaggtgaccacaggtctgaaaatcagccagtgccaacattgcttgccctgcaaggtgcaactgagcccacatagcgcattcatagtttccctgaccacagccttgggaagacggtggaaacccgaggatgtgtgggtttcccagctaacggacaagctcccctgccacacccagtgcccacgcatgctcacatacatacagcagaccacaaccctgttgccaagcagtgcttccaagggatagcgatccagattccaacattgtcttggagagggttagtccacatccaagttgcgtgagataagatgcaaagggctctgtgtggatgaggaacgcaccttagaggagtgggaaaggccaccagggttgggccctgtttaggtaattcctgttggcagcacctagagagagcatctgagctgaaggagtgggaaactttgcccaagcaatggcacgggcagcgggctctttctggcgccctgtgctggagcagggccaagtcttagggcatcacaaacagcccatttgatggagggagcagggacatagcacatttttgtctgtctttgtgaggctgctttgctaactctctgaggagaggaagcctctcgggctttccgtcggctggggctagtgccagagaatcccttctcagtggccagcaggttcctgggaggccggcacaaggcaccgctccccactcatgacaccttggtgcagagtgacctcctgcccagtcaccactccggccagccccagccaaacacacaaaagcccatggttgcggttgcatctacaccgttagttggcaaaggatcctgcttgagctctgcgtggtggccaaggagtagcatggaggagggccctgattttaaaaaggaaaaatagagaggcctcaaaacaatgaaacaaagagcttgatatgtcaagaggagaccaaggccctgggaggcataggcaagccgggcagagtcagaccagtgccctcccttgaccatctcctagcattccttaacctagacaggggctaccccatgtgagtccaagccagactttgtggctgtccccagcctgcacagcccaagcccagggaagtgtcctttctttcccttccttactaataatgggccttcctgagacacattcagagaaggatcagagagaaaggagaaccatccaggagagccacaagcgtccaccaaacagtgtctcaggcctcacctgaagctgctgttcctcctatcagcacactagtattaaatgggtgttccataatgaggagaatggaaataggtacaaggcatctagcttaggacagaatcggatttcggcatgtgaaggaatcccagagctgatctcattgaaatgatctatcgtacagacaaggatatgcaaatccacagaagtgaagggatttttgctcaagatcacatagctggtaaactaaggtaaggttagggcttgaacttgggccttctgactccttgtccagtcagtgttctttcatctcaccacagctgcctcctttgaaacagaggtattaagatctgtccttctggttcaccctctcatacctctttactgcgtctcccacatcccccacatgcctcccaaaatgaaagacaaacaggattgtttctgagaccaagatcagtctgtctgtgatcagcctgtgtgtggttcacccagtcatgcaattaagggcagatctgggccagtggaataggatagctgattggtgtttgttactgtgaaccctagaccgtaccccgtagaatggtgtctcttgctttgtaacacatcgggccttcagtgtgctgtattcctcagaagtgagggcatctcggtccattctgcccatggccacagggtgcagagaggcagcagggcccatgcaagctgccaccctgggatttgctgggctggagttcaacagatgtaaagacttcagtgaagcaataaacacaaaactctgggagaagatatccagaattttgtacattactctgtttctttttcaaaaatgaggcagatcagatgcccctgagctgcccctttttttctgattcccaactgcaatgtcctcagtcagtgttgtccctctgcccggctccccagctctttgccaacctcttcacactccccttgagctgagcatcagtcgcctgtgacgtggccaccttctgtcctgctcccactcccgacccatgctggaccccggaggacctcctgccccgcccccaccacacacccatatcccccaccattccaatttgttctttcccgtggggaattttttttcccagcgtctccatcccttcctacatatccacacacacacaaattggtctgatcttttttccattggttaaacatttaactccatgccagaccttgttttaacccctctcacatcatgttctttccttttttgcgagttattttgcattaaccaactttgtcagtgacagatgcgtatctgagggtgtcacacacgaccttcagcagggaagacttctgggccatggagggccgtctaatacatggacttataaactgactgcatgagcaatgaaaaggccaaattattctgaattttttttgaatcactgtaaaaaaactgatttcttttgtatagagaacactaaacgtataataaaagttgttcaaaatgg

SEQ ID NO: 266238 - DNA, 10285 bp, Artificial Sequence
  derived and/or modified sequence
gcacgggctggtctctgccctaatgcggcggctggcggcgagaggcgctgcaggggacgcgggggaagtggcggcgccggcagcggacagctcggacagcgcccagggccggagcccgagcccttggaggttgattgacttatgtgcaatttgggacgctggagtttaccttccctccgcagcctggaacagagcctcctctggtgttgcaaggaagaggctgaatgaggcagagaagctgagtgctgtccaggaggcccagttaaagcggctcgaggtgacaagaccccgagtgctggggagcagggagcagggccaggtgccgaggatggccaggcagccaccgccgccctgggtccatgcagccttcctcctctgcctcctcagtcttggcggagccatcgaaattcctatggatcctaaccctcaacataggttgacgcagccgccaaccatcaccaagcagtcagcgaaggatcacatcgtggacccccgtgataacatcctgattgagtgtgaagcaaaagggaaccctgcccccagcttccactggacacgaaacagcagattcttcaacatcgccaaggacccccgggtgtccatgaggaggaggtctgggaccctggtgattgacttccgcagtggcgggcggccggaggaatatgagggggaatatcagtgcttcgcccgcaacaaatttggcacggccctgtccaataggatccgcctgcaggtgtctaaatctcctctgtggcccaaggaaaacctagaccctgtcgtggtccaagagggcgctcctttgacgctccagtgcaaccccccgcctggacttccatccccggtcatcttctggatgagcagctccatggagcccatcacccaagacaaacgtgtctctcagggccataacggagacctatacttctccaacgtgatgctgcaggacatgcagaccgactacagttgtaacgcccgcttccacttcacccacaccatccagcagaagaaccctttcaccctcaaggtcctcaccacccgaggagttgcagaaagaacaccaagcttcatgtatccccagggcaccgcgagcagccagatggtgcttcgtggcatggacctcctgctggaatgcatcgcctccggggtcccaacaccagacatcgcatggtacaagaaaggtggggacctcccatctgataaggccaagtttgagaactttaataaggccctgcgtatcacaaatgtctctgaggaagactccggggagtatttctgcctggcctccaacaagatgggcagcatccggcacacgatctcggtgagagtaaaggctgctccctactggctggacgaacccaagaaccttattctggctcctggcgaggatgggagactggtgtgtcgagccaatggaaaccccaaacccactgtccagtggatggtgaatggggaacctttgcaatcggcaccacctaacccaaaccgtgaggtggccggagacaccatcatcttccgggacacccagatcagcagcagggctgtgtaccagtgcaacacctccaacgagcatggctacctgctggccaacgcctttgtcagtgtgctggatgtgccgcctcggatgctgtcgccccggaaccagctcattcgagtgattctttacaaccggacgcggctggactgccctttctttgggtctcccatccccacactgcgatggtttaagaatgggcaaggaagcaacctggatggtggcaactaccatgtttatgagaacggcagtctggaaattaagatgatccgcaaagaggaccagggcatctacacctgtgtcgccaccaacatcctgggcaaagctgaaaaccaagtccgcctggaggtcaaagaccccaccaggatctaccggatgcccgaggaccaggtggccagaaggggcaccacggtgcagctggagtgtcgggtgaagcacgacccctccctgaaactcaccgtctcctggctgaaggatgacgagccgctctatattggaaacaggatgaagaaggaagacgactccctgaccatctttggggtggcagagcgggaccagggcagttacacgtgtgtcgccagcaccgagctagaccaagacctggccaaggcctacctcaccgtgctagctgatcaggccactccaactaaccgtttggctgccctgcccaaaggacggccagaccggccccgggacctggagctgaccgacctggccgagaggagcgtgcggctgacctggatccccggggatgctaacaacagccccatcacagactacgtcgtccagtttgaagaagaccagttccaacctggggtctggcatgaccattccaagtaccccggcagcgttaactcagccgtcctccggctgtccccgtatgtcaactaccagttccgtgtcattgccatcaacgaggttgggagcagccaccccagcctcccatccgagcgctaccgaaccagtggagcaccccccgagtccaatcctggtgacgtgaagggagaggggaccagaaagaacaacatggagatcacgtggacgcccatgaatgccacctcggcctttggccccaacctgcgctacattgtcaagtggaggcggagagagactcgagaggcctggaacaacgtcacagtgtggggctctcgctacgtggtggggcagaccccagtctacgtgccctatgagatccgagtccaggctgaaaatgacttcgggaagggccctgagccagagtccgtcatcggttactccggagaagattatcccagggctgcgcccactgaagttaaagtccgagtcatgaacagcacagccatcagccttcagtggaaccgcgtctactccgacacggtccagggccagctcagagagtaccgagcctactactggagggagagcagcttgctgaagaacctgtgggtgtctcagaagagacagcaagccagcttccctggtgaccgcctccgtggcgtggtgtcccgcctcttcccctacagtaactacaagctggagatggttgtggtcaatgggagaggtgatgggcctcgcagtgagaccaaggagttcaccaccccggaaggagtacccagtgcccctaggcgtttccgagtccggcagcccaacctggagacaatcaacctggaatgggatcatcctgagcatccaaatgggatcatgattggatacactctcaaatatgtggcctttaacgggaccaaagtaggaaagcagatagtggaaaacttctctcccaatcagaccaagttcacggtgcaaagaacggaccccgtgtcacgctaccgctttaccctcagcgccaggacgcaggtgggctctggggaagccgtcacagaggagtcaccagcacccccgaatgaaggcaaccatacgaaaaaaactgtcccagttaaggcccaggctcagcctatacagctgacagacctctatcccgggatgacatacacgttgcgggtttattcccgggacaacgagggcatcagcagtaccgtcatcacctttatgaccagtacagcttacaccaacaaccaagcggacatcgccacccagggctggttcattgggcttatgtgcgccatcgccctcctggtgctgatcctgctcatcgtctgtttcatcaagaggagtcgcggcggcaagtacccagtacgagaaaagaaggatgttccccttggccctgaagaccccaaggaagaggatggctcatttgactatagtgatgaggacaacaagcccctgcagggcagtcagacatctctggacggcaccatcaagcagcaggagagtgacgacagcctggtggactatggcgagggtggcgagggtcagttcaatgaagacggctccttcatcggccagtacacggtcaaaaaggacaaggaggaaacagagggcaacgaaagctcagaggccacgtcacctgtcaatgctatctactctctggcctaacggagcccacccaggcacagccaccactttgcaagtgggaggaggggagaaggggagacaaaaccactgcagacctaccacgaagccaccaccaccttcagtaacaagggtacgatatgggggtctgccaagctgtgaggaccagtagccaccaagccacccacaagccccctcccaatgaccccccttcagccccgggtgccaccagtgtgggagagctggagccgtggctgagctcagctggagggagcctggccccttgcccggtctcgcagccaccccgagcgttccaccacactgtccgcccttggcctcggcacacgctcaccttttctgttggttacgggacttctcattgtcttaatttcgctttgtgcatcttcccctccagacccaatgtctctgttttcttttccttttgaaaaagagtccctggaaaagaaagaataagtggattctcccccaggagaatcctttttgcaaagataggcaaaaaggattgaatccataccagaacacgtagacaggctgtaatattcaaaccacctctgggccaatgcatttccaaaggatgcctttctcgccatatgcctcccctggcccccagcccctctgcctcggccttgtcagttgctgagctgggcttggctcctttctggaaaatgacagtatttttggcagggagaaggtgcgcaggcctccttgctgctctctggtttggttgggaggtgtgtttacctcttgctcctcattcctcccctgcccttttctctggaatatctaagatgtgagctgcattgactctgaagacgtttgaggaacaggagtgggcactgatagaaaggacttcaacgccagtgactgtgtacctccagcagaagaaaatcaggtgtctggtcttgggggcactgtgctcacttctagagagaagaaaaaggctgggtttggacttcatgcctcctcactggtgaaacccaggatgtagatagagggccacacccaccctgtccagagtagagggcacctgtccacgtggccagggcccatgctgccaccctcgaggagatggaaccctgtgatgcaaaagctttgctggtgtgtttggggcataaggcactgctccccttccatctctagcagatatcatcttctcagccaattctgtaggacactgaggctcttgtttgacatggtgtgtggatggggacttgccccaagactgagcaggtctgccctttcattggggtgtatacatatcaggggaccctgaggtggcaccgtactcagtgttgtgatgcccccacctagggaggactcaatgctctttgtatgccttatgcagcgctgatctgtccctggagttcccaggttcccagctccccccctgcaagccttgaagcctccagcaacgtctatctccaggagagcagggcagcctatgcaagtgttccggcaggaccagaagtggccactcaacacacgtcctcaccagtcaccccaaatggagacactcgcagacctgcagttctcagaccgaaggtgctgccttcatcctccccacctaatgcatttttgaaaccaaaggtacctagcctcagagacagagaaggagagggggagatcttgagtctaagaggaaccctttagctgtttctgcagctgaggtcagtttcaggagggtgaagctgatccccaggaatggatcagctgccatgggcacagcctccgatttgagcctctccggctgccagccagggggcctgggccagaccagggctctgtccttccgtgactttattaaagcaacatttgccacatgtttaagccgcaaaggtattagcaatgcttgcatcattaataatcattcagttgaaggtcaagcccatagacacacactctctgctggtaagaaaccatagcccagaactgagccaataaggttgtttgaacctgagagtgtgtaatggtcatttgggccaagcctcagctagggctgctgcctggacgcctgaggggcagcttatcacagtgcaaggggacagggtaaacagcagggggtggggtgtgagcttggagggcccctcccctggatttcctccaacacctgcttggatactaggcccactgtccctgaagggaatgtcagggaagtgtgcctgtgagctgaattaaaggactggcctttccagaaaacgctttggatctgagcagagtagtcagtttctcagacactcattccatactgcaccgtacatgccagcgtacccattgcaccgaaagcaggcccttagggcaggaagggacgatgagcaagtctgccacaccacctggtgactgggaagggctgcttctctcgtaagggtcttggggagaagtaagcccgcagcctgcctctgcacctcgttccagtgtcctgccaggctctgtactgtcctttgtgtatgaagaaaatgctgttagccctctctcaggctgctgttctgtgggtgctgagagctgccccccatcaccacgccatcacacccctctgagcagaagcaaatctgaggctgaagaattaagttttccccaagcaaggaaggcaggtggtcagagagatcaaacgctgaggcgtggggattgcaggattcaggaggcagcccctttggggaagaggagggtgcattttccatggagcccatgtcagagtccactccagctcagcaggaaagtggaattgcccagtactgcctgccagctgggtctcccaagcaactaccccaagacataccaacagtgaagccaggacagcaccatgccatcggcgctccagtctgtctggctgggaggaaagtgctgggcatcttacagtaactctagaagttcctttgactaggctgcaatcccacctatatgctcagccctaagagctgtggtttcctgtgctctcatttgtccattcattcattcattcattcattcagcaaataatctgaaatccagtctgaactaaggcctgagctgtggataccatggcgcgtgagttagatgtggtccctgccctcatggggctgacagtcctaaaatcaagtgctaggacacagtggccattgagctgggagcattcttccctctaccgcttaagccactgatggctgcgagcttgaagagagggattctgagggagagcttggtccatctggtcaccaaggctgggcgggacagagcagtcaagaaccacggtgtggcttgagaaacagtcctgcttcctgagcctctttgctctgcctcttggggcaagctccttaacctgtctgtatttttatgcctctgtctcccattcagttcctccttgaatacctctttctacagagaggcacgggctcccctgaaggattgtcgaggccagggttcgggaagtacactgccatcggtcaggggacagctgcctcccaccttgcctgggtgatggtgaatgggactcatcttttcctgccttgcttttgaggagatggttgaatttaagctaacaggaaagccaaaccagcaccctcctttgtgctctgagaggttggagacatctggtccaccccattgcccctgcccctggcaagccctgaagtcgggagaggtgaccacaggtctgaaaatcagccagtgccaacattgcttgccctgcaaggtgcaactgagcccacatagcgcattcatagtttccctgaccacagccttgggaagacggtggaaacccgaggatgtgtgggtttcccagctaacggacaagctcccctgccacacccagtgcccacgcatgctcacatacatacagcagaccacaaccctgttgccaagcagtgcttccaagggatagcgatccagattccaacattgtcttggagagggttagtccacatccaagttgcgtgagataagatgcaaagggctctgtgtggatgaggaacgcaccttagaggagtgggaaaggccaccagggttgggccctgtttaggtaattcctgttggcagcacctagagagagcatctgagctgaaggagtgggaaactttgcccaagcaatggcacgggcagcgggctctttctggcgccctgtgctggagcagggccaagtcttagggcatcacaaacagcccatttgatggagggagcagggacatagcacatttttgtctgtctttgtgaggctgctttgctaactctctgaggagaggaagcctctcgggctttccgtcggctggggctagtgccagagaatcccttctcagtggccagcaggttcctgggaggccggcacaaggcaccgctccccactcatgacaccttggtgcagagtgacctcctgcccagtcaccactccggccagccccagccaaacacacaaaagcccatggttgcggttgcatctacaccgttagttggcaaaggatcctgcttgagctctgcgtggtggccaaggagtagcatggaggagggccctgattttaaaaaggaaaaatagagaggcctcaaaacaatgaaacaaagagcttgatatgtcaagaggagaccaaggccctgggaggcataggcaagccgggcagagtcagaccagtgccctcccttgaccatctcctagcattccttaacctagacaggggctaccccatgtgagtccaagccagactttgtggctgtccccagcctgcacagcccaagcccagggaagtgtcctttctttcccttccttactaataatgggccttcctgagacacattcagagaaggatcagagagaaaggagaaccatccaggagagccacaagcgtccaccaaacagtgtctcaggcctcacctgaagctgctgttcctcctatcagcacactagtattaaatgggtgttccataatgaggagaatggaaataggtacaaggcatctagcttaggacagaatcggatttcggcatgtgaaggaatcccagagctgatctcattgaaatgatctatcgtacagacaaggatatgcaaatccacagaagtgaagggatttttgctcaagatcacatagctggtaaactaaggtaaggttagggcttgaacttgggccttctgactccttgtccagtcagtgttctttcatctcaccacagctgcctcctttgaaacagaggtattaagatctgtccttctggttcaccctctcatacctctttactgcgtctcccacatcccccacatgcctcccaaaatgaaagacaaacaggattgtttctgagaccaagatcagtctgtctgtgatcagcctgtgtgtggttcacccagtcatgcaattaagggcagatctgggccagtggaataggatagctgattggtgtttgttactgtgaaccctagaccgtaccccgtagaatggtgtctcttgctttgtaacacatcgggccttcagtgtgctgtattcctcagaagtgagggcatctcggtccattctgcccatggccacagggtgcagagaggcagcagggcccatgcaagctgccaccctgggatttgctgggctggagttcaacagatgtaaagacttcagtgaagcaataaacacaaaactctgggagaagatatccagaattttgtacattactctgtttctttttcaaaaatgaggcagatcagatgcccctgagctgcccctttttttctgattcccaactgcaatgtcctcagtcagtgttgtccctctgcccggctccccagctctttgccaacctcttcacactccccttgagctgagcatcagtcgcctgtgacgtggccaccttctgtcctgctcccactcccgacccatgctggaccccggaggacctcctgccccgcccccaccacacacccatatcccccaccattccaatttgttctttcccgtggggaattttttttcccagcgtctccatcccttcctacatatccacacacacacaaattggtctgatcttttttccattggttaaacatttaactccatgccagaccttgttttaacccctctcacatcatgttctttccttttttgcgagttattttgcattaaccaactttgtcagtgacagatgcgtatctgagggtgtcacacacgaccttcagcagggaagacttctgggccatggagggccgtctaatacatggacttataaactgactgcatgagcaatgaaaaggccaaattattctgaattttttttgaatcactgtaaaaaaactgatttcttttgtatagagaacactaaacgtataataaaagttgttcaaaatgg

SEQ ID NO: 266239 - DNA, 5330 bp, Artificial Sequence
  derived and/or modified sequence
atcgaaattcctatggatctgacgcagccgccaaccatcaccaagcagtcagcgaaggatcacatcgtggacccccgtgataacatcctgattgagtgtgaagcaaaagggaaccctgcccccagcttccactggacacgaaacagcagattcttcaacatcgccaaggacccccgggtgtccatgaggaggaggtctgggaccctggtgattgacttccgcagtggcgggcggccggaggaatatgagggggaatatcagtgcttcgcccgcaacaaatttggcacggccctgtccaataggatccgcctgcaggtgtctaaatctcctctgtggcccaaggaaaacctagaccctgtcgtggtccaagagggcgctcctttgacgctccagtgcaaccccccgcctggacttccatccccggtcatcttctggatgagcagctccatggagcccatcacccaagacaaacgtgtctctcagggccataacggagacctatacttctccaacgtgatgctgcaggacatgcagaccgactacagttgtaacgcccgcttccacttcacccacaccatccagcagaagaaccctttcaccctcaaggtcctcaccaaccacccttataatgactcgtccttaagaaaccaccctgacatgtacagtgcccgaggagttgcagaaagaacaccaagcttcatgtatccccagggcaccgcgagcagccagatggtgcttcgtggcatggacctcctgctggaatgcatcgcctccggggtcccaacaccagacatcgcatggtacaagaaaggtggggacctcccatctgataaggccaagtttgagaactttaataaggccctgcgtatcacaaatgtctctgaggaagactccggggagtatttctgcctggcctccaacaagatgggcagcatccggcacacgatctcggtgagagtaaaggctgctccctactggctggacgaacccaagaaccttattctggctcctggcgaggatgggagactggtgtgtcgagccaatggaaaccccaaacccactgtccagtggatggtgaatggggaacctttgcaatcggcaccacctaacccaaaccgtgaggtggccggagacaccatcatcttccgggacacccagatcagcagcagggctgtgtaccagtgcaacacctccaacgagcatggctacctgctggccaacgcctttgtcagtgtgctggatgtgccgcctcggatgctgtcgccccggaaccagctcattcgagtgattctttacaaccggacgcggctggactgccctttctttgggtctcccatccccacactgcgatggtttaagaatgggcaaggaagcaacctggatggtggcaactaccatgtttatgagaacggcagtctggaaattaagatgatccgcaaagaggaccagggcatctacacctgtgtcgccaccaacatcctgggcaaagctgaaaaccaagtccgcctggaggtcaaagaccccaccaggatctaccggatgcccgaggaccaggtggccagaaggggcaccacggtgcagctggagtgtcgggtgaagcacgacccctccctgaaactcaccgtctcctggctgaaggatgacgagccgctctatattggaaacaggatgaagaaggaagacgactccctgaccatctttggggtggcagagcgggaccagggcagttacacgtgtgtcgccagcaccgagctagaccaagacctggccaaggcctacctcaccgtgctagctgatcaggccactccaactaaccgtttggctgccctgcccaaaggacggccagaccggccccgggacctggagctgaccgacctggccgagaggagcgtgcggctgacctggatccccggggatgctaacaacagccccatcacagactacgtcgtccagtttgaagaagaccagttccaacctggggtctggcatgaccattccaagtaccccggcagcgttaactcagccgtcctccggctgtccccgtatgtcaactaccagttccgtgtcattgccatcaacgaggttgggagcagccaccccagcctcccatccgagcgctaccgaaccagtggagcaccccccgagtccaatcctggtgacgtgaagggagaggggaccagaaagaacaacatggagatcacgtggacgcccatgaatgccacctcggcctttggccccaacctgcgctacattgtcaagtggaggcggagagagactcgagaggcctggaacaacgtcacagtgtggggctctcgctacgtggtggggcagaccccagtctacgtgccctatgagatccgagtccaggctgaaaatgacttcgggaagggccctgagccagagtccgtcatcggttactccggagaagattatcccagggctgcgcccactgaagttaaagtccgagtcatgaacagcacagccatcagccttcagtggaaccgcgtctactccgacacggtccagggccagctcagagagtaccgagcctactactggagggagagcagcttgctgaagaacctgtgggtgtctcagaagagacagcaagccagcttccctggtgaccgcctccgtggcgtggtgtcccgcctcttcccctacagtaactacaagctggagatggttgtggtcaatgggagaggtgatgggcctcgcagtgagaccaaggagttcaccaccccggaaggagtacccagtgcccctaggcgtttccgagtccggcagcccaacctggagacaatcaacctggaatgggatcatcctgagcatccaaatgggatcatgattggatacactctcaaatatgtggcctttaacgggaccaaagtaggaaagcagatagtggaaaacttctctcccaatcagaccaagttcacggtgcaaagaacggaccccgtgtcacgctaccgctttaccctcagcgccaggacgcaggtgggctctggggaagccgtcacagaggagtcaccagcacccccgaatgaagctactccaaccgcagcttacaccaacaaccaagcggacatcgccacccagggctggttcattgggcttatgtgcgccatcgccctcctggtgctgatcctgctcatcgtctgtttcatcaagaggagtcgcggcggcaagtacccagtacgagaaaagaaggatgttccccttggccctgaagaccccaaggaagaggatggctcatttgactatagtgatgaggacaacaagcccctgcagggcagtcagacatctctggacggcaccatcaagcagcaggagagtgacgacagcctggtggactatggcgagggtggcgagggtcagttcaatgaagacggctccttcatcggccagtacacggtcaaaaaggacaaggaggaaacagagggcaacgaaagctcagaggccacgtcacctgtcaatgctatctactctctggcctaacggagcccacccaggcacagccaccactttgcaagtgggaggaggggagaaggggagacaaaaccactgcagacctaccacgaagccaccaccaccttcagtaacaagggtacgatatgggggtctgccaagctgtgaggaccagtagccaccaagccacccacaagccccctcccaatgaccccccttcagccccgggtgccaccagtgtgggagagctggagccgtggctgagctcagctggagggagcctggccccttgcccggtctcgcagccaccccgagcgttccaccacactgtccgcccttggcctcggcacacgctcaccttttctgttggttacgggacttctcattgtcttaatttcgctttgtgcatcttcccctccagacccaatgtctctgttttcttttccttttgaaaaagagtccctggaaaagaaagaataagtggattctcccccaggagaatcctttttgcaaagataggcaaaaaggattgaatccataccagaacacgtagacaggctgtaatattcaaaccacctctgggccaatgcatttccaaaggatgcctttctcgccatatgcctcccctggcccccagcccctctgcctcggccttgtcagttgctgagctgggcttggctcctttctggaaaatgacagtatttttggcagggagaaggtgcgcaggcctccttgctgctctctggtttggttgggaggtgtgtttacctcttgctcctcattcctcccctgcccttttctctggaatatctaagatgtgagctgcattgactctgaagacgtttgaggaacaggagtgggcactgatagaaaggacttcaacgccagtgactgtgtacctccagcagaagaaaatcaggtgtctggtcttgggggcactgtgctcacttctagagagaagaaaaaggctgggtttggacttcatgcctcctcactggtgaaacccaggatgtagatagagggccacacccaccctgtccagagtagagggcacctgtccacgtggccagggcccatgctgccaccctcgaggagatggaaccctgtgatgcaaaagctttgctggtgtgtttggggcataaggcactgctccccttccatctctagcagatatcatcttctcagccaattctgtaggacactgaggctcttgtttgacatggtgtgtggatggggacttgccccaagactgagcaggtctgccctttcattggggtgtatacatatcaggggaccctgaggtggcaccgtactcagtgttgtgatgcccccacctagggaggactcaatgctctttgtatgccttatgcagcgctgatctgtccctggagttcccaggttcccagctccccccctgcaagccttgaagcctccagcaacgtctatctccaggagagcagggcagcctatgcaagtgttccggcaggaccagaagtggccactcaacacacgtcctcaccagtcaccccaaatggagacactcgcagacctgcagttctcagaccgaaggtgctgccttcatcctccccacctaatgcatttttgaaaccaaaggtacctagcctcagagacagagaaggagagggggagatcttgagtctaagaggaaccctttagctgtttctgcagctgaggtcagtttcaggagggtgaagctgatccccaggaatggatcagctgccatgggcacagcctccgatttgagcctctccggctgccagccagggggcctgggccagaccagggctctgtccttccgtgactttattaaagcaacatttgccacatgtttaagccgcaaa

SEQ ID NO: 266240 - DNA, 3570 bp, Artificial Sequence
  derived and/or modified sequence
atggcccgacagccccctccaccatgggtgcatgcggcatttctgctatgtctgctgagcctagggggtgccatcgaaattccaatggacttaacccagccgcctacaataacaaaacagtctgccaaagaccatatcgtagaccctcgggataacattctgattgagtgtgaggcgaaaggtaaccctgccccaagttttcactggacccgcaacagcaggtttttcaacattgcaaaagaccccagggtgagtatgcgcagacgtagtggaacactggtgattgacttcaggtcaggaggcagacccgaggagtacgagggcgagtatcagtgctttgcaagaaacaagttcggtactgctctcagcaacaggattcgcttgcaggttagtaaatctccactctggccgaaggagaacctcgatcctgtggtcgtgcaggagggcgcacccctgactctccagtgtaaccctccgcctgggctgccttccccggtgatcttctggatgagtagctcaatggaacccattacccaggataaacgtgtgagccagggccacaacggggatctatactttagcaacgtgatgctccaagacatgcagacggactatagctgcaatgcacgtttccatttcactcatacaattcagcagaaaaatccattcacccttaaggtgctcaccaatcacccttataatgatagcagcctccgcaaccacccagatatgtactccgctcggggtgtcgcggagagaacccccagcttcatgtacccccaaggcactgcatcttctcaaatggttctgcggggtatggacctcttactggaatgtattgcttctggggttcctaccccagatattgcctggtacaaaaaagggggagacttaccgtcagacaaagccaagtttgaaaattttaataaagcacttagaattactaacgtgtccgaggaggacagcggagagtacttctgcttggcctcaaacaagatggggagcattcgtcacaccataagtgttagggtgaaagccgctccttattggctggatgaacctaagaacctgattctcgccccaggcgaagacgggagacttgtgtgtcgggctaacggcaaccccaagcctactgtccagtggatggttaacggtgagcccctccagtccgccccacccaaccccaatcgcgaggtggcgggagatactatcatctttcgggatacacagatctcgtcccgggctgtatatcagtgcaatacttccaacgaacacgggtatctgttggcaaatgctttcgtgtccgtgctcgacgttccaccaaggatgctaagcccacgaaaccagctgattagagtgatcctgtataataggaccagattagattgcccctttttcgggagccccatccccacacttcgatggtttaagaacggccagggctccaaccttgacggcggaaattatcatgtgtatgaaaatggcagccttgagatcaaaatgattcgcaaggaagaccaggggatttatacctgtgtggccactaacatcttagggaaggctgaaaaccaggtgcggctggaggttaaggatccaaccagaatttatcgcatgccagaagatcaggtcgcccgtaggggtacgactgtccaactggagtgccgggtgaaacatgatccctccctgaagttgactgtatcctggcttaaggacgacgagccgctgtatataggcaatagaatgaagaaggaagacgattctctgaccattttcggcgtcgccgagagggaccagggcagctacacttgtgttgcctctaccgagctggaccaggatcttgcgaaagcttatctgacagttctggccgatcaggctactccaacaaaccgcctggccgctttaccgaaaggcaggcctgaccgccctcgtgatctggagctaacggatctcgcggagcggagtgtccggctgacttggattcctggcgacgcaaacaactctcccattacggactatgtggttcagttcgaggaagatcaatttcagcccggtgtttggcatgaccacagcaagtatccagggtctgttaacagcgccgtgctccgcctgagtccatacgtcaactaccagttccgcgttatcgccatcaacgaagtgggaagttctcacccatctctgccaagcgagcgctatcgtacctcaggggcaccgcctgagagcaatccaggcgatgtcaagggagaaggcacgaggaaaaacaatatggagatcacttggacccccatgaatgctaccagcgcgttcggacctaatctacgctatattgtgaagtggcggaggagagagacaagagaagcctggaataatgtcaccgtgtggggttcacgatatgtggtgggccaaacccccgtgtatgtgccatacgaaatccgcgtgcaggcggaaaacgacttcggcaaaggcccagaaccagaatcagtgattggctatagtggggaagattatccacgcgctgctccaaccgaggtgaaggtgcgggtgatgaactcgaccgccataagcctgcaatggaacagagtatactcggataccgtccaggggcagctgagagagtaccgagcctattactggagggaaagttctcttctcaagaatctctgggtgtcccaaaagagacagcaggcgtcgttcccaggcgaccggctccggggtgtcgtgtcaagattgtttccatacagcaactacaagttggagatggtggtggtgaatggtagaggcgacgggcctaggtccgagaccaaggaatttaccacgcccgagggagtgccctccgcccctcggcgtttccgtgtgagacagccaaacctggagaccataaatctggagtgggaccaccccgagcatccaaacggaatcatgataggatatactctcaagtacgtggccttcaacggaacaaaagtaggcaaacagatcgtggagaacttcagcccaaatcaaacaaagtttacagtgcagaggacagatccggtgtcacgatacagatttactctctccgccaggacgcaggttggctcaggagaagccgtgacagaggaaagccctgctcccccaaacgaaggatccccattggctgcgtatacgaataatcaagccgatatagctactcaaggatggttcattggtcttatgtgcgcgattgctctgctggtactgatcctgttgatagtgtgcttcatcaagcgaagcagaggcggtaagtaccctgtgagagaaaagaaagacgtgcctctgggaccagaagatcccaaagaggaggacgggagcttcgactactctgatgaggacaataagcccctgcaaggaagccagacttccctggacggcaccattaaacagcaggagtccgatgactcactcgtcgactatggggaaggtggggagggtcaattcaacgaagacggctcgtttatcggtcagtacacagttaagaaggacaaggaagaaaccgaaggaaatgaatccagtgaagctactagtcctgtcaatgccatttatagccttgcctag

SEQ ID NO: 266241 - DNA, 3498 bp, Artificial Sequence
  derived and/or modified sequence
atcgaaatccccatggatctcacccagcctccgacaattacaaaacagtccgcaaaggaccatatagtagatccaagggacaacatcctaatagaatgcgaggcaaaggggaaccctgccccaagctttcactggacgcggaatagcagattttttaatatcgctaaagacccaagggtgtcaatgaggcgtcggtccggcacccttgtgatagatttccgaagtggcggacgccctgaagagtacgagggggagtaccagtgcttcgccagaaataagtttggaacagccttatctaataggatccgcttgcaagtgagcaagagtcccctatggcctaaagaaaacctagatccggtggtggtgcaagaaggtgcccctctaaccctgcagtgcaacccacccccaggactgcctagtcctgttatattctggatgagctctagcatggagcccatcactcaggataagcgcgtttcccagggacataacggtgacctctacttcagcaacgtgatgcttcaggatatgcagactgactacagctgcaacgcccgttttcactttacccatacaattcaacaaaagaatccattcacactcaaggtgctgacgaaccacccttacaacgactccagcttgcggaaccatccagatatgtattcagccaggggggtagccgagcgaacaccgagcttcatgtacccacagggaacggcatcatcacagatggtgcttagaggaatggacctcctgcttgaatgcattgcctctggagttcctaccccagatattgcttggtataagaaggggggtgatctcccaagtgacaaggctaagtttgaaaatttcaacaaagctttaagaattacaaatgtgagcgaggaagattcgggagagtacttttgcctggcatccaataagatgggatcaatccgccacaccattagcgttagagtgaaagcagccccatactggctggacgagcctaaaaatctcatccttgctcccggagaagacgggaggctcgtgtgccgggcaaatggcaatccaaagccgacagtccagtggatggtgaacggggagccattgcaatccgctcctcctaacccaaatcgcgaggtagcgggagacaccatcattttccgcgatacacaaatttcgtccagagctgtttaccagtgcaataccagcaacgaacacggttatctcttagccaacgctttcgtctcagtgctcgatgtgccaccccgaatgctttctcccaggaaccaactgatcagggtgattctatacaatcggaccagacttgactgcccgttttttgggtcaccaattcctacacttcggtggttcaagaatgggcaaggctctaacctcgacggcggtaactatcatgtctacgagaatggtagcctggagatcaagatgatccggaaggaggatcagggcatttatacatgtgttgctaccaacattttaggaaaagcagaaaatcaggtccggctcgaggtgaaagatcccaccagaatttatagaatgcccgaggaccaggtggcaagaagggggaccactgtgcaactcgaatgccgcgtgaaacacgaccctagcttgaaactaaccgtttcatggctaaaagacgatgagcccctgtatatcggtaacaggatgaaaaaggaagatgacagtttgacgattttcggcgtagcagaaagggatcagggctcatacacttgtgttgcgtctacagaattagaccaggatctcgccaaggcgtatctgaccgttctggccgaccaggcgactcccactaatcgactggctgcactgcctaagggcaggcccgatcgcccacgggatctggaactgacagatttggcagagaggtcggtaaggctcacgtggataccaggggacgccaacaacagccccatcacagactatgtcgtgcagttcgaggaagaccagtttcagcctggcgtgtggcatgaccatagcaaatacccaggatctgtcaacagcgcggttttgcgcctttccccatacgttaattatcagttccgagtgattgctatcaatgaggtggggtcctcacacccctctctgccttctgagagataccgtacttcgggcgcacccccagaatctaaccctggcgatgtgaagggcgagggcacccggaagaacaacatggaaattacctggacaccgatgaacgcaactagtgcgttcggcccaaacttgaggtacattgtgaagtggcgcaggcgagaaactagagaggcgtggaataatgtcactgtgtgggggtcacgctacgtggttggacagacgccagtgtacgtgccctatgagataagagtacaggctgagaatgactttggcaagggtccggagcctgagtctgttatcgggtacagcggagaggattacccgcgtgccgcacccactgaagttaaggttagagttatgaattccacagccatatccctccaatggaacagagtatactctgacaccgtgcaggggcaactccgggaatacagggcctactactggcgggagagcagtctgctgaagaacctgtgggttagccagaaacgccagcaagcaagtttcccgggagaccggctgcgcggagtggtgtcgcgtttattcccctacagcaattacaagctggaaatggtggtggtgaatggacgaggggatggaccgcgttccgaaaccaaagagttcactacccccgagggcgttccctcagcaccaagacgcttcagggttaggcagccaaatctagagaccataaatctcgagtgggatcatcctgagcaccccaatggcattatgatcggatatacgctgaaatacgtggccttcaatgggacgaaggtggggaagcagattgtcgaaaacttttcccccaaccaaacaaagtttacagtccagcgaacagaccccgtaagccgataccgcttcacactgtcagcaagaacacaggtgggcagtggtgaggctgtaaccgaagaatctccggctcctcctaatgaggctacacctactgcagcctacacgaacaatcaagccgacatcgcgacccaaggatggttcatcggcctgatgtgtgcaatagcactgctggtccttatacttctcattgtctgctttattaaacggagtcgcggaggaaagtatccagtacgggaaaagaaagatgttcctttaggacctgaggacccgaaggaggaggatggctcattcgactatagtgatgaggacaacaagccattacaggggagtcagacttctcttgatgggaccatcaagcagcaggaaagcgacgatagccttgtcgattacggggaggggggagagggccaattcaacgaggacgggtccttcattgggcaatatactgtgaagaaggataaggaggagactgaaggcaatgaatctagcgaagctaccagccccgttaatgcaatttacagcctggcgtag

SEQ ID NO: 266242 - protein, 1174 aa, Artificial Sequence
  derived and/or modified sequence
MARQPPPPWVHAAFLLCLLSLGGAIEIPMDLTQPPTITKQSAKDHIVDPRDNILIECEAKGNPAPSFHWTRNSRFFNIAKDPRVSMRRRSGTLVIDFRSGGRPEEYEGEYQCFARNKFGTALSNRIRLQVSKSPLWPKENLDPVVVQEGAPLTLQCNPPPGLPSPVIFWMSSSMEPITQDKRVSQGHNGDLYFSNVMLQDMQTDYSCNARFHFTHTIQQKNPFTLKVLTNHPYNDSSLRNHPDMYSARGVAERTPSFMYPQGTASSQMVLRGMDLLLECIASGVPTPDIAWYKKGGDLPSDKAKFENFNKALRITNVSEEDSGEYFCLASNKMGSIRHTISVRVKAAPYWLDEPKNLILAPGEDGRLVCRANGNPKPTVQWMVNGEPLQSAPPNPNREVAGDTIIFRDTQISSRAVYQCNTSNEHGYLLANAFVSVLDVPPRMLSPRNQLIRVILYNRTRLDCPFFGSPIPTLRWFKNGQGSNLDGGNYHVYENGSLEIKMIRKEDQGIYTCVATNILGKAENQVRLEVKDPTRIYRMPEDQVARRGTTVQLECRVKHDPSLKLTVSWLKDDEPLYIGNRMKKEDDSLTIFGVAERDQGSYTCVASTELDQDLAKAYLTVLGRPDRPRDLELTDLAERSVRLTWIPGDANNSPITDYVVQFEEDQFQPGVWHDHSKYPGSVNSAVLRLSPYVNYQFRVIAINEVGSSHPSLPSERYRTSGAPPESNPGDVKGEGTRKNNMEITWTPMNATSAFGPNLRYIVKWRRRETREAWNNVTVWGSRYVVGQTPVYVPYEIRVQAENDFGKGPEPESVIGYSGEDYPRAAPTEVKVRVMNSTAISLQWNRVYSDTVQGQLREYRAYYWRESSLLKNLWVSQKRQQASFPGDRLRGVVSRLFPYSNYKLEMVVVNGRGDGPRSETKEFTTPEGVPSAPRRFRVRQPNLETINLEWDHPEHPNGIMIGYTLKYVAFNGTKVGKQIVENFSPNQTKFTVQRTDPVSRYRFTLSARTQVGSGEAVTEESPAPPNEATPTAAYTNNQADIATQGWFIGLMCAIALLVLILLIVCFIKRSRGGKYPVREKKDVPLGPEDPKEEDGSFDYSDEDNKPLQGSQTSLDGTIKQQESDDSLVDYGEGGEGQFNEDGSFIGQYTVKKDKEETEGNESSEATSPVNAIYSLA

SEQ ID NO: 266243 - DNA, 3525 bp, Artificial Sequence
  derived and/or modified sequence
atggccagacagcccccccccccctgggtgcacgccgccttcctgctgtgcctgctgagcctgggcggcgccatcgagatccccatggacctgacccagccccccaccatcaccaagcagagcgccaaggaccacatcgtggaccccagagacaacatcctgatcgagtgcgaggccaagggcaaccccgcccccagcttccactggaccagaaacagcagattcttcaacatcgccaaggaccccagagtgagcatgagaagaagaagcggcaccctggtgatcgacttcagaagcggcggcagacccgaggagtacgagggcgagtaccagtgcttcgccagaaacaagttcggcaccgccctgagcaacagaatcagactgcaggtgagcaagagccccctgtggcccaaggagaacctggaccccgtggtggtgcaggagggcgcccccctgaccctgcagtgcaaccccccccccggcctgcccagccccgtgatcttctggatgagcagcagcatggagcccatcacccaggacaagagagtgagccagggccacaacggcgacctgtacttcagcaacgtgatgctgcaggacatgcagaccgactacagctgcaacgccagattccacttcacccacaccatccagcagaagaaccccttcaccctgaaggtgctgaccaaccacccctacaacgacagcagcctgagaaaccaccccgacatgtacagcgccagaggcgtggccgagagaacccccagcttcatgtacccccagggcaccgccagcagccagatggtgctgagaggcatggacctgctgctggagtgcatcgccagcggcgtgcccacccccgacatcgcctggtacaagaagggcggcgacctgcccagcgacaaggccaagttcgagaacttcaacaaggccctgagaatcaccaacgtgagcgaggaggacagcggcgagtacttctgcctggccagcaacaagatgggcagcatcagacacaccatcagcgtgagagtgaaggccgccccctactggctggacgagcccaagaacctgatcctggcccccggcgaggacggcagactggtgtgcagagccaacggcaaccccaagcccaccgtgcagtggatggtgaacggcgagcccctgcagagcgccccccccaaccccaacagagaggtggccggcgacaccatcatcttcagagacacccagatcagcagcagagccgtgtaccagtgcaacaccagcaacgagcacggctacctgctggccaacgccttcgtgagcgtgctggacgtgccccccagaatgctgagccccagaaaccagctgatcagagtgatcctgtacaacagaaccagactggactgccccttcttcggcagccccatccccaccctgagatggttcaagaacggccagggcagcaacctggacggcggcaactaccacgtgtacgagaacggcagcctggagatcaagatgatcagaaaggaggaccagggcatctacacctgcgtggccaccaacatcctgggcaaggccgagaaccaggtgagactggaggtgaaggaccccaccagaatctacagaatgcccgaggaccaggtggccagaagaggcaccaccgtgcagctggagtgcagagtgaagcacgaccccagcctgaagctgaccgtgagctggctgaaggacgacgagcccctgtacatcggcaacagaatgaagaaggaggacgacagcctgaccatcttcggcgtggccgagagagaccagggcagctacacctgcgtggccagcaccgagctggaccaggacctggccaaggcctacctgaccgtgctgggcagacccgacagacccagagacctggagctgaccgacctggccgagagaagcgtgagactgacctggatccccggcgacgccaacaacagccccatcaccgactacgtggtgcagttcgaggaggaccagttccagcccggcgtgtggcacgaccacagcaagtaccccggcagcgtgaacagcgccgtgctgagactgagcccctacgtgaactaccagttcagagtgatcgccatcaacgaggtgggcagcagccaccccagcctgcccagcgagagatacagaaccagcggcgccccccccgagagcaaccccggcgacgtgaagggcgagggcaccagaaagaacaacatggagatcacctggacccccatgaacgccaccagcgccttcggccccaacctgagatacatcgtgaagtggagaagaagagagaccagagaggcctggaacaacgtgaccgtgtggggcagcagatacgtggtgggccagacccccgtgtacgtgccctacgagatcagagtgcaggccgagaacgacttcggcaagggccccgagcccgagagcgtgatcggctacagcggcgaggactaccccagagccgcccccaccgaggtgaaggtgagagtgatgaacagcaccgccatcagcctgcagtggaacagagtgtacagcgacaccgtgcagggccagctgagagagtacagagcctactactggagagagagcagcctgctgaagaacctgtgggtgagccagaagagacagcaggccagcttccccggcgacagactgagaggcgtggtgagcagactgttcccctacagcaactacaagctggagatggtggtggtgaacggcagaggcgacggccccagaagcgagaccaaggagttcaccacccccgagggcgtgcccagcgcccccagaagattcagagtgagacagcccaacctggagaccatcaacctggagtgggaccaccccgagcaccccaacggcatcatgatcggctacaccctgaagtacgtggccttcaacggcaccaaggtgggcaagcagatcgtggagaacttcagccccaaccagaccaagttcaccgtgcagagaaccgaccccgtgagcagatacagattcaccctgagcgccagaacccaggtgggcagcggcgaggccgtgaccgaggagagccccgccccccccaacgaggccacccccaccgccgcctacaccaacaaccaggccgacatcgccacccagggctggttcatcggcctgatgtgcgccatcgccctgctggtgctgatcctgctgatcgtgtgcttcatcaagagaagcagaggcggcaagtaccccgtgagagagaagaaggacgtgcccctgggccccgaggaccccaaggaggaggacggcagcttcgactacagcgacgaggacaacaagcccctgcagggcagccagaccagcctggacggcaccatcaagcagcaggagagcgacgacagcctggtggactacggcgagggcggcgagggccagttcaacgaggacggcagcttcatcggccagtacaccgtgaagaaggacaaggaggagaccgagggcaacgagagcagcgaggccaccagccccgtgaacgccatctacagcctggcctag

SEQ ID NO: 266244 - DNA, 3525 bp, Artificial Sequence
  derived and/or modified sequence
atggctcgtcagcctcctcctccctgggttcacgccgccttccttctgtgcctgctcagccttggcggagccattgagattccaatggacctgacacaacccccgaccataactaagcaatccgccaaggaccacatagtcgacccacgcgataatatcctgattgagtgcgaggctaaggggaatcctgccccttctttccactggacaagaaacagcaggttctttaacattgccaaggacccccgcgtgtctatgaggcgccggtcagggacgctagttatcgatttccgtagtgggggccgacctgaggagtatgagggggaatatcagtgtttcgctaggaacaagttcgggaccgcgttgagcaaccgaatacgcttacaggtgtctaagtcaccactttggccaaaagagaaccttgaccccgtggtggtacaggagggagctcccctgacgctgcagtgcaacccacctcctggactcccctctcccgtgattttctggatgtcatcttccatggaacccatcacccaggataaaagggtctcccagggccataatggggatctatatttttctaatgtgatgctgcaggatatgcagacggactattcttgcaacgcccgcttccattttacccacaccatccagcagaagaacccctttaccttaaaggtgctaaccaatcacccatataatgattcgtcgttacgtaaccaccccgatatgtattccgcccgcggagtggctgagaggacgcccagttttatgtatccccagggtactgcctcttctcagatggttctgagaggaatggacttgctgctggagtgcatagcttccggtgtccctactccagacatcgcatggtataagaaaggcggtgatttgccaagcgacaaggctaagtttgagaattttaataaggcccttcgcatcacaaatgttagtgaagaggattccggcgagtacttttgcttggccagcaacaagatgggttccatccgacacacaattagcgtacgggtgaaggccgcgccatactggctggacgaacctaaaaacttgatcctagccccaggggaggatggccgactcgtttgtcgcgccaatggaaaccccaagcctaccgttcaatggatggtcaatggcgagcccttgcagagcgcacctcccaatcccaacagagaagtagctggggacacgatcatcttccgagacacccaaatcagcagtcgagctgtatatcaatgcaatacaagcaatgagcatgggtacttactggctaatgcctttgtgtcagtcctggacgtcccgcctcgcatgctcagcccaagaaaccagttaattcgtgtaatactgtataatcggaccagattggattgcccattcttcgggtctccaatcccaacgctgcgatggtttaagaacggccagggctcaaatctggacggaggaaactatcacgtgtatgaaaacggatcactagagatcaagatgatcagaaaggaagatcaggggatttatacgtgcgtggccactaacattctaggaaaggccgaaaatcaagttcgactggaggtgaaagaccccactaggatatacaggatgcccgaggaccaggttgcccgccgcggtactactgtgcagctggaatgcagggtcaaacacgatccctccttaaagctaacagtctcttggctcaaagatgatgaacccctttacatcggcaaccggatgaagaaagaagatgactctctcactattttcggagtggctgagcgagaccaaggatcgtacacttgcgtcgcgagcaccgagctcgatcaggatctggccaaagcgtatttgacagtcctggggcgccccgacagacctcgcgatttggaactcaccgacctggctgaacgctctgttcggctcacctggatccccggagatgccaacaacagccctattacagactacgtggtgcaattcgaagaggaccaatttcagcccggggtgtggcacgatcatagtaaatatccaggcagcgtgaactctgccgtactgaggctgtcgccatacgtcaattaccaattcagggtgatcgctatcaatgaagtggggagcagccatcccagcttgcccagcgagcgatacagaacctcaggagctcctcccgagtccaatccaggggatgtgaagggagaggggactagaaaaaacaatatggaaatcacttggactccaatgaatgctacaagcgccttcggacctaatttgagatacattgtcaaatggaggcgccgcgaaactcgagaagcctggaacaacgtgaccgtttggggcagtcggtacgtggtgggacagactcccgtctatgtcccatatgagattagggtacaggctgagaacgatttcggcaaaggcccagagccggagagtgtgatcggctattcaggtgaggactatccccgggctgcccctaccgaagtgaaagtgagggttatgaattctacggctatctccttacagtggaaccgagtctactcagacactgttcagggtcagctcagggagtacagagcctactactggcgggagtcttccctcctcaagaacctatgggtctctcagaaacggcagcaggcttcgttccctggcgacagactaaggggagtggttagccgcctcttcccatattcaaactataagctggagatggtggtggtgaatggtaggggcgacggccctagatcggaaaccaaggagttcacaacccccgagggagtgccaagcgctcctaggcgctttagggtgagacagcctaatctcgagacaattaacctggagtgggaccaccctgaacatcccaatgggataatgatcggctacacgcttaaatatgtggccttcaacggtaccaaagtgggcaaacagatcgtggaaaacttcagccccaaccaaaccaagttcaccgttcagcgaactgatcccgtgagcagataccggtttacattatccgcccgaacccaggtcggttctggtgaggctgtgacagaggaaagcccggccccacccaatgaggccacaccaacggcggcttataccaataatcaggccgacatagcaacacagggttggtttattggtttaatgtgtgcgatcgctctcctggtccttatactgttgattgtatgctttatcaagcgctccagaggcggtaaataccccgttcgagaaaaaaaagatgtgcccctggggccggaggacccaaaggaagaagacggaagtttcgattattccgacgaggacaataagccccttcagggatcacagacctccctcgatgggacaattaagcaacaggagtcagacgactctctggtggattacggggagggcggcgaggggcagttcaatgaagacggatcatttatcggacagtacacagtgaagaaggacaaggaggagaccgaggggaatgagtcatctgaggccacaagccctgttaacgccatatactctttggcatag

SEQ ID NO: 266245 - DNA, 3525 bp, Artificial Sequence
  derived and/or modified sequence
atggccaggcagccgcctccaccgtgggtgcacgcagcctttcttctgtgtctgctttcacttggcggtgccatcgagatccccatggacctgacccagcctcccacaatcaccaagcaatcagccaaagatcatatcgtagaccccagggataacatactgatcgagtgtgaggcgaagggaaacccagctccgagctttcattggactcgcaattcccgcttcttcaatatcgcaaaggacccacgggtgtcaatgaggcgccggtcagggactcttgtcattgatttccgtagtggcggcaggccagaagagtacgaaggggaatatcagtgttttgccaggaacaagttcggcactgccctctcaaatcggatccgactgcaggtgtcaaagagccctttgtggccgaaagagaacctggacccagtggtagtccaggagggagctcctctgacactccagtgcaaccccccacctggactcccatctccggtcattttctggatgtccagctcaatggagcccatcacccaggataagcgagtctctcaaggccataatggcgatctttacttcagcaatgtcatgctgcaggacatgcagacagattattcttgtaacgcacggttccattttacacatactatccagcaaaagaacccgtttacgctcaaggtactgaccaaccatccctacaacgacagctcgctgagaaatcacccggacatgtactccgctagaggggtcgccgagaggacgcctagttttatgtatcctcaggggaccgctagtagtcagatggtgctgcggggtatggatctgctcttggaatgcatcgcctcaggtgtaccgactcccgatattgcctggtacaagaagggtggcgatctcccatccgataaagccaagttcgaaaatttcaacaaggcattgagaattactaacgtctccgaagaagattctggcgagtacttctgtcttgcttctaataaaatgggaagtatccgacatactatctcagtacgagtgaaggccgccccttactggctggacgagccaaaaaacctgatccttgcacccggcgaggatggccgcctggtgtgccgcgccaatgggaatccgaagcctactgtccagtggatggttaatggtgagccgctgcagagtgccccaccaaatcctaatcgggaggtcgctggcgatactattatatttagagacacacaaatcagctccagagctgtgtaccaatgcaatacgtcaaatgaacatggctaccttctggctaatgcctttgtatccgtgctcgatgtgccacccaggatgctgtcaccccgtaatcagctcattcgagtgatactgtacaaccggactaggctggactgtcccttttttggatcccctattcctacactgagatggttcaagaatggccagggatcaaatctggacggcggaaactaccacgtgtatgagaatggctccctcgaaatcaagatgatccgtaaagaggatcagggtatttacacttgtgtcgccaccaatattctcggtaaggccgaaaaccaggtccgactagaagtgaaggatccaacaaggatatatagaatgcccgaggatcaggtggctagacgtgggactactgtccagctagaatgtcgggttaagcacgatccgagcttaaagctcaccgtgtcgtggctgaaagatgacgagccgctgtacattggcaatcggatgaagaaggaggacgactctcttactatttttggggtcgcggaacgggatcaagggagttacacctgcgtggcttccactgagcttgaccaggaccttgccaaggcctacttgactgtgctgggacgtccagatcggcctcgggacctggaactcacagacctagccgagcggtctgtgcgcctgacctggattccaggtgatgcaaacaattcacctatcaccgactacgtcgtccagtttgaagaggaccagttccaacctggagtttggcatgaccactccaagtaccctggctctgtgaactctgccgtactgcggctttctccctacgtgaactaccaattcagagtgatagctatcaatgaagtaggcagtagtcacccatccctgccctcagagcgatatagaaccagcggggcccctccagaaagtaaccctggggatgtgaagggcgagggcaccagaaaaaacaatatggagattacctggaccccaatgaatgctacatctgcctttggaccaaatctgagatatattgtgaaatggcggaggagagagacccgagaagcgtggaacaatgtgacagtttggggcagccggtatgtggtaggacagaccccggtgtacgtgccttacgaaatccgagtacaggcagagaacgactttggtaaggggcccgagcccgagtcagtgattgggtactctggcgaggactacccacgcgcagccccaactgaagtcaaggtcagagtgatgaactctactgcaatatcccttcagtggaaccgggtgtacagtgacactgttcaggggcagttaagggaatacagagcctattactggcgtgaaagttctctcctgaagaatctgtgggtttctcagaagagacagcaggcaagctttcctggcgacagacttaggggtgtggttagcagactctttccgtacagtaattataagctggagatggttgtcgtcaatgggcgcggggatggacctcggtcagaaactaaagaatttacgacccctgaaggagtaccctctgctcctcgacggtttagggtacgtcaacccaatctggaaacaatcaacctggagtgggaccaccctgaacaccctaacgggattatgatagggtatacactgaagtacgtagccttcaacggaacgaaagtgggaaagcagattgtcgagaactttagcccaaatcagaccaagtttactgtacagagaaccgaccccgtgtcaagatatcggtttacccttagtgcccggacccaagtgggaagtggggaggcggtgaccgaggagtctccagctccaccgaacgaggccacgccaactgctgcgtacactaacaatcaggcggatatcgcaacacagggctggttcattgggcttatgtgtgcgatagctttgttggtactaattctgttaattgtgtgttttattaagcgatctcgcgggggaaagtaccccgtcagagagaagaaggatgttcccctcggtccagaggatcccaaagaggaggacggttctttcgattattcggacgaagacaataagccccttcaagggagccaaacttcactagatggcacaattaagcagcaggagtccgacgatagtctcgtggactacggtgaggggggcgaaggacagtttaatgaggacggcagctttataggtcagtatacagtgaagaaagacaaggaagagacagaaggcaacgagagctcggaggctaccagccccgtcaacgcaatttacagcctggcctag

SEQ ID NO: 266246 - DNA, 3525 bp, Artificial Sequence
  derived and/or modified sequence
atggcccggcagcccccaccaccctgggtgcacgccgccttcctgctgtgcctgctgagcctgggcggggccatcgagatccccatggacctgacccagccccccaccatcaccaagcagagcgccaaggaccacatcgtggacccccgggacaacatcctgattgaatgtgaggccaagggcaacccagcccccagcttccactggaccaggaacagccgcttcttcaacatcgccaaggacccccgggtgtccatgagaagaagaagtggcaccctggtgattgacttccgcagcggcggccggcctgaggagtatgaaggagagtaccagtgctttgccaggaacaagtttggaacagccctgagcaaccgcatccggctgcaggtgtccaagagccccctgtggcccaaggagaacctggaccctgtggtggtgcaggagggcgcccccctgaccctgcagtgcaaccccccacctggcctgcccagccctgtgatcttctggatgagcagctccatggagcccatcacccaggacaagagggtgtcccagggccacaacggggacctgtacttcagcaatgtgatgctgcaggacatgcagacagactacagctgcaatgcccgcttccacttcacccacaccatccagcagaagaaccccttcaccctgaaggtgctgaccaaccacccctacaatgacagcagcctgaggaaccacccagacatgtacagcgcccggggcgtggccgagaggacccccagcttcatgtacccccagggcacagccagcagccagatggtgctgcggggcatggacctgctgctggagtgcatcgccagcggcgtgcccaccccagacatcgcctggtacaagaagggcggggacctgcccagcgacaaggccaagtttgagaacttcaacaaggccctgcgcatcaccaacgtgtctgaggaggacagcggggagtacttctgcctggccagcaacaagatgggcagcatccgccacaccatctctgtgcgggtgaaggccgccccctactggctggatgagcccaagaacctgatcctggcccctggagaagatggccgcctggtgtgccgggccaacggcaaccccaagcccaccgtgcagtggatggtgaatggagagcccctgcagagcgccccacccaaccccaaccgggaggtggccggggacaccatcatcttccgggacacccagatcagcagcagagctgtgtaccagtgcaacaccagcaatgaacatggctacctgctggccaatgcctttgtgtctgtgctggatgtgccccccaggatgctgagccccaggaaccagctgatccgggtcatcctgtacaacagaacccggctggactgccccttcttcggcagccccatccccaccctgcgctggttcaagaatggccagggcagcaacctggatggcggcaactaccacgtgtatgaaaatggcagcctggagatcaagatgatcagaaaagaagaccagggcatctacacctgtgtggccaccaacatcctgggcaaggccgagaaccaggtgcggctggaggtgaaggaccccacccgcatctacaggatgcctgaggaccaggtggcccggcggggcaccaccgtgcagctggagtgccgggtgaagcatgaccccagcctgaagctgactgtgtcctggctgaaggatgatgagcccctgtacatcggcaacaggatgaagaaggaggatgacagcctgaccatctttggagtggccgagcgggaccagggcagctacacctgtgtggccagcacagagctggaccaggacctggccaaggcctacctgactgtgctgggccgcccagaccggccccgggacctggagctgacagacctggccgagaggtctgtgcggctgacctggatccctggagatgccaacaacagccccatcacagattatgtggtgcagtttgaggaggaccagttccagcccggggtgtggcatgaccacagcaagtacccaggctctgtgaacagcgctgtgctgcggctgagcccctacgtgaactaccagttccgggtgattgccatcaatgaggtgggcagcagccaccccagcctgcccagcgagcgctaccgcaccagcggggcccctcctgagagcaaccctggagatgtgaagggggagggcaccaggaagaacaacatggagatcacctggacccccatgaatgccaccagcgccttcggccccaacctgcgctacatcgtgaagtggaggagaagagagacccgggaggcctggaacaacgtgacagtgtggggcagccgctacgtggtgggccagacccctgtgtatgtgccctatgagatccgggtgcaggccgagaatgactttggaaaaggacctgagcctgagagcgtgattggctacagcggggaggactaccccagggctgcccccacagaggtgaaggtgcgggtgatgaacagcacagccatcagcctgcagtggaacagagtgtacagcgacacagtgcagggccagctgcgggagtaccgggcctactactggagggagagcagcctgctgaagaacctgtgggtgtcccagaagaggcagcaggccagcttccctggggaccggctgcggggcgtggtgtcccggctcttcccctacagcaactacaagctggagatggtggtggtgaatggaagaggagatggccccaggtctgagaccaaggagttcaccaccccagagggcgtgcccagcgccccccggcgcttccgggtgcggcagcccaacctggagaccatcaacctggagtgggaccaccctgagcaccccaacggcatcatgattggctacaccctgaagtatgtggccttcaacggcaccaaggtgggcaagcagatcgtggagaacttcagccccaaccagaccaagttcaccgtgcagaggacagatcctgtgagccgctaccgcttcaccctgagcgcccggacccaggtgggcagcggggaggccgtgacagaggagagccctgcccccccaaatgaggccacccccacagctgcctacaccaacaaccaggccgacatcgccacccagggctggttcatcggcctgatgtgtgccatcgccctgctggtgctgatcctgctgattgtgtgcttcatcaagaggagccggggcggcaagtaccctgtgcgggagaagaaggatgtgcccctgggccctgaggaccccaaggaggaggatggcagctttgactacagtgatgaggacaacaagcccctgcagggcagccagaccagcctggatggcaccatcaagcagcaggagagtgatgacagcctggtggactatggagagggcggggagggccagttcaatgaagatggcagcttcatcggccagtacacagtgaagaaggacaaggaggagacagagggcaatgaatcttctgaggccaccagccctgtgaatgccatctacagcctggcctag

SEQ ID NO: 266247 - DNA, 3525 bp, Artificial Sequence
  derived and/or modified sequence
atggcccggcagcccccccccccctgggtgcacgccgccttcctgctatgcttgctttccttgggaggcgccatcgaaatacctatggatctcacgcagccccctacgatcactaaacagagcgccaaggaccacattgtcgaccctagggataacatcctcatcgaatgcgaagctaagggcaatcccgctcctagcttccactggaccaggaattccagattttttaatattgcgaaagatccacgagtgagtatgagaaggcgttctggcacacttgtgatagatttcaggagtggggggaggccggaggagtacgagggcgaatatcagtgctttgcacggaacaaatttggtaccgcactgtctaatcgtatccgcctacaagtctcaaagagtcccctgtggccgaaagagaatctggatccagtggtggtgcaagagggcgcacctttaacgctgcaatgtaacccacctcccggcctgcccagcccggtgattttctggatgtcgagttccatggaaccaattactcaggacaagcgggtcagccagggacacaatggggacctctacttcagcaacgttatgctgcaggacatgcagaccgactactcctgtaacgcccggttccacttcactcacactattcaacagaagaacccgtttacccttaaagttctgacaaaccacccatataatgatagcagccttcggaatcatcccgacatgtacagtgctcgtggcgtggccgaacgaacgccttccttcatgtatccacagggcactgctagttctcagatggttctgcgcggcatggatcttctgctagagtgcatcgcctctggagtcccgacacccgatatagcatggtacaaaaagggcggagaccttccatccgataaggccaagtttgaaaactttaataaggccctcagaattaccaatgttagtgaagaggacagcggcgagtacttctgtctcgcaagtaacaagatgggtagcattaggcataccataagtgttagagtcaaggcagcaccgtattggttggatgaaccaaaaaacttaatcctggcccctggcgaggatggtaggctggtgtgcagagccaacggcaacccgaaaccaacagtgcagtggatggtgaacggggagccactccagagtgcccctccaaatcccaaccgtgaggttgcaggggacacaatcatcttcagagatacgcagatttctagcagagccgtatatcagtgcaacacttctaacgagcacggttacttactggcaaatgcattcgtgtcagtcctggacgttccgccacggatgttatctcctcgcaatcaactgatcagagtcattctgtacaaccgtaccaggctagactgtccattctttggctcgccgattcctaccctccggtggtttaaaaacggacagggtagcaatcttgatggaggaaattaccacgtgtacgagaatggcagcctagagattaagatgatacgcaaggaggatcaaggaatttacacttgcgtggcaactaatatcttaggcaaagccgagaatcaggtaagactggaggtcaaggatcctacacgaatatatcgtatgccagaggaccaggtggcacgccgtggaactactgtacagctggaatgtcgcgtgaagcacgacccgagcctgaaactgactgtgtcttggctgaaggatgacgaacccctttatataggcaatagaatgaaaaaggaggatgactcactaactatatttggcgtcgccgaacgcgatcagggaagctatacctgcgtggcatcaacggaactggaccaggacctcgccaaagcatatctgactgtgctcgggcgcccggataggccaagagatcttgaattgacagatctcgccgagcggagcgtcagattgacatggatccctggagacgctaacaattctcctattactgattacgtggtccagttcgaggaggaccagttccagcccggtgtgtggcatgatcacagcaagtaccccggtagcgtgaactcagccgtgctcaggttatccccctatgtgaattaccagttcagggtcatagcaattaacgaggttggatcatcccatccgtcacttccttcggaacgctaccggactagcggcgcccccccagaatcaaatcctggtgacgtaaaaggcgaaggtactaggaaaaacaacatggagataacttggacccccatgaacgcaacttctgcctttggcccgaatctgagatatattgtgaagtggcggcggagagaaaccagagaggcatggaataatgtaactgtgtggggcagcagatacgtggttgggcagacccccgtgtatgtaccctatgaaatccgggtacaagctgaaaacgatttcggcaaaggccccgagccagagtctgtgatcggctatagcggtgaggactatcccagagctgcaccaaccgaggtcaaggtgagagtcatgaattccacagccatatctctgcagtggaatcgtgtatattccgatacggtccagggacagctgagggagtatcgcgcctattattggagagagagtagcctgttgaaaaatctttgggtgagccagaagagacagcaggcatcatttcccggtgaccggctaagaggtgttgtctctcgcctgttcccctactcaaactataagcttgagatggtcgtcgtgaatggccggggtgacgggccaagaagcgaaaccaaggagttcaccacgcctgaaggtgtcccatcagccccaagacgatttcgagttcggcagcctaacctggagactattaatctggagtgggaccaccccgagcacccaaacgggatcatgattggctacaccctcaaatatgtagccttcaacggaaccaaggtaggaaagcagatcgtggaaaacttttctcctaaccagacaaaattcactgtgcaaaggaccgaccctgtgagccgatatcgctttaccctatccgctagaactcaggttgggtcgggagaagccgttacagaagagtccccagcaccgcccaatgaagcaacccctaccgcagcatataccaataaccaggctgacatcgctacacaggggtggtttattggcctcatgtgcgccatcgcgctgcttgtgctcatccttctcatcgtgtgtttcatcaaaagatcgaggggcgggaagtatcctgtgcgagaaaaaaaagatgtgcccctgggacccgaggacccaaaagaagaggatgggtctttcgactatagtgatgaagataataagccactgcaaggtagtcagacaagcctggacggtacgattaagcagcaagagtctgatgatagtctagttgattacggagaagggggcgaaggacaatttaacgaggacgggagcttcatcggacaatacactgtgaaaaaggataaggaggaaacagaaggaaacgagtctagtgaggccacttcccccgtcaacgcaatttactcactcgcttag

SEQ ID NO: 266248 - DNA, 3525 bp, Artificial Sequence
  derived and/or modified sequence
atggcccggcagcccccccccccctgggtgcacgccgccttcctgctgtgccttctctccctgggcggggcaatagaaatcccaatggatctgactcagccacccacaatcacaaaacagagcgccaaggatcatatagtggaccccagagataatatactcatcgagtgcgaggcaaaaggcaatccagcccccagctttcattggacccgaaactccaggttctttaatatcgcgaaagaccccagggtctctatgcggagaaggtctggtacgcttgtgattgacttccgttctggagggaggcccgaggagtacgagggtgagtatcagtgtttcgcccggaataaatttggcacagcactctctaacagaattagactgcaagtcagtaaaagtcccctgtggcccaaagagaacctggaccccgtggtagttcaggagggcgcaccattaacactgcagtgcaatccaccgcctggcctccccagccctgttattttctggatgtcaagttctatggagcctataacacaggataaaagggtctcacaaggacacaatggagacctctacttctccaacgtaatgttacaagacatgcaaactgactattcatgtaacgcacggttccattttacacacacaattcagcagaagaaccccttcactctcaaggtattgacaaatcacccatacaacgattccagcctcagaaaccaccccgacatgtatagcgcacgcggtgtcgcagagcgtacaccatcatttatgtatccccagggaacagctagttcacagatggtactgcgaggcatggatctgctcctcgagtgtatcgcctctggggtgcctaccccagacattgcctggtacaaaaaaggaggagatcttcccagcgacaaggccaaattcgaaaatttcaacaaggctttacgcataacaaatgtttccgaggaggactctggggaatacttctgcctcgcaagcaataaaatgggctccattcgacacacgatcagtgtccgcgtgaaggccgccccctattggctcgatgagcccaagaacctgatccttgctccgggcgaggacggccggctggtgtgtagagctaacgggaatccaaaaccgacagtacagtggatggtaaatggggaaccccttcaatctgctccccccaatcctaacagagaggtagcgggggacaccattatttttcgggatacccagatatcctccagagctgtctatcaatgtaacacaagcaacgagcatgggtatctgctggccaacgcttttgtcagcgtgctggatgtcccacctcgcatgctgtcaccgcggaatcagcttatccgtgtgattctctacaatcggactagactcgactgccccttctttgggtctcctatcccaactcttcgctggtttaagaatggtcagggcagcaacctggatggcggtaactatcacgtgtacgagaacggcagcctggagataaaaatgatacgcaaggaggatcagggaatttatacttgcgtggctacgaacatcctaggcaaggcagaaaaccaggtacgactcgaggtgaaggatcctacccgcatttaccgcatgcctgaggatcaggtcgcccgaaggggtaccacagtccaactagagtgtagagtgaagcatgacccctcattaaagctcaccgtctcttggctcaaagacgatgagccactgtatataggaaacagaatgaagaaggaagacgactctctgactattttcggagtggccgagcgggatcagggttcatacacatgtgtggccagtaccgaactcgatcaggatttggcaaaggcctatctgaccgtgttaggtaggcccgatcgcccacgagacctggagctgacggatctggcagaaaggagtgttcggctgacatggatacctggagacgctaataactctcccataaccgattatgttgtgcagtttgaggaggaccagtttcagcctggggtatggcatgaccacagcaaataccccggaagcgtgaattcggctgtgctgcggctgtcaccctatgtcaattaccagttccgggttatagccataaacgaggtggggagctcccatccctcattaccctctgagcgctacagaaccagcggggctccacctgaatctaatcccggcgacgtaaagggcgagggcacaagaaagaacaatatggagataacatggactcctatgaatgcaaccagcgcgttcgggcctaatttgagatacatcgtcaagtggagaagacgagagacccgcgaggcctggaataatgtgaccgtgtggggaagccgctatgtggtcggtcaaactccagtttatgtcccttacgagatccgcgtccaggcggagaacgatttcggtaaagggcctgagcctgagtctgtgatcgggtactccggtgaggactatcccagagccgcacccacagaagtgaaggttcgcgtaatgaactctaccgcgatcagccttcagtggaaccgtgtctatagcgataccgtccaaggccagctgagggagtacagggcctattattggagagagagctccctcctcaaaaatctctgggtctcgcaaaaaaggcagcaggcctctttccctggcgataggttacggggggtggtgagccggctgtttccatacagcaattacaagctggaaatggtagtggttaatggcaggggggatggaccccggagcgagaccaaagagttcacaaccccagaaggtgtcccctctgcgcctcgaaggttcagagtgaggcagccaaacttagagaccatcaatctggagtgggatcatcctgagcaccctaacggaattatgattggatacacactgaagtatgtcgccttcaacggcactaaagtgggcaaacagatcgtggaaaatttctccccaaaccagacgaaattcaccgtccagagaacggaccccgtgtcccgttaccggttcactctgagcgctagaacccaagttggttccggtgaggccgtgacagaggaatcccctgccccccccaatgaggccactcctactgctgcatacaccaacaaccaggccgatatcgccacccaaggatggttcattgggcttatgtgcgccattgcccttctggtgttaattcttctgatcgtgtgttttatcaaaaggtcgagaggaggcaagtatcccgtgcgcgaaaaaaaagatgttccgctcgggcctgaggatcctaaagaggaggacggtagctttgattactccgacgaggataacaaacctctacagggatctcagaccagtctcgacgggacgatcaagcaacaggagagcgatgattccctcgttgactacggtgagggtggagagggacaattcaatgaggatggttcctttatcggtcagtatacagtgaagaaagacaaggaggaaacagaaggtaacgaaagtagcgaagcgacatctcctgtgaatgcaatttactcattagcatag

SEQ ID NO: 266249 - DNA, 5447 bp, Artificial Sequence
  derived and/or modified sequence
ctgagtgctgtccaggaggcccagttaaagcggctcgaggtgacaagaccccgagtgctggggagcagggagcagggccaggtgccgaggatggccaggcagccaccgccgccctgggtccatgcagccttcctcctctgcctcctcagtcttggcggagccatcgaaattcctatggatctgacgcagccgccaaccatcaccaagcagtcagcgaaggatcacatcgtggacccccgtgataacatcctgattgagtgtgaagcaaaagggaaccctgcccccagcttccactggacacgaaacagcagattcttcaacatcgccaaggacccccgggtgtccatgaggaggaggtctgggaccctggtgattgacttccgcagtggcgggcggccggaggaatatgagggggaatatcagtgcttcgcccgcaacaaatttggcacggccctgtccaataggatccgcctgcaggtgtctaaatctcctctgtggcccaaggaaaacctagaccctgtcgtggtccaagagggcgctcctttgacgctccagtgcaaccccccgcctggacttccatccccggtcatcttctggatgagcagctccatggagcccatcacccaagacaaacgtgtctctcagggccataacggagacctatacttctccaacgtgatgctgcaggacatgcagaccgactacagttgtaacgcccgcttccacttcacccacaccatccagcagaagaaccctttcaccctcaaggtcctcaccaaccacccttataatgactcgtccttaagaaaccaccctgacatgtacagtgcccgaggagttgcagaaagaacaccaagcttcatgtatccccagggcaccgcgagcagccagatggtgcttcgtggcatggacctcctgctggaatgcatcgcctccggggtcccaacaccagacatcgcatggtacaagaaaggtggggacctcccatctgataaggccaagtttgagaactttaataaggccctgcgtatcacaaatgtctctgaggaagactccggggagtatttctgcctggcctccaacaagatgggcagcatccggcacacgatctcggtgagagtaaaggctgctccctactggctggacgaacccaagaaccttattctggctcctggcgaggatgggagactggtgtgtcgagccaatggaaaccccaaacccactgtccagtggatggtgaatggggaacctttgcaatcggcaccacctaacccaaaccgtgaggtggccggagacaccatcatcttccgggacacccagatcagcagcagggctgtgtaccagtgcaacacctccaacgagcatggctacctgctggccaacgcctttgtcagtgtgctggatgtgccgcctcggatgctgtcgccccggaaccagctcattcgagtgattctttacaaccggacgcggctggactgccctttctttgggtctcccatccccacactgcgatggtttaagaatgggcaaggaagcaacctggatggtggcaactaccatgtttatgagaacggcagtctggaaattaagatgatccgcaaagaggaccagggcatctacacctgtgtcgccaccaacatcctgggcaaagctgaaaaccaagtccgcctggaggtcaaagaccccaccaggatctaccggatgcccgaggaccaggtggccagaaggggcaccacggtgcagctggagtgtcgggtgaagcacgacccctccctgaaactcaccgtctcctggctgaaggatgacgagccgctctatattggaaacaggatgaagaaggaagacgactccctgaccatctttggggtggcagagcgggaccagggcagttacacgtgtgtcgccagcaccgagctagaccaagacctggccaaggcctacctcaccgtgctaggacggccagaccggccccgggacctggagctgaccgacctggccgagaggagcgtgcggctgacctggatccccggggatgctaacaacagccccatcacagactacgtcgtccagtttgaagaagaccagttccaacctggggtctggcatgaccattccaagtaccccggcagcgttaactcagccgtcctccggctgtccccgtatgtcaactaccagttccgtgtcattgccatcaacgaggttgggagcagccaccccagcctcccatccgagcgctaccgaaccagtggagcaccccccgagtccaatcctggtgacgtgaagggagaggggaccagaaagaacaacatggagatcacgtggacgcccatgaatgccacctcggcctttggccccaacctgcgctacattgtcaagtggaggcggagagagactcgagaggcctggaacaacgtcacagtgtggggctctcgctacgtggtggggcagaccccagtctacgtgccctatgagatccgagtccaggctgaaaatgacttcgggaagggccctgagccagagtccgtcatcggttactccggagaagattatcccagggctgcgcccactgaagttaaagtccgagtcatgaacagcacagccatcagccttcagtggaaccgcgtctactccgacacggtccagggccagctcagagagtaccgagcctactactggagggagagcagcttgctgaagaacctgtgggtgtctcagaagagacagcaagccagcttccctggtgaccgcctccgtggcgtggtgtcccgcctcttcccctacagtaactacaagctggagatggttgtggtcaatgggagaggtgatgggcctcgcagtgagaccaaggagttcaccaccccggaaggagtacccagtgcccctaggcgtttccgagtccggcagcccaacctggagacaatcaacctggaatgggatcatcctgagcatccaaatgggatcatgattggatacactctcaaatatgtggcctttaacgggaccaaagtaggaaagcagatagtggaaaacttctctcccaatcagaccaagttcacggtgcaaagaacggaccccgtgtcacgctaccgctttaccctcagcgccaggacgcaggtgggctctggggaagccgtcacagaggagtcaccagcacccccgaatgaagctactccaaccgcagcttacaccaacaaccaagcggacatcgccacccagggctggttcattgggcttatgtgcgccatcgccctcctggtgctgatcctgctcatcgtctgtttcatcaagaggagtcgcggcggcaagtacccagtacgagaaaagaaggatgttccccttggccctgaagaccccaaggaagaggatggctcatttgactatagtgatgaggacaacaagcccctgcagggcagtcagacatctctggacggcaccatcaagcagcaggagagtgacgacagcctggtggactatggcgagggtggcgagggtcagttcaatgaagacggctccttcatcggccagtacacggtcaaaaaggacaaggaggaaacagagggcaacgaaagctcagaggccacgtcacctgtcaatgctatctactctctggcctaacggagcccacccaggcacagccaccactttgcaagtgggaggaggggagaaggggagacaaaaccactgcagacctaccacgaagccaccaccaccttcagtaacaagggtacgatatgggggtctgccaagctgtgaggaccagtagccaccaagccacccacaagccccctcccaatgaccccccttcagccccgggtgccaccagtgtgggagagctggagccgtggctgagctcagctggagggagcctggccccttgcccggtctcgcagccaccccgagcgttccaccacactgtccgcccttggcctcggcacacgctcaccttttctgttggttacgggacttctcattgtcttaatttcgctttgtgcatcttcccctccagacccaatgtctctgttttcttttccttttgaaaaagagtccctggaaaagaaagaataagtggattctcccccaggagaatcctttttgcaaagataggcaaaaaggattgaatccataccagaacacgtagacaggctgtaatattcaaaccacctctgggccaatgcatttccaaaggatgcctttctcgccatatgcctcccctggcccccagcccctctgcctcggccttgtcagttgctgagctgggcttggctcctttctggaaaatgacagtatttttggcagggagaaggtgcgcaggcctccttgctgctctctggtttggttgggaggtgtgtttacctcttgctcctcattcctcccctgcccttttctctggaatatctaagatgtgagctgcattgactctgaagacgtttgaggaacaggagtgggcactgatagaaaggacttcaacgccagtgactgtgtacctccagcagaagaaaatcaggtgtctggtcttgggggcactgtgctcacttctagagagaagaaaaaggctgggtttggacttcatgcctcctcactggtgaaacccaggatgtagatagagggccacacccaccctgtccagagtagagggcacctgtccacgtggccagggcccatgctgccaccctcgaggagatggaaccctgtgatgcaaaagctttgctggtgtgtttggggcataaggcactgctccccttccatctctagcagatatcatcttctcagccaattctgtaggacactgaggctcttgtttgacatggtgtgtggatggggacttgccccaagactgagcaggtctgccctttcattggggtgtatacatatcaggggaccctgaggtggcaccgtactcagtgttgtgatgcccccacctagggaggactcaatgctctttgtatgccttatgcagcgctgatctgtccctggagttcccaggttcccagctccccccctgcaagccttgaagcctccagcaacgtctatctccaggagagcagggcagcctatgcaagtgttccggcaggaccagaagtggccactcaacacacgtcctcaccagtcaccccaaatggagacactcgcagacctgcagttctcagaccgaaggtgctgccttcatcctccccacctaatgcatttttgaaaccaaaggtacctagcctcagagacagagaaggagagggggagatcttgagtctaagaggaaccctttagctgtttctgcagctgaggtcagtttcaggagggtgaagctgatccccaggaatggatcagctgccatgggcacagcctccgatttgagcctctccggctgccagccagggggcctgggccagaccagggctctgtccttccgtgactttattaaagcaacatttgccacatgtttaagccgcaaa

SEQ ID NO: 266250 - DNA, 10135 bp, Artificial Sequence
  derived and/or modified sequence
gcacgggctggtctctgccctaatgcggcggctggcggcgagaggcgctgcaggggacgcgggggaagtggcggcgccggcagcggacagctcggacagcgcccagggccggagcccgagcccttggaggttgattgacttatgtgcaatttgggacgctggagtttaccttccctccgcagcctggaacagagcctcctctggtgttgcaaggaagaggctgaatgaggcagagaagctgagtgctgtccaggaggcccagttaaagcggctcgaggtgacaagaccccgagtgctggggagcagggagcagggccaggtgccgaggatggccaggcagccaccgccgccctgggtccatgcagccttcctcctctgcctcctcagtcttggcggagccatcgaaattcctatggatctgacgcagccgccaaccatcaccaagcagtcagcgaaggatcacatcgtggacccccgtgataacatcctgattgagtgtgaagcaaaagggaaccctgcccccagcttccactggacacgaaacagcagattcttcaacatcgccaaggacccccgggtgtccatgaggaggaggtctgggaccctggtgattgacttccgcagtggcgggcggccggaggaatatgagggggaatatcagtgcttcgcccgcaacaaatttggcacggccctgtccaataggatccgcctgcaggtgtctaaatctcctctgtggcccaaggaaaacctagaccctgtcgtggtccaagagggcgctcctttgacgctccagtgcaaccccccgcctggacttccatccccggtcatcttctggatgagcagctccatggagcccatcacccaagacaaacgtgtctctcagggccataacggagacctatacttctccaacgtgatgctgcaggacatgcagaccgactacagttgtaacgcccgcttccacttcacccacaccatccagcagaagaaccctttcaccctcaaggtcctcaccaaccacccttataatgactcgtccttaagaaaccaccctgacatgtacagtgcccgaggagttgcagaaagaacaccaagcttcatgtatccccagggcaccgcgagcagccagatggtgcttcgtggcatggacctcctgctggaatgcatcgcctccggggtcccaacaccagacatcgcatggtacaagaaaggtggggacctcccatctgataaggccaagtttgagaactttaataaggccctgcgtatcacaaatgtctctgaggaagactccggggagtatttctgcctggcctccaacaagatgggcagcatccggcacacgatctcggtgagagtaaaggctgctccctactggctggacgaacccaagaaccttattctggctcctggcgaggatgggagactggtgtgtcgagccaatggaaaccccaaacccactgtccagtggatggtgaatggggaacctttgcaatcggcaccacctaacccaaaccgtgaggtggccggagacaccatcatcttccgggacacccagatcagcagcagggctgtgtaccagtgcaacacctccaacgagcatggctacctgctggccaacgcctttgtcagtgtgctggatgtgccgcctcggatgctgtcgccccggaaccagctcattcgagtgattctttacaaccggacgcggctggactgccctttctttgggtctcccatccccacactgcgatggtttaagaatgggcaaggaagcaacctggatggtggcaactaccatgtttatgagaacggcagtctggaaattaagatgatccgcaaagaggaccagggcatctacacctgtgtcgccaccaacatcctgggcaaagctgaaaaccaagtccgcctggaggtcaaagaccccaccaggatctaccggatgcccgaggaccaggtggccagaaggggcaccacggtgcagctggagtgtcgggtgaagcacgacccctccctgaaactcaccgtctcctggctgaaggatgacgagccgctctatattggaaacaggatgaagaaggaagacgactccctgaccatctttggggtggcagagcgggaccagggcagttacacgtgtgtcgccagcaccgagctagaccaagacctggccaaggcctacctcaccgtgctaggacggccagaccggccccgggacctggagctgaccgacctggccgagaggagcgtgcggctgacctggatccccggggatgctaacaacagccccatcacagactacgtcgtccagtttgaagaagaccagttccaacctggggtctggcatgaccattccaagtaccccggcagcgttaactcagccgtcctccggctgtccccgtatgtcaactaccagttccgtgtcattgccatcaacgaggttgggagcagccaccccagcctcccatccgagcgctaccgaaccagtggagcaccccccgagtccaatcctggtgacgtgaagggagaggggaccagaaagaacaacatggagatcacgtggacgcccatgaatgccacctcggcctttggccccaacctgcgctacattgtcaagtggaggcggagagagactcgagaggcctggaacaacgtcacagtgtggggctctcgctacgtggtggggcagaccccagtctacgtgccctatgagatccgagtccaggctgaaaatgacttcgggaagggccctgagccagagtccgtcatcggttactccggagaagattatcccagggctgcgcccactgaagttaaagtccgagtcatgaacagcacagccatcagccttcagtggaaccgcgtctactccgacacggtccagggccagctcagagagtaccgagcctactactggagggagagcagcttgctgaagaacctgtgggtgtctcagaagagacagcaagccagcttccctggtgaccgcctccgtggcgtggtgtcccgcctcttcccctacagtaactacaagctggagatggttgtggtcaatgggagaggtgatgggcctcgcagtgagaccaaggagttcaccaccccggaaggagtacccagtgcccctaggcgtttccgagtccggcagcccaacctggagacaatcaacctggaatgggatcatcctgagcatccaaatgggatcatgattggatacactctcaaatatgtggcctttaacgggaccaaagtaggaaagcagatagtggaaaacttctctcccaatcagaccaagttcacggtgcaaagaacggaccccgtgtcacgctaccgctttaccctcagcgccaggacgcaggtgggctctggggaagccgtcacagaggagtcaccagcacccccgaatgaagctactccaaccgcagcttacaccaacaaccaagcggacatcgccacccagggctggttcattgggcttatgtgcgccatcgccctcctggtgctgatcctgctcatcgtctgtttcatcaagaggagtcgcggcggcaagtacccagtacgagaaaagaaggatgttccccttggccctgaagaccccaaggaagaggatggctcatttgactatagtgatgaggacaacaagcccctgcagggcagtcagacatctctggacggcaccatcaagcagcaggagagtgacgacagcctggtggactatggcgagggtggcgagggtcagttcaatgaagacggctccttcatcggccagtacacggtcaaaaaggacaaggaggaaacagagggcaacgaaagctcagaggccacgtcacctgtcaatgctatctactctctggcctaacggagcccacccaggcacagccaccactttgcaagtgggaggaggggagaaggggagacaaaaccactgcagacctaccacgaagccaccaccaccttcagtaacaagggtacgatatgggggtctgccaagctgtgaggaccagtagccaccaagccacccacaagccccctcccaatgaccccccttcagccccgggtgccaccagtgtgggagagctggagccgtggctgagctcagctggagggagcctggccccttgcccggtctcgcagccaccccgagcgttccaccacactgtccgcccttggcctcggcacacgctcaccttttctgttggttacgggacttctcattgtcttaatttcgctttgtgcatcttcccctccagacccaatgtctctgttttcttttccttttgaaaaagagtccctggaaaagaaagaataagtggattctcccccaggagaatcctttttgcaaagataggcaaaaaggattgaatccataccagaacacgtagacaggctgtaatattcaaaccacctctgggccaatgcatttccaaaggatgcctttctcgccatatgcctcccctggcccccagcccctctgcctcggccttgtcagttgctgagctgggcttggctcctttctggaaaatgacagtatttttggcagggagaaggtgcgcaggcctccttgctgctctctggtttggttgggaggtgtgtttacctcttgctcctcattcctcccctgcccttttctctggaatatctaagatgtgagctgcattgactctgaagacgtttgaggaacaggagtgggcactgatagaaaggacttcaacgccagtgactgtgtacctccagcagaagaaaatcaggtgtctggtcttgggggcactgtgctcacttctagagagaagaaaaaggctgggtttggacttcatgcctcctcactggtgaaacccaggatgtagatagagggccacacccaccctgtccagagtagagggcacctgtccacgtggccagggcccatgctgccaccctcgaggagatggaaccctgtgatgcaaaagctttgctggtgtgtttggggcataaggcactgctccccttccatctctagcagatatcatcttctcagccaattctgtaggacactgaggctcttgtttgacatggtgtgtggatggggacttgccccaagactgagcaggtctgccctttcattggggtgtatacatatcaggggaccctgaggtggcaccgtactcagtgttgtgatgcccccacctagggaggactcaatgctctttgtatgccttatgcagcgctgatctgtccctggagttcccaggttcccagctccccccctgcaagccttgaagcctccagcaacgtctatctccaggagagcagggcagcctatgcaagtgttccggcaggaccagaagtggccactcaacacacgtcctcaccagtcaccccaaatggagacactcgcagacctgcagttctcagaccgaaggtgctgccttcatcctccccacctaatgcatttttgaaaccaaaggtacctagcctcagagacagagaaggagagggggagatcttgagtctaagaggaaccctttagctgtttctgcagctgaggtcagtttcaggagggtgaagctgatccccaggaatggatcagctgccatgggcacagcctccgatttgagcctctccggctgccagccagggggcctgggccagaccagggctctgtccttccgtgactttattaaagcaacatttgccacatgtttaagccgcaaaggtattagcaatgcttgcatcattaataatcattcagttgaaggtcaagcccatagacacacactctctgctggtaagaaaccatagcccagaactgagccaataaggttgtttgaacctgagagtgtgtaatggtcatttgggccaagcctcagctagggctgctgcctggacgcctgaggggcagcttatcacagtgcaaggggacagggtaaacagcagggggtggggtgtgagcttggagggcccctcccctggatttcctccaacacctgcttggatactaggcccactgtccctgaagggaatgtcagggaagtgtgcctgtgagctgaattaaaggactggcctttccagaaaacgctttggatctgagcagagtagtcagtttctcagacactcattccatactgcaccgtacatgccagcgtacccattgcaccgaaagcaggcccttagggcaggaagggacgatgagcaagtctgccacaccacctggtgactgggaagggctgcttctctcgtaagggtcttggggagaagtaagcccgcagcctgcctctgcacctcgttccagtgtcctgccaggctctgtactgtcctttgtgtatgaagaaaatgctgttagccctctctcaggctgctgttctgtgggtgctgagagctgccccccatcaccacgccatcacacccctctgagcagaagcaaatctgaggctgaagaattaagttttccccaagcaaggaaggcaggtggtcagagagatcaaacgctgaggcgtggggattgcaggattcaggaggcagcccctttggggaagaggagggtgcattttccatggagcccatgtcagagtccactccagctcagcaggaaagtggaattgcccagtactgcctgccagctgggtctcccaagcaactaccccaagacataccaacagtgaagccaggacagcaccatgccatcggcgctccagtctgtctggctgggaggaaagtgctgggcatcttacagtaactctagaagttcctttgactaggctgcaatcccacctatatgctcagccctaagagctgtggtttcctgtgctctcatttgtccattcattcattcattcattcattcagcaaataatctgaaatccagtctgaactaaggcctgagctgtggataccatggcgcgtgagttagatgtggtccctgccctcatggggctgacagtcctaaaatcaagtgctaggacacagtggccattgagctgggagcattcttccctctaccgcttaagccactgatggctgcgagcttgaagagagggattctgagggagagcttggtccatctggtcaccaaggctgggcgggacagagcagtcaagaaccacggtgtggcttgagaaacagtcctgcttcctgagcctctttgctctgcctcttggggcaagctccttaacctgtctgtatttttatgcctctgtctcccattcagttcctccttgaatacctctttctacagagaggcacgggctcccctgaaggattgtcgaggccagggttcgggaagtacactgccatcggtcaggggacagctgcctcccaccttgcctgggtgatggtgaatgggactcatcttttcctgccttgcttttgaggagatggttgaatttaagctaacaggaaagccaaaccagcaccctcctttgtgctctgagaggttggagacatctggtccaccccattgcccctgcccctggcaagccctgaagtcgggagaggtgaccacaggtctgaaaatcagccagtgccaacattgcttgccctgcaaggtgcaactgagcccacatagcgcattcatagtttccctgaccacagccttgggaagacggtggaaacccgaggatgtgtgggtttcccagctaacggacaagctcccctgccacacccagtgcccacgcatgctcacatacatacagcagaccacaaccctgttgccaagcagtgcttccaagggatagcgatccagattccaacattgtcttggagagggttagtccacatccaagttgcgtgagataagatgcaaagggctctgtgtggatgaggaacgcaccttagaggagtgggaaaggccaccagggttgggccctgtttaggtaattcctgttggcagcacctagagagagcatctgagctgaaggagtgggaaactttgcccaagcaatggcacgggcagcgggctctttctggcgccctgtgctggagcagggccaagtcttagggcatcacaaacagcccatttgatggagggagcagggacatagcacatttttgtctgtctttgtgaggctgctttgctaactctctgaggagaggaagcctctcgggctttccgtcggctggggctagtgccagagaatcccttctcagtggccagcaggttcctgggaggccggcacaaggcaccgctccccactcatgacaccttggtgcagagtgacctcctgcccagtcaccactccggccagccccagccaaacacacaaaagcccatggttgcggttgcatctacaccgttagttggcaaaggatcctgcttgagctctgcgtggtggccaaggagtagcatggaggagggccctgattttaaaaaggaaaaatagagaggcctcaaaacaatgaaacaaagagcttgatatgtcaagaggagaccaaggccctgggaggcataggcaagccgggcagagtcagaccagtgccctcccttgaccatctcctagcattccttaacctagacaggggctaccccatgtgagtccaagccagactttgtggctgtccccagcctgcacagcccaagcccagggaagtgtcctttctttcccttccttactaataatgggccttcctgagacacattcagagaaggatcagagagaaaggagaaccatccaggagagccacaagcgtccaccaaacagtgtctcaggcctcacctgaagctgctgttcctcctatcagcacactagtattaaatgggtgttccataatgaggagaatggaaataggtacaaggcatctagcttaggacagaatcggatttcggcatgtgaaggaatcccagagctgatctcattgaaatgatctatcgtacagacaaggatatgcaaatccacagaagtgaagggatttttgctcaagatcacatagctggtaaactaaggtaaggttagggcttgaacttgggccttctgactccttgtccagtcagtgttctttcatctcaccacagctgcctcctttgaaacagaggtattaagatctgtccttctggttcaccctctcatacctctttactgcgtctcccacatcccccacatgcctcccaaaatgaaagacaaacaggattgtttctgagaccaagatcagtctgtctgtgatcagcctgtgtgtggttcacccagtcatgcaattaagggcagatctgggccagtggaataggatagctgattggtgtttgttactgtgaaccctagaccgtaccccgtagaatggtgtctcttgctttgtaacacatcgggccttcagtgtgctgtattcctcagaagtgagggcatctcggtccattctgcccatggccacagggtgcagagaggcagcagggcccatgcaagctgccaccctgggatttgctgggctggagttcaacagatgtaaagacttcagtgaagcaataaacacaaaactctgggagaagatatccagaattttgtacattactctgtttctttttcaaaaatgaggcagatcagatgcccctgagctgcccctttttttctgattcccaactgcaatgtcctcagtcagtgttgtccctctgcccggctccccagctctttgccaacctcttcacactccccttgagctgagcatcagtcgcctgtgacgtggccaccttctgtcctgctcccactcccgacccatgctggaccccggaggacctcctgccccgcccccaccacacacccatatcccccaccattccaatttgttctttcccgtggggaattttttttcccagcgtctccatcccttcctacatatccacacacacacaaattggtctgatcttttttccattggttaaacatttaactccatgccagaccttgttttaacccctctcacatcatgttctttccttttttgcgagttattttgcattaaccaactttgtcagtgacagatgcgtatctgagggtgtcacacacgaccttcagcagggaagacttctgggccatggagggccgtctaatacatggacttataaactgactgcatgagcaatgaaaaggccaaattattctgaattttttttgaatcactgtaaaaaaactgatttcttttgtatagagaacactaaacgtataataaaagttgttcaaaatgg

SEQ ID NO: 266251 - DNA, 3525 bp, Artificial Sequence
  derived and/or modified sequence
atggcccgacagcccccacccccatgggttcacgctgcatttctgctctgcctgttgtcactgggaggcgctatagaaatacctatggacctcacccagcctcctacaataaccaagcagtctgccaaagaccacatcgtagacccacgcgacaacattctcatcgaatgcgaggccaaaggtaatccggctccctctttccattggacacggaactctcgcttctttaacatcgcaaaggatccacgtgtgtctatgaggagacggtcaggaaccttagtcatcgatttccgcagtggaggaagaccagaagagtacgaaggggaatatcagtgctttgctcggaacaagttcggaaccgctctaagcaacagaatacggcttcaggtcagtaaatcccctctttggccaaaagaaaatttggaccctgtcgtcgtgcaggaaggcgcacctcttaccctgcagtgcaatccccctcctggtcttcccagtcccgtcatcttctggatgagcagcagcatggaacctattacccaggataaacgtgtctctcagggccacaacggcgatctgtactttagtaacgtgatgctccaggacatgcagaccgattacagctgtaatgctcggttccatttcactcacacaatccaacaaaagaaccccttcacactaaaagtgttgactaatcatccttataacgatagcagtctgcgaaatcatccagacatgtacagcgcgaggggcgtggctgagaggacgccttcctttatgtatccccaaggcacagcctcgtcccaaatggtgctccggggaatggatctcctgctggaatgcattgccagtggcgtcccaaccccagacatcgcttggtacaagaagggaggcgatttacccagcgataaggctaagtttgagaactttaataaggcgcttaggatcactaatgtgtccgaagaggactccggggagtacttttgcttggcttctaacaagatggggtcaataagacatacaatctccgtgcgagttaaggcggcaccttactggctggacgagccaaagaacctcatactcgcacccggagaggatggcaggcttgtctgtcgggcaaacgggaacccaaagcctacagttcagtggatggtgaatggcgaaccgctgcagagcgctccaccaaatccgaatcgggaagtggccggtgacactattatctttagagacacccagatctctagcagagctgtgtatcagtgcaacacaagcaacgagcacgggtatctcctggccaatgcttttgttagcgtccttgatgttcctccccgtatgctgtccccgaggaaccagctcataagggtcatcttgtataatcgcacacggcttgactgtcctttctttgggagtcctatccctaccctgaggtggttcaaaaacgggcagggttccaatctcgatggcggtaactatcatgtttacgagaacggcagccttgagatcaagatgataagaaaagaggatcagggtatttacacgtgtgttgccactaacatcctaggaaaggctgaaaatcaggtgaggttagaagtgaaggatcccactagaatttaccgcatgccagaagatcaggtggcgagacggggtactacagtccagctcgagtgcagggtaaagcacgaccctagcttgaagctgacagtgtcgtggctcaaagatgacgagcctctgtacatcggaaacagaatgaagaaggaggacgacagcctcaccatatttggagtggcagaaagagaccaagggtcctacacatgtgtggcctctacggaattggaccaggatttagccaaggcatacttgactgtgttagggaggcctgaccgaccaagggatttagagcttacggacctagccgagaggtccgtgagacttacgtggatccctggggacgcaaataactctcccatcaccgattacgtggtgcagttcgaagaagatcaatttcagccaggtgtgtggcatgaccacagcaagtatcccggatcagtgaactctgccgtgctgcgcttgtccccgtacgtaaactatcagttccgtgtgattgccattaacgaggtggggagctcccaccctagtctgccaagtgagaggtacaggacttccggggcacctcccgagagcaatccgggtgatgtgaagggggagggtacacgtaaaaacaacatggagatcacctggacccctatgaatgcgacctcagcctttggtcctaacctgcgatatattgtgaagtggcgtcggagggaaacaagagaagcctggaataatgtaacagtgtggggaagtcgatacgtggtgggtcaaactcccgtgtatgtgccttacgaaattagagtacaggcagagaatgacttcgggaagggccctgagccggaatccgttatcgggtactccggcgaggactacccacgggctgctcctacggaggttaaagtgagggtgatgaattccacagccatttccctccagtggaatagagtgtattccgacacagttcagggtcagctgagggaatatagagcatactactggcgcgagtcatccctgctaaaaaatttgtgggtctctcaaaaaagacagcaggcatcctttcctggcgataggctgcgcggagtggtatcacggttgtttccttactccaattacaaactggagatggtggtcgtgaatggtcggggtgacggtcccagaagtgagacgaaagaattcaccaccccagagggcgtgccgtctgctcccagaaggttcagggtgaggcagcctaatctggaaacaattaacctggaatgggaccacccggagcatcccaacggcattatgattggctatacgttgaaatacgtggcgttcaacggaacaaaggtaggaaaacagattgtagagaacttttcccccaaccagacaaaattcactgtccagagaacggatccagtctctaggtaccggttcacattgagcgctcgaacccaagtggggtcaggagaggctgtcacagaagagtcccctgctcctcccaatgaggcaacccctacagccgcatatacgaacaaccaagcagacattgcaactcagggctggtttataggcctgatgtgcgccatcgctctgttggttctgatcctgctgatcgtctgcttcatcaagcgatcaagagggggtaagtatccagtgagggagaaaaaggacgtgccactcggacctgaggatccaaaagaggaagatggttcgttcgactacagcgacgaggataataaacctctgcagggttcgcagacctccctggacggcactattaagcagcaagagtccgatgactccctcgtggactacggcgagggcggagagggccagttcaatgaggacggctcattcatcggccagtacactgtgaaaaaggataaggaggagactgaggggaatgagagctcggaggccacctcgccagtaaacgcgatctactccttagcttag

SEQ ID NO: 266252 - DNA, 3525 bp, Artificial Sequence
  derived and/or modified sequence
atggcgagacaaccccctcctccatgggtccatgcggcattcttactgtgcctcctgtctctgggcggagctatagagatccccatggatctgacacagcctcccactataaccaagcaaagcgctaaggatcatatcgttgacccacgagacaacatactgatcgagtgcgaggccaaaggtaatcctgccccttcttttcattggactagaaacagcagattctttaatatagctaaggacccacgggttagcatgcgcagacgcagcggcacgttagtgatagattttagatcaggtggtcggcctgaggagtacgagggcgagtaccagtgcttcgctcggaacaaattcggcactgcgttgagcaatagaataagactccaagtgagtaagtcaccattatggcccaaagaaaatcttgatcctgttgtggtacaggagggagcgcctttgaccctgcaatgtaaccctccaccaggacttccgagtccagtcatattttggatgagctcttctatggagccaatcacccaagataagcgggtctctcaaggacataatggcgacctatacttttcaaacgtgatgctgcaggacatgcaaaccgattactcctgcaatgctaggtttcattttacccacactattcagcagaaaaatccttttaccctcaaggttctcaccaatcacccatacaacgactcaagtctcagaaaccaccccgacatgtatagtgccagaggcgtggctgagcggaccccttcctttatgtacccacaaggaaccgccagctctcaaatggttcttcggggtatggacctcctgctagaatgcattgcatccggtgtgcctacccctgatatcgcttggtataaaaaagggggtgacctgcccagcgacaaagctaagtttgaaaactttaataaggctcttagaattaccaacgtatcggaagaggactcaggggaatatttttgtctggcatctaacaaaatgggcagcatcaggcatactatcagcgttcgagtgaaagccgctccctactggctcgatgagccaaagaacctcatactagcccctggggaagacggcaggctcgtatgccgcgctaatggaaacccaaagcctacggtccagtggatggtgaatggggagcccttacagtctgctcctcctaatcccaatcgtgaggtcgctggcgataccattatcttcagggacacccaaatcagttctagggctgtctatcaatgcaatacaagcaacgagcatggatatctccttgcgaatgcctttgtgtcggtgctggacgtcccaccgagaatgctgtccccaaggaaccaactcatccgagttattctctataatagaactcgcctagactgtccctttttcggctctcctattcccactctgcgctggtttaaaaacgggcagggctccaacctcgacggcggaaactatcacgtgtacgaaaacggttccctggaaatcaagatgattcggaaggaagaccagggcatttatacttgcgtggctacaaacattctgggtaaagccgagaatcaagttcgcttagaagtgaaggaccctacacgcatttatcggatgcccgaggatcaggtggcaagaaggggcactacagtccagctggaatgccgggtgaagcatgatccttctctcaaactgactgtcagttggcttaaggacgatgagcctctgtacatcggcaacagaatgaaaaaagaggacgatagtttaaccatcttcggagtcgcggagagggaccaagggagctatacttgcgtggcatccacagagctcgatcaggacctggccaaggcctatctgaccgtcttggggagacccgaccgcccaagggaccttgagctgacagacttagctgagagatccgtgaggctcacatggattcctggagacgctaacaattctcccattaccgactacgtggtgcaatttgaggaagaccagttccagcccggagtttggcatgatcatagcaagtacccagggtccgtgaactccgccgtgctgaggctcagcccttacgttaactaccaatttcgcgtcattgctattaacgaagttggctctagccatccctctctgcctagcgagcgataccggacctctggcgctccccctgaatccaatcctggcgacgtcaagggggaagggacaaggaaaaacaatatggagattacctggacaccaatgaacgctacaagtgcatttgggcctaacttgcgatacatcgtcaaatggaggcggagggagacccgggaggcatggaataacgttactgtgtggggctcccgctacgtggttggtcagactccggtgtacgtgccatacgagattcgcgtgcaggcagagaatgatttcggtaagggtcccgaaccagagtctgtcattggatattctggggaagattatccaagggcagcccctaccgaggtaaaggtgcgagtcatgaattcgacggccatctcactgcaatggaatagagtctactctgatacagtgcagggacagcttcgagagtatagagcctattattggcgagagagttcacttctgaagaatctctgggtgtcacaaaaaagacagcaggcctcattcccaggcgacaggctccggggagtggtgagccgcctgtttccctactcaaactataaacttgagatggtcgtggtgaacggtcgcggtgacggaccgcgatcagagacaaaggagttcactactcccgagggtgtaccctccgctccaagacgattccgggtgaggcagccaaatcttgaaactatcaacttggagtgggaccaccctgaacacccgaatggtatcatgattgggtataccctgaaatacgtggcctttaacggcaccaaagtggggaaacagatcgtcgagaacttcagtccaaatcagacaaagttcaccgttcaaaggacagatcccgtatctagatatcggttcactcttagcgcaaggactcaagtgggatcaggtgaagccgtaaccgaagaatcccctgcacccccaaatgaggccactccgacagctgcctacactaataatcaggcggatatagcaacccagggttggtttattggcctgatgtgtgcaattgccctgctggtcttaattcttctgatcgtttgtttcattaaacggtctcgaggaggaaagtatccagtgcgagaaaagaaagacgtgcctctggggccagaggatccgaaggaagaagatggatcttttgattattcggacgaagataataagccactgcaaggctctcagaccagtctggacggtaccattaagcagcaggaatctgacgacagcctggttgactacggagagggcggagaaggtcagttcaacgaagatggttcttttatcgggcagtataccgtgaagaaggacaaagaagaaaccgagggcaacgagtccagtgaggccacaagtcccgtgaacgccatttactcactggcttag

SEQ ID NO: 266253 - protein, 1169 aa, Artificial Sequence
  derived and/or modified sequence
MARQPPPPWVHAAFLLCLLSLGGAIEIPMDLTQPPTITKQSAKDHIVDPRDNILIECEAKGNPAPSFHWTRNSRFFNIAKDPRVSMRRRSGTLVIDFRSGGRPEEYEGEYQCFARNKFGTALSNRIRLQVSKSPLWPKENLDPVVVQEGAPLTLQCNPPPGLPSPVIFWMSSSMEPITQDKRVSQGHNGDLYFSNVMLQDMQTDYSCNARFHFTHTIQQKNPFTLKVLTNHPYNDSSLRNHPDMYSARGVAERTPSFMYPQGTASSQMVLRGMDLLLECIASGVPTPDIAWYKKGGDLPSDKAKFENFNKALRITNVSEEDSGEYFCLASNKMGSIRHTISVRVKAAPYWLDEPKNLILAPGEDGRLVCRANGNPKPTVQWMVNGEPLQSAPPNPNREVAGDTIIFRDTQISSRAVYQCNTSNEHGYLLANAFVSVLDVPPRMLSPRNQLIRVILYNRTRLDCPFFGSPIPTLRWFKNGQGSNLDGGNYHVYENGSLEIKMIRKEDQGIYTCVATNILGKAENQVRLEVKDPTRIYRMPEDQVARRGTTVQLECRVKHDPSLKLTVSWLKDDEPLYIGNRMKKEDDSLTIFGVAERDQGSYTCVASTELDQDLAKAYLTVLGRPDRPRDLELTDLAERSVRLTWIPGDANNSPITDYVVQFEEDQFQPGVWHDHSKYPGSVNSAVLRLSPYVNYQFRVIAINEVGSSHPSLPSERYRTSGAPPESNPGDVKGEGTRKNNMEITWTPMNATSAFGPNLRYIVKWRRRETREAWNNVTVWGSRYVVGQTPVYVPYEIRVQAENDFGKGPEPESVIGYSGEDYPRAAPTEVKVRVMNSTAISLQWNRVYSDTVQGQLREYRAYYWRESSLLKNLWVSQKRQQASFPGDRLRGVVSRLFPYSNYKLEMVVVNGRGDGPRSETKEFTTPEGVPSAPRRFRVRQPNLETINLEWDHPEHPNGIMIGYTLKYVAFNGTKVGKQIVENFSPNQTKFTVQRTDPVSRYRFTLSARTQVGSGEAVTEESPAPPNEAYTNNQADIATQGWFIGLMCAIALLVLILLIVCFIKRSRGGKYPVREKKDVPLGPEDPKEEDGSFDYSDEDNKPLQGSQTSLDGTIKQQESDDSLVDYGEGGEGQFNEDGSFIGQYTVKKDKEETEGNESSEATSPVNAIYSLA

SEQ ID NO: 266254 - DNA, 10120 bp, Artificial Sequence
  derived and/or modified sequence
gcacgggctggtctctgccctaatgcggcggctggcggcgagaggcgctgcaggggacgcgggggaagtggcggcgccggcagcggacagctcggacagcgcccagggccggagcccgagcccttggaggttgattgacttatgtgcaatttgggacgctggagtttaccttccctccgcagcctggaacagagcctcctctggtgttgcaaggaagaggctgaatgaggcagagaagctgagtgctgtccaggaggcccagttaaagcggctcgaggtgacaagaccccgagtgctggggagcagggagcagggccaggtgccgaggatggccaggcagccaccgccgccctgggtccatgcagccttcctcctctgcctcctcagtcttggcggagccatcgaaattcctatggatctgacgcagccgccaaccatcaccaagcagtcagcgaaggatcacatcgtggacccccgtgataacatcctgattgagtgtgaagcaaaagggaaccctgcccccagcttccactggacacgaaacagcagattcttcaacatcgccaaggacccccgggtgtccatgaggaggaggtctgggaccctggtgattgacttccgcagtggcgggcggccggaggaatatgagggggaatatcagtgcttcgcccgcaacaaatttggcacggccctgtccaataggatccgcctgcaggtgtctaaatctcctctgtggcccaaggaaaacctagaccctgtcgtggtccaagagggcgctcctttgacgctccagtgcaaccccccgcctggacttccatccccggtcatcttctggatgagcagctccatggagcccatcacccaagacaaacgtgtctctcagggccataacggagacctatacttctccaacgtgatgctgcaggacatgcagaccgactacagttgtaacgcccgcttccacttcacccacaccatccagcagaagaaccctttcaccctcaaggtcctcaccaaccacccttataatgactcgtccttaagaaaccaccctgacatgtacagtgcccgaggagttgcagaaagaacaccaagcttcatgtatccccagggcaccgcgagcagccagatggtgcttcgtggcatggacctcctgctggaatgcatcgcctccggggtcccaacaccagacatcgcatggtacaagaaaggtggggacctcccatctgataaggccaagtttgagaactttaataaggccctgcgtatcacaaatgtctctgaggaagactccggggagtatttctgcctggcctccaacaagatgggcagcatccggcacacgatctcggtgagagtaaaggctgctccctactggctggacgaacccaagaaccttattctggctcctggcgaggatgggagactggtgtgtcgagccaatggaaaccccaaacccactgtccagtggatggtgaatggggaacctttgcaatcggcaccacctaacccaaaccgtgaggtggccggagacaccatcatcttccgggacacccagatcagcagcagggctgtgtaccagtgcaacacctccaacgagcatggctacctgctggccaacgcctttgtcagtgtgctggatgtgccgcctcggatgctgtcgccccggaaccagctcattcgagtgattctttacaaccggacgcggctggactgccctttctttgggtctcccatccccacactgcgatggtttaagaatgggcaaggaagcaacctggatggtggcaactaccatgtttatgagaacggcagtctggaaattaagatgatccgcaaagaggaccagggcatctacacctgtgtcgccaccaacatcctgggcaaagctgaaaaccaagtccgcctggaggtcaaagaccccaccaggatctaccggatgcccgaggaccaggtggccagaaggggcaccacggtgcagctggagtgtcgggtgaagcacgacccctccctgaaactcaccgtctcctggctgaaggatgacgagccgctctatattggaaacaggatgaagaaggaagacgactccctgaccatctttggggtggcagagcgggaccagggcagttacacgtgtgtcgccagcaccgagctagaccaagacctggccaaggcctacctcaccgtgctaggacggccagaccggccccgggacctggagctgaccgacctggccgagaggagcgtgcggctgacctggatccccggggatgctaacaacagccccatcacagactacgtcgtccagtttgaagaagaccagttccaacctggggtctggcatgaccattccaagtaccccggcagcgttaactcagccgtcctccggctgtccccgtatgtcaactaccagttccgtgtcattgccatcaacgaggttgggagcagccaccccagcctcccatccgagcgctaccgaaccagtggagcaccccccgagtccaatcctggtgacgtgaagggagaggggaccagaaagaacaacatggagatcacgtggacgcccatgaatgccacctcggcctttggccccaacctgcgctacattgtcaagtggaggcggagagagactcgagaggcctggaacaacgtcacagtgtggggctctcgctacgtggtggggcagaccccagtctacgtgccctatgagatccgagtccaggctgaaaatgacttcgggaagggccctgagccagagtccgtcatcggttactccggagaagattatcccagggctgcgcccactgaagttaaagtccgagtcatgaacagcacagccatcagccttcagtggaaccgcgtctactccgacacggtccagggccagctcagagagtaccgagcctactactggagggagagcagcttgctgaagaacctgtgggtgtctcagaagagacagcaagccagcttccctggtgaccgcctccgtggcgtggtgtcccgcctcttcccctacagtaactacaagctggagatggttgtggtcaatgggagaggtgatgggcctcgcagtgagaccaaggagttcaccaccccggaaggagtacccagtgcccctaggcgtttccgagtccggcagcccaacctggagacaatcaacctggaatgggatcatcctgagcatccaaatgggatcatgattggatacactctcaaatatgtggcctttaacgggaccaaagtaggaaagcagatagtggaaaacttctctcccaatcagaccaagttcacggtgcaaagaacggaccccgtgtcacgctaccgctttaccctcagcgccaggacgcaggtgggctctggggaagccgtcacagaggagtcaccagcacccccgaatgaagcttacaccaacaaccaagcggacatcgccacccagggctggttcattgggcttatgtgcgccatcgccctcctggtgctgatcctgctcatcgtctgtttcatcaagaggagtcgcggcggcaagtacccagtacgagaaaagaaggatgttccccttggccctgaagaccccaaggaagaggatggctcatttgactatagtgatgaggacaacaagcccctgcagggcagtcagacatctctggacggcaccatcaagcagcaggagagtgacgacagcctggtggactatggcgagggtggcgagggtcagttcaatgaagacggctccttcatcggccagtacacggtcaaaaaggacaaggaggaaacagagggcaacgaaagctcagaggccacgtcacctgtcaatgctatctactctctggcctaacggagcccacccaggcacagccaccactttgcaagtgggaggaggggagaaggggagacaaaaccactgcagacctaccacgaagccaccaccaccttcagtaacaagggtacgatatgggggtctgccaagctgtgaggaccagtagccaccaagccacccacaagccccctcccaatgaccccccttcagccccgggtgccaccagtgtgggagagctggagccgtggctgagctcagctggagggagcctggccccttgcccggtctcgcagccaccccgagcgttccaccacactgtccgcccttggcctcggcacacgctcaccttttctgttggttacgggacttctcattgtcttaatttcgctttgtgcatcttcccctccagacccaatgtctctgttttcttttccttttgaaaaagagtccctggaaaagaaagaataagtggattctcccccaggagaatcctttttgcaaagataggcaaaaaggattgaatccataccagaacacgtagacaggctgtaatattcaaaccacctctgggccaatgcatttccaaaggatgcctttctcgccatatgcctcccctggcccccagcccctctgcctcggccttgtcagttgctgagctgggcttggctcctttctggaaaatgacagtatttttggcagggagaaggtgcgcaggcctccttgctgctctctggtttggttgggaggtgtgtttacctcttgctcctcattcctcccctgcccttttctctggaatatctaagatgtgagctgcattgactctgaagacgtttgaggaacaggagtgggcactgatagaaaggacttcaacgccagtgactgtgtacctccagcagaagaaaatcaggtgtctggtcttgggggcactgtgctcacttctagagagaagaaaaaggctgggtttggacttcatgcctcctcactggtgaaacccaggatgtagatagagggccacacccaccctgtccagagtagagggcacctgtccacgtggccagggcccatgctgccaccctcgaggagatggaaccctgtgatgcaaaagctttgctggtgtgtttggggcataaggcactgctccccttccatctctagcagatatcatcttctcagccaattctgtaggacactgaggctcttgtttgacatggtgtgtggatggggacttgccccaagactgagcaggtctgccctttcattggggtgtatacatatcaggggaccctgaggtggcaccgtactcagtgttgtgatgcccccacctagggaggactcaatgctctttgtatgccttatgcagcgctgatctgtccctggagttcccaggttcccagctccccccctgcaagccttgaagcctccagcaacgtctatctccaggagagcagggcagcctatgcaagtgttccggcaggaccagaagtggccactcaacacacgtcctcaccagtcaccccaaatggagacactcgcagacctgcagttctcagaccgaaggtgctgccttcatcctccccacctaatgcatttttgaaaccaaaggtacctagcctcagagacagagaaggagagggggagatcttgagtctaagaggaaccctttagctgtttctgcagctgaggtcagtttcaggagggtgaagctgatccccaggaatggatcagctgccatgggcacagcctccgatttgagcctctccggctgccagccagggggcctgggccagaccagggctctgtccttccgtgactttattaaagcaacatttgccacatgtttaagccgcaaaggtattagcaatgcttgcatcattaataatcattcagttgaaggtcaagcccatagacacacactctctgctggtaagaaaccatagcccagaactgagccaataaggttgtttgaacctgagagtgtgtaatggtcatttgggccaagcctcagctagggctgctgcctggacgcctgaggggcagcttatcacagtgcaaggggacagggtaaacagcagggggtggggtgtgagcttggagggcccctcccctggatttcctccaacacctgcttggatactaggcccactgtccctgaagggaatgtcagggaagtgtgcctgtgagctgaattaaaggactggcctttccagaaaacgctttggatctgagcagagtagtcagtttctcagacactcattccatactgcaccgtacatgccagcgtacccattgcaccgaaagcaggcccttagggcaggaagggacgatgagcaagtctgccacaccacctggtgactgggaagggctgcttctctcgtaagggtcttggggagaagtaagcccgcagcctgcctctgcacctcgttccagtgtcctgccaggctctgtactgtcctttgtgtatgaagaaaatgctgttagccctctctcaggctgctgttctgtgggtgctgagagctgccccccatcaccacgccatcacacccctctgagcagaagcaaatctgaggctgaagaattaagttttccccaagcaaggaaggcaggtggtcagagagatcaaacgctgaggcgtggggattgcaggattcaggaggcagcccctttggggaagaggagggtgcattttccatggagcccatgtcagagtccactccagctcagcaggaaagtggaattgcccagtactgcctgccagctgggtctcccaagcaactaccccaagacataccaacagtgaagccaggacagcaccatgccatcggcgctccagtctgtctggctgggaggaaagtgctgggcatcttacagtaactctagaagttcctttgactaggctgcaatcccacctatatgctcagccctaagagctgtggtttcctgtgctctcatttgtccattcattcattcattcattcattcagcaaataatctgaaatccagtctgaactaaggcctgagctgtggataccatggcgcgtgagttagatgtggtccctgccctcatggggctgacagtcctaaaatcaagtgctaggacacagtggccattgagctgggagcattcttccctctaccgcttaagccactgatggctgcgagcttgaagagagggattctgagggagagcttggtccatctggtcaccaaggctgggcgggacagagcagtcaagaaccacggtgtggcttgagaaacagtcctgcttcctgagcctctttgctctgcctcttggggcaagctccttaacctgtctgtatttttatgcctctgtctcccattcagttcctccttgaatacctctttctacagagaggcacgggctcccctgaaggattgtcgaggccagggttcgggaagtacactgccatcggtcaggggacagctgcctcccaccttgcctgggtgatggtgaatgggactcatcttttcctgccttgcttttgaggagatggttgaatttaagctaacaggaaagccaaaccagcaccctcctttgtgctctgagaggttggagacatctggtccaccccattgcccctgcccctggcaagccctgaagtcgggagaggtgaccacaggtctgaaaatcagccagtgccaacattgcttgccctgcaaggtgcaactgagcccacatagcgcattcatagtttccctgaccacagccttgggaagacggtggaaacccgaggatgtgtgggtttcccagctaacggacaagctcccctgccacacccagtgcccacgcatgctcacatacatacagcagaccacaaccctgttgccaagcagtgcttccaagggatagcgatccagattccaacattgtcttggagagggttagtccacatccaagttgcgtgagataagatgcaaagggctctgtgtggatgaggaacgcaccttagaggagtgggaaaggccaccagggttgggccctgtttaggtaattcctgttggcagcacctagagagagcatctgagctgaaggagtgggaaactttgcccaagcaatggcacgggcagcgggctctttctggcgccctgtgctggagcagggccaagtcttagggcatcacaaacagcccatttgatggagggagcagggacatagcacatttttgtctgtctttgtgaggctgctttgctaactctctgaggagaggaagcctctcgggctttccgtcggctggggctagtgccagagaatcccttctcagtggccagcaggttcctgggaggccggcacaaggcaccgctccccactcatgacaccttggtgcagagtgacctcctgcccagtcaccactccggccagccccagccaaacacacaaaagcccatggttgcggttgcatctacaccgttagttggcaaaggatcctgcttgagctctgcgtggtggccaaggagtagcatggaggagggccctgattttaaaaaggaaaaatagagaggcctcaaaacaatgaaacaaagagcttgatatgtcaagaggagaccaaggccctgggaggcataggcaagccgggcagagtcagaccagtgccctcccttgaccatctcctagcattccttaacctagacaggggctaccccatgtgagtccaagccagactttgtggctgtccccagcctgcacagcccaagcccagggaagtgtcctttctttcccttccttactaataatgggccttcctgagacacattcagagaaggatcagagagaaaggagaaccatccaggagagccacaagcgtccaccaaacagtgtctcaggcctcacctgaagctgctgttcctcctatcagcacactagtattaaatgggtgttccataatgaggagaatggaaataggtacaaggcatctagcttaggacagaatcggatttcggcatgtgaaggaatcccagagctgatctcattgaaatgatctatcgtacagacaaggatatgcaaatccacagaagtgaagggatttttgctcaagatcacatagctggtaaactaaggtaaggttagggcttgaacttgggccttctgactccttgtccagtcagtgttctttcatctcaccacagctgcctcctttgaaacagaggtattaagatctgtccttctggttcaccctctcatacctctttactgcgtctcccacatcccccacatgcctcccaaaatgaaagacaaacaggattgtttctgagaccaagatcagtctgtctgtgatcagcctgtgtgtggttcacccagtcatgcaattaagggcagatctgggccagtggaataggatagctgattggtgtttgttactgtgaaccctagaccgtaccccgtagaatggtgtctcttgctttgtaacacatcgggccttcagtgtgctgtattcctcagaagtgagggcatctcggtccattctgcccatggccacagggtgcagagaggcagcagggcccatgcaagctgccaccctgggatttgctgggctggagttcaacagatgtaaagacttcagtgaagcaataaacacaaaactctgggagaagatatccagaattttgtacattactctgtttctttttcaaaaatgaggcagatcagatgcccctgagctgcccctttttttctgattcccaactgcaatgtcctcagtcagtgttgtccctctgcccggctccccagctctttgccaacctcttcacactccccttgagctgagcatcagtcgcctgtgacgtggccaccttctgtcctgctcccactcccgacccatgctggaccccggaggacctcctgccccgcccccaccacacacccatatcccccaccattccaatttgttctttcccgtggggaattttttttcccagcgtctccatcccttcctacatatccacacacacacaaattggtctgatcttttttccattggttaaacatttaactccatgccagaccttgttttaacccctctcacatcatgttctttccttttttgcgagttattttgcattaaccaactttgtcagtgacagatgcgtatctgagggtgtcacacacgaccttcagcagggaagacttctgggccatggagggccgtctaatacatggacttataaactgactgcatgagcaatgaaaaggccaaattattctgaattttttttgaatcactgtaaaaaaactgatttcttttgtatagagaacactaaacgtataataaaagttgttcaaaatgg

SEQ ID NO: 266255 - DNA, 3974 bp, Artificial Sequence
  derived and/or modified sequence
taaagcggctcgaggtgacaagaccccgagtgctggggagcagggagcagggccaggtgccgaggatggccaggcagccaccgccgccctgggtccatgcagccttcctcctctgcctcctcagtcttggcggagccatcgaaattcctatggatctgacgcagccgccaaccatcaccaagcagtcagcgaaggatcacatcgtggacccccgtgataacatcctgattgagtgtgaagcaaaagggaaccctgcccccagcttccactggacacgaaacagcagattcttcaacatcgccaaggacccccgggtgtccatgaggaggaggtctgggaccctggtgattgacttccgcagtggcgggcggccggaggaatatgagggggaatatcagtgcttcgcccgcaacaaatttggcacggccctgtccaataggatccgcctgcaggtgtctaaatctcctctgtggcccaaggaaaacctagaccctgtcgtggtccaagagggcgctcctttgacgctccagtgcaaccccccgcctggacttccatccccggtcatcttctggatgagcagctccatggagcccatcacccaagacaaacgtgtctctcagggccataacggagacctatacttctccaacgtgatgctgcaggacatgcagaccgactacagttgtaacgcccgcttccacttcacccacaccatccagcagaagaaccctttcaccctcaaggtcctcaccaaccacccttataatgactcgtccttaagaaaccaccctgacatgtacagtgcccgaggagttgcagaaagaacaccaagcttcatgtatccccagggcaccgcgagcagccagatggtgcttcgtggcatggacctcctgctggaatgcatcgcctccggggtcccaacaccagacatcgcatggtacaagaaaggtggggacctcccatctgataaggccaagtttgagaactttaataaggccctgcgtatcacaaatgtctctgaggaagactccggggagtatttctgcctggcctccaacaagatgggcagcatccggcacacgatctcggtgagagtaaaggctgctccctactggctggacgaacccaagaaccttattctggctcctggcgaggatgggagactggtgtgtcgagccaatggaaaccccaaacccactgtccagtggatggtgaatggggaacctttgcaatcggcaccacctaacccaaaccgtgaggtggccggagacaccatcatcttccgggacacccagatcagcagcagggctgtgtaccagtgcaacacctccaacgagcatggctacctgctggccaacgcctttgtcagtgtgctggatgtgccgcctcggatgctgtcgccccggaaccagctcattcgagtgattctttacaaccggacgcggctggactgccctttctttgggtctcccatccccacactgcgatggtttaagaatgggcaaggaagcaacctggatggtggcaactaccatgtttatgagaacggcagtctggaaattaagatgatccgcaaagaggaccagggcatctacacctgtgtcgccaccaacatcctgggcaaagctgaaaaccaagtccgcctggaggtcaaagaccccaccaggatctaccggatgcccgaggaccaggtggccagaaggggcaccacggtgcagctggagtgtcgggtgaagcacgacccctccctgaaactcaccgtctcctggctgaaggatgacgagccgctctatattggaaacaggatgaagaaggaagacgactccctgaccatctttggggtggcagagcgggaccagggcagttacacgtgtgtcgccagcaccgagctagaccaagacctggccaaggcctacctcaccgtgctaggacggccagaccggccccgggacctggagctgaccgacctggccgagaggagcgtgcggctgacctggatccccggggatgctaacaacagccccatcacagactacgtcgtccagtttgaagaagaccagttccaacctggggtctggcatgaccattccaagtaccccggcagcgttaactcagccgtcctccggctgtccccgtatgtcaactaccagttccgtgtcattgccatcaacgaggttgggagcagccaccccagcctcccatccgagcgctaccgaaccagtggagcaccccccgagtccaatcctggtgacgtgaagggagaggggaccagaaagaacaacatggagatcacgtggacgcccatgaatgccacctcggcctttggccccaacctgcgctacattgtcaagtggaggcggagagagactcgagaggcctggaacaacgtcacagtgtggggctctcgctacgtggtggggcagaccccagtctacgtgccctatgagatccgagtccaggctgaaaatgacttcgggaagggccctgagccagagtccgtcatcggttactccggagaagattatcccagggctgcgcccactgaagttaaagtccgagtcatgaacagcacagccatcagccttcagtggaaccgcgtctactccgacacggtccagggccagctcagagagtaccgagcctactactggagggagagcagcttgctgaagaacctgtgggtgtctcagaagagacagcaagccagcttccctggtgaccgcctccgtggcgtggtgtcccgcctcttcccctacagtaactacaagctggagatggttgtggtcaatgggagaggtgatgggcctcgcagtgagaccaaggagttcaccaccccggaaggagtacccagtgcccctaggcgtttccgagtccggcagcccaacctggagacaatcaacctggaatgggatcatcctgagcatccaaatgggatcatgattggatacactctcaaatatgtggcctttaacgggaccaaagtaggaaagcagatagtggaaaacttctctcccaatcagaccaagttcacggtgcaaagaacggaccccgtgtcacgctaccgctttaccctcagcgccaggacgcaggtgggctctggggaagccgtcacagaggagtcaccagcacccccgaatgaagcttacaccaacaaccaagcggacatcgccacccagggctggttcattgggcttatgtgcgccatcgccctcctggtgctgatcctgctcatcgtctgtttcatcaagaggagtcgcggcggcaagtacccagtacgagaaaagaaggatgttccccttggccctgaagaccccaaggaagaggatggctcatttgactatagtgatgaggacaacaagcccctgcagggcagtcagacatctctggacggcaccatcaagcagcaggagagtgacgacagcctggtggactatggcgagggtggcgagggtcagttcaatgaagacggctccttcatcggccagtacacggtcaaaaaggacaaggaggaaacagagggcaacgaaagctcagaggccacgtcacctgtcaatgctatctactctctggcctaacggagcccacccaggcacagccaccactttgcaagtgggaggaggggagaaggggagacaaaaccactgcagacctaccacgaagccaccaccaccttcagtaacaagggtacgatatgggggtctgccaagctgtgaggaccagtagccaccaagccacccacaagccccctcccaatgaccccccttcagccccgggtgccaccagtgtgggagagctggagccgtggctgagctcagctggagggagcctggccccttgcccggtctcgcagccaccccgagcgttccaccacactgtccgcccttggcctcggcacacgctcaccttttctgttggttacgggacttctcattgtcttaatttcgctttgtgcatcttcccctccagacccaatg

SEQ ID NO: 266256 - DNA, 1105 bp, Artificial Sequence
  derived and/or modified sequence
atgcggcggctggcggcgagaggcgctgcaggggacgcgggggaagtggcggcgccggcagcggacagctcggacagcgcccagggccggagcccgagcccttggagctgagtgctgtccaggaggcccagttaaagcggctcgaggtgacaagaccccgagtgctggggagcagggagcagggccaggtgccgaggatggccaggcagccaccgccgccctgggtccatgcagccttcctcctctgcctcctcagtcttggcggagccatcgaaattcctatggatccaagcattcagaatgagctgacgcagccgccaaccatcaccaagcagtcagcgaaggatcacatcgtggacccccgtgataacatcctgattgagtgtgaagcaaaagggaaccctgcccccagcttccactggacacgaaacagcagattcttcaacatcgccaaggacccccgggtgtccatgaggaggaggtctgggaccctggtgattgacttccgcagtggcgggcggccggaggaatatgagggggaatatcagtgcttcgcccgcaacaaatttggcacggccctgtccaataggatccgcctgcaggtgtctaaatctcctctgtggcccaaggaaaacctagaccctgtcgtggtccaagagggcgctcctttgacgctccagtgcaaccccccgcctggacttccatccccggtcatcttctggatgagcagctccatggagcccatcacccaagacaaacgtgtctctcagggccataacggagacctatacttctccaacgtgatgctgcaggacatgcagaccgactacagttgtaacgcccgcttccacttcacccacaccatccagcagaagaaccctttcaccctcaaggtcctcaccacccgaggagttgcagaaagaacaccaagcttcatgtatccccagggcaccgcgagcagccagatggtgcttcgtggcatggacctcctgctggaatgcatcgcctccggggtcccaacaccagacatcgcatggtacaagaaaggtggggacctcccatctgataaggccaagtttgagaactttaataaggccctgcgtat

SEQ ID NO: 266257 - DNA, 573 bp, Artificial Sequence
  derived and/or modified sequence
ttctagaagacaatgactggttgaccccacaccggccaggaagctgggtttctctccctgagtgtgggggaggccgaggtcctgaagcaggctgctgagtgctgtccaggaggcccagttaaagcggctcgaggtgacaagaccccgagtgctggggagcagggagcagggccaggtgccgaggatggccaggcagccaccgccgccctgggtccatgcagccttcctcctctgcctcctcagtcttggcggagccatcgaaattcctatggatccaagcattcagaatgagctgacgcagccgccaaccatcaccaagcagtcagcgaaggatcacatcgtggacccccgtgataacatcctgattgagtgtgaagcaaaagggaaccctgcccccagcttccactggacacgaaacagcagattcttcaacatcgccaaggacccccgggtgtccatgaggaggaggtctgggaccctggtgattgacttccgcagtggcgggcggccggaggaatatgagggggaatatcagtgcttcgcccgcaacaaatttggcacggccctgtccaa

SEQ ID NO: 266258 - DNA, 813 bp, Artificial Sequence
  derived and/or modified sequence
atgagcaccgagatcggcaccatgatcagcgtgagcagcgccgagtacggcaccaacgccaaggagagcgtgaccgactacaccacccccagcagcagcctgcccaacaccgtggccaccaacaacaccaagatggaggacaccctggtgaacaacgtgcccctgcccaacaccctgcccctgcccaagagagagaccatccagcagagcagcagcctgaccagcgtgccccccaccaccttcagcctgaccttcaagatggagagcgccagaaaggcctgggagaacagccccaacgtgagagagaagggcagccccgtgaccagcaccgccccccccatcgccaccggcgtgagcagcagcgccagcggccccagcaccgccaactacaacagcttcagcagcgccagcatgccccagatccccgtggccagcgtgacccccaccgccagcctgagcggcgccggcacctacaccaccagcagcctgagcaccaagagcaccaccaccagcgacccccccaacatctgcaaggtgaagccccagcagctgcagaccagcagcctgcccagcgccagccacttcagccagctgagctgcatgcccagcctgatcgcccagcagcagcagaacccccaggtgtacgtgagccagagcgccgccgcccagatccccgccttctacatggacaccagccacctgttcaacacccagcacgccagactggccccccccagcctggcccagcagcagggcttccagcccggcctgagccagcccaccagcgtgcagctgctgaccagcaccatctag

SEQ ID NO: 266259 - DNA, 813 bp, Artificial Sequence
  derived and/or modified sequence
atgagcaccgaaatcgggactatgatttctgtctcaagcgctgaatatggtactaatgcaaaggaaagcgttactgattacacaacaccatcatcaagcctccctaacacagtggcgactaacaacaccaagatggaagataccctcgtgaacaacgttcccctgccgaacaccctgcctctgccaaaaagggagacaatccagcagtctagcagtctgacctcagtcccaccaactactttctctttaacatttaagatggagtccgcgaggaaggcatgggaaaacagtcctaacgttagagaaaagggtagccctgtgacttctaccgcccctccaatcgctaccggagtctccagtagcgctagtgggccatctacagctaattataacagtttttcaagcgcctctatgccacaaatacccgtcgcttctgtgacccctactgccagcctgagcggggcgggcacatacactacgtcctccttatcaacgaagtccactactacctccgatccccctaatatctgcaaagtgaagccacagcagctacagactagctcattgccatccgcgagccatttctcacagctgtcctgtatgcctagcctaatcgctcaacagcagcagaatccacaagtgtatgtttcccaatcagctgcggcccagatacccgcattttacatggacacctctcacctctttaacacccaacacgcacggctggctcccccatcactggcacagcagcagggttttcagccaggtctttctcaaccaaccagcgtccagctgctgacctcgactatatag

SEQ ID NO: 266260 - DNA, 813 bp, Artificial Sequence
  derived and/or modified sequence
atgagcacagaaattggcaccatgatctctgtgtcctctgcagaatatggcaccaatgccaaggagagcgtgacagactacaccacccccagcagcagcctgcccaacacagtggccaccaacaacaccaagatggaggacaccctggtgaacaacgtgcccctgcccaacaccctgcccctgcccaagcgggagaccatccagcagagcagcagcctgacctctgtgccccccaccaccttcagcctgaccttcaagatggagagcgccaggaaggcctgggagaacagccccaacgtgcgggagaagggcagccctgtgaccagcacagccccacccatcgccaccggggtgagcagcagcgccagcggccccagcacagccaactacaacagcttcagcagcgcctccatgccccagatccctgtggcctctgtgacccccacagccagcctgtctggagctggcacctacaccaccagcagcctgagcaccaagagcaccaccaccagtgacccccccaacatctgcaaggtgaagccccagcagctgcagaccagcagcctgcccagcgccagccacttcagccagctgagctgcatgcccagcctgattgcccagcagcagcagaacccccaggtgtatgtgtcccagagcgctgctgcccagatcccagccttctacatggacaccagccacctgttcaacacccagcacgcccggctggccccacccagcctggcccagcagcagggcttccagcccggcctgagccagcccacctctgtgcagctgctgaccagcaccatctag

SEQ ID NO: 266261 - DNA, 813 bp, Artificial Sequence
  derived and/or modified sequence
atgagcaccgagatcggcaccatgatcagcgtgagcagcgccgagtatggcactaatgctaaggagagcgttaccgattacacgaccccctcatcttcgctgcccaatactgtggctacaaataatacaaaaatggaggacacactggtgaacaatgtgcccttacctaataccttgccattaccaaagcgagagaccattcagcaaagttcgagcctgacctctgtgccccctactacctttagtctgacatttaagatggagagtgcaaggaaggcttgggaaaactccccaaatgttagagaaaaaggtagtcctgtgacatccactgctccgcccatcgccacgggcgtgtcatcgtcggctagtgggccgtccaccgctaactataactcgtttagctctgcatccatgccccagataccggtcgccagcgttacacccactgctagcctaagtggcgccggtacctatactacttcatccctgagtacaaagtccaccactactagtgacccaccaaacatctgcaaggtaaagccacagcaacttcagacaagctccctgcccagtgcaagccactttagccagctgtcctgtatgccatctctgatagctcagcagcagcagaaccctcaggtatacgtgtctcagagtgctgcagcccagatccccgctttttacatggatacttcccacctctttaatacccagcatgcgcggctggccccaccatctcttgcgcagcagcagggttttcagcctggactgtctcagccaacttctgttcagcttctcaccagcactatttag

SEQ ID NO: 266262 - DNA, 813 bp, Artificial Sequence
  derived and/or modified sequence
atgagtacggaaatcgggaccatgatctccgtgagtagtgctgagtatggtaccaacgctaaggagtccgtcacagactatacaactcctagcagctccttgcctaatacagtggctactaacaatactaagatggaagatacactcgtgaacaacgtccctttgcctaacactctcccgcttcccaaacgagagacaatccagcagtccagctccctcacctctgtgccacccactaccttttctctgaccttcaaaatggagtcagccaggaaggcgtgggagaattcaccaaacgtgcgcgagaaaggaagccctgtgacttcgacagcaccccctattgccactggtgtgagctcaagcgcaagcggtccgagtacggccaactataactcctttagtagcgcatctatgccacagattccagtcgccagcgtcacaccaactgcctccctgtccggagccggaacatacaccacgtcatctctgagcacaaagagcacgaccacctctgatccaccgaacatctgcaaagtgaaaccgcagcagttgcagacctcctctctgccaagtgcttcccattttagtcagctgtcctgcatgccatccctgatcgcacagcagcaacagaatcctcaggtttatgtgagccagtctgccgctgctcagatccccgctttctatatggatacctcccatctttttaatacccagcacgcacgactggccccacctagccttgctcagcagcaggggttccagcccggtttatcccagcccaccagcgttcagctgctaacctccacgatctag

SEQ ID NO: 266263 - protein, 763 aa, Artificial Sequence
  derived and/or modified sequence
ILPPTQMFQQYPRMTYPPLHGPMRFPPSLSETNKGLRGRGPPPSWASEPERPSILSASELKELDKFDNLDAEADEGWAGAQMEVDYTEQLNFSDDDEQGSNSPKENNSEDQGSKASENNENKKETDEVSNTKSSSQIPAQPSVAKVPYGKGPSFNQERGTSSHLPPPPKLLAQQHPPPDRQAVPGRPGPFPSKQQVADEDEIWKQRRRQQSEISAAVERARKRREEEERRMEEQRKAACAEKLKRLDEKLGILEKQPSPEEIREREREKEREREKELEKEQEQEREKEREKDRERQQEKEKELEKEQEKQREMEKERKQEKEKELERQKEKEKELQKMKEQEKECELEKEREKLEEKIEPREPNLEPMVEKQESENSCNKAEEEPVFTRQDSNRSEKEATPVVHETEPESGSQPRPAVLSGYFKQFQKSLPPRFQRQQEQMKQQQWQQQQQQGVLPQTVPSQPSSSTVPPPPHRPLYQPMQPHPQHLASMGFDPRWLMMQSYMDPRMMSGRPAMDIPPIHPGMIPPKPLMRRDQMEGSPNSSESFEHIARSARDHAISLSEPRMLWGSDPYPHAEPQQATTPKATEEPEDVRSEAALDQEQITAAYSVEHNQLEAHPKADFIRESSEAQVQKFLSRSVEDVRPHHTDANNQSACFEAPDQKTLSAPQEERISAVESQPSRKRSVSHGSNHTQKPDEQRSEPSAGIPKVTSRCIDSKEPIERPEEKPKKEGFIRSSEGPKPEKVYKSKSETRWGPRPSSNRREE

SEQ ID NO: 266264 - protein, 2898 aa, Artificial Sequence
  derived and/or modified sequence
MSEKSGQSTKAKDGKKYATLSLFNTYKGKSLETQKTTVAARHGLQSLGKVGISRRMPPPANLPSLKAENKGNDPNVNIVPKDGTGWASKQEQHEEEKTPEVPPAQPKPGVAAPPEVAPAPKSWASNKQGGQGDGIQVNSQFQQEFPSLQAAGDQEKKEKETNDDNYGPGPSLRPPNVACWRDGGKAAGSPSSSDQDEKLPGQDESTAGTSEQNDILKVVEKRIACGPPQAKLNGQQAALASQYRAMMPPYMFQQYPRMTYPPLHGPMRFPPSLSETNKGLRGRGPPPSWASEPERPSILSASELKELDKFDNLDAEADEGWAGAQMEVDYTEQLNFSDDDEQGSNSPKENNSEDQGSKASENNENKKETDEVSNTKSSSQIPAQPSVAKVPYGKGPSFNQERGTSSHLPPPPKLLAQQHPPPDRQAVPGRPGPFPSKQQVADEDEIWKQRRRQQSEISAAVERARKRREEEERRMEEQRKAACAEKLKRLDEKLGILEKQPSPEEIREREREKEREREKELEKEQEQEREKEREKDRERQQEKEKELEKEQEKQREMEKERKQEKEKELERQKEKEKELQKMKEQEKECELEKEREKLEEKIEPREPNLEPMVEKQESENSCNKEEEPVFTRQDSNRSEKEATPVVHETEPESGSQPRPAVLSGYFKQFQKSLPPRFQRQQEQMKQQQWQQQQQQGVLPQTVPSQPSSSTVPPPPHRPLYQPMQPHPQHLASMGFDPRWLMMQSYMDPRMMSGRPAMDIPPIHPGMIPPKPLMRRDQMEGSPNSSESFEHIARSARDHAISLSEPRMLWGSDPYPHAEPQQATTPKATEEPEDVRSEAALDQEQITAAYSVEHNQLEAHPKADFIRESSEAQVQKFLSRSVEDVRPHHTDANNQSACFEAPDQKTLSAPQEERISAVESQPSRKRSVSHGSNHTQKPDEQRSEPSAGIPKVTSRCIDSKEPIERPEEKPKKEGFIRSSEGPKPEKVYKSKSETRWGPRPSSNRREEVNDRPVRRSGPIKKPVLRDMKEEREQRKEKEGEKAEKVTEKVVVKPEKTEKKDLPPPPPPPQPPAPIQPQSVPPPIQPEAEKFPSTETATLAQKPSQDTEKPLEPVSTVQVEPAVKTVNQQTMAAPVVKEEKQPEKVISKDLVIERPRPDSRPAVKKESTLPPRTYWKEARERDWFPDQGYRGRGRGEYYSRGRSYRGSYGGRGRGGRGHTRDYPQYRDNKPRAEHIPSGPLRQREESETRSESSDFEVVPKRRRQRGSETDTDSEIHESASDKDSLSKGKLPKREERPENKKPVKPHSSFKPDNHVRIDNRLLEKPYVRDDDKAKPGFLPKGEPTRRGRGGTFRRGGRDPGGRPSRPSTLRRPAYRDNQWNPRQSEVPKPEDGEPPRRHEQFIPIAADKRPPKFERKFDPARERPRRQRPTRPPRQDKPPRFRRLREREAASKSNEVVAVPTNGTVNNVAQEPVNTLGDISGNKTPDLSNQNSSDQANEEWETASESSDFNERRERDEKKNADLNAQTVVKVGENVLPPKREIAKRSFSSQRPVDRQNRRGNNGPPKSGRNFSGPRNERRSGPPSKSGKRGPFDDQPAGTTGVDLINGSSAHHQEGVPNGTGQKNSKDSTGKKREDPKPGPKKPKEKVDALSQFDLNNYASVVIIDDHPEVTVIEDPQSNLNDDGFTEVVSKKQQKRLQDEERRKKEEQVIQVWNKKNANEKGRSQTSKLPPRFAKKQATGIQQAQSSASVPPLASAPLPPSTSASVPASTSAPLPATLTPVPASTSAPVPASTLAPVLASTSAPVPASPLAPVSASASVSASVPASTSAAAITSSSAPASAPAPTPILASVSTPASVTILASASIPILASALASTSAPTPAPAASSPAAPVITAPTIPASAPTASVPLAPASASAPAPAPTPVSAPNPAPPAPAQTQAQTHKPVQNPLQTTSQSSKQPPPSIRLPSAQTPNGTDYVASGKSIQTPQSHGTLTAELWDNKVAPPAVLNDISKKLGPISPPQPPSVSAWNKPLTSFGSAPSSEGAKNGQESGLEIGTDTIQFGAPASNGNENEVVPVLSEKSADKIPEPKEQRQKQPRAGPIKAQKLPDLSPVENKEHKPGPIGKERSLKNRKVKDAQQVEPEGQEKPSPATVRSTDPVTTKETKAVSEMSTEIGTMISVSSAEYGTNAKESVTDYTTPSSSLPNTVATNNTKMEDTLVNNVPLPNTLPLPKRETIQQSSSLTSVPPTTFSLTFKMESARKAWENSPNVREKGSPVTSTAPPIATGVSSSASGPSTANYNSFSSASMPQIPVASVTPTASLSGAGTYTTSSLSTKSTTTSDPPNICKVKPQQLQTSSLPSASHFSQLSCMPSLIAQQQQNPQVYVSQSAAAQIPAFYMDTSHLFNTQHARLAPPSLAQQQGFQPGLSQPTSVQQIPIPIYAPLQGQHQAQLSLGAGPAVSQAQELFSSSLQPYRSQPAFMQSSLSQPSVVLSGTAIHNFPTVQHQELAKAQSGLAFQQTSNTQPIPILYEHQLGQASGLGGSQLIDTHLLQARANLTQASNLYSGQVQQPGQTNFYNTAQSPSALQQVTVPLPASQLSLPNFGSTGQPLIALPQTLQPPLQHTTPQAQAQSLSRPAQVSQPFRGLIPAGTQHSMIATTGKMSEMELKAFGSGIDIKPGTPPIAGRSTTPTSSPFRATSTSPNSQSSKMNSIVYQKQFQSAPATVRMTQPFPTQFAPQILSQPNLVPPLVRAPHTNTFPAPVQRPPMALASQMPPPLTTGLMSHARLPHVARGPCGSLSGVRGNQAQAALKAEQDMKAKQRAEVLQSTQRFFSEQQQSKQIGGGKAQKVDSDSSKPPETLTDPPGVCQEKVEEKPPPAPSIATKPVRTGPIKPQAIKTEETKS

SEQ ID NO: 266265 - protein, 2752 aa, Artificial Sequence
  derived and/or modified sequence
MSEKSGQSTKAKDGKKYATLSLFNTYKGKSLETQKTTARHGLQSLGKVGISRRMPPPANLPSLKAENKGNDPNVNIVPKDGTGWASKQEQHEEEKTPEVPPAQPKPGVAAPPEVAPAPKSWASNKQGGQGDGIQVNSQFQQEFPSLQAAGDQEKKEKETNDDNYGPGPSLRPPNVACWRDGGKAAGSPSSSDQDEKLPGQDESTAGTSEQNDILKVVEKRIACGPPQAKLNGQQAALASQYRAMMPPYMFQQYPRMTYPPLHGPMRFPPSLSETNKGLRGRGPPPSWASEPERPSILSASELKELDKFDNLDAEADEGWAGAQMEVDYTEQLNFSDDDEQGSNSPKENNSEDQGSKASENNENKKETDEVSNTKSSSQIPAQPSVAKVPYGKGPSFNQERGTSSHLPPPPKLLAQQHPPPDRQAVPGRPGPFPSKQQVADEDEIWKQRRRQQSEISAAVERARKRREEEERRMEEQRKAACAEKLKRLDEKLGILEKQPSPEEIREREREKEREREKELEKEQEQEREKEREKDRERQQEKEKELEKEQEKQREMEKERKQEKEKELERQKEKEKELQKMKEQEKECELEKEREKLEEKIEPREPNLEPMVEKQESENSCNKEEEPVFTRQDSNRSEKEATPVVHETEPESGSQPRPAVLSGYFKQFQKSLPPRFQRQQEQMKQQQWQQQQQQGVLPQTVPSQPSSSTVPPPPHRPLYQPMQPHPQHLASMGFDPRWLMMQSYMDPRMMSGRPAMDIPPIHPGMIPPKPLMRRDQMEGSPNSSESFEHIARSARDHAISLSEPRMLWGSDPYPHAEPQQATTPKATEEPEDVRSEAALDQEQITAAYSVEHNQLEAHPKADFIRESSEAQVQKFLSRSVEDVRPHHTDANNQSACFEAPDQKTLSAPQEERISAVESQPSRKRSVSHGSNHTQKPDEQRSEPSAGIPKVTSRCIDSKEPIERPEEKPKKEGFIRSSEGPKPEKVYKSKSETRWGPRPSSNRREEVNDRPVRRSGPIKKPVLRDMKEEREQRKEKEGEKAEKVTEKVVVKPEKTEKKDLPPPPPPPQPPAPIQPQSVPPPIQPEAEKFPSTETATLAQKPSQDTEKPLEPVSTVQVEPAVKTVNQQTMAAPVVKEEKQPEKVISKDLVIERPRPDSRPAVKKESTLPPRTYWKEARERDWFPDQGYRGRGRGEYYSRGRSYRGSYGGRGRGGRGHTRDYPQYRDNKPRAEHIPSGPLRQREESETRSESSDFEVVPKRRRQRGSETDTDSEIHESASDKDSLSKGKLPKREERPENKKPVKPHSSFKPDNHVRIDNRLLEKPYVRDDDKAKPGFLPKGEPTRRGRGGTFRRGGRDPGGRPSRPSTLRRPAYRDNQWNPRQSEVPKPEDGEPPRRHEQFIPIAADKRPPKFERKFDPARERPRRQRPTRPPRQDKPPRFRRLREREAASKSNEVVAVPTNGTVNNVAQEPVNTLGDISGNKTPDLSNQNSSDQANEEWETASESSDFNERRERDEKKNADLNAQTVVKVGENVLPPKREIAKRSFSSQRPVDRQNRRGNNGPPKSGRNFSGPRNERRSGPPSKSGKRGPFDDQPAGTTGVDLINGSSAHHQEGVPNGTGQKNSKDSTGKKREDPKPGPKKPKEKVDALSQFDLNNYASVVIIDDHPEVTVIEDPQSNLNDDGFTEVVSKKQQKRLQDEERRKKEEQVIQVWNKKNANEKGRSQTSKLPPRFAKKQATGIQQAQSSASVPPLASAPLPPSTSASVPASTSAPLPATLTPVPASTSAPVPASTLAPVLASTSAPVPASPLAPVSASASVSASVPASTSAAAITSSSAPASAPAPTPILASVSTPASVTILASASIPILASALASTSAPTPAPAASSPAAPVITAPTIPASAPTASVPLAPASASAPAPAPTPVSAPNPAPPAPAQTQAQTHKPVQNPLQTTSQSSKQPPPSIRLPSAQTPNGTDYVASGKSIQTPQSHGTLTAELWDNKVAPPAVLNDISKKLGPISPPQPPSVSAWNKPLTSFGSAPSSEGAKNGQESGLEIGTDTIQFGAPASNGNENEVVPVLSEKSADKIPEPKEQRQKQPRAGPIKAQKLPDLSPVENKEHKPGPIGKERSLKNRKVKDAQQVEPEGQEKPSPATVRSTDPVTTKETKAVSEMSTEIGTMISVSSAEYGTNAKMESARKAWENSPNVREKGSPVTSTAPPIATGVSSSASGPSTANYNSFSSASMPQIPVASVTPTASLSGAGTYTTSSLSTKSTTTSDPPNICKVKPQQLQTSSLPSASHFSQLSCMPSLIAQQQQNPQVYVSQSAAAQIPAFYMDTSHLFNTQHARLAPPSLAQQQGFQPGLSQPTSVQQIPIPIYAPLQGQHQAQLSLGAGPAVSQAQELFSSSLQPYRSQPAFMQSSLSQPSVVLSGTAIHNFPTVQHQELAKAQSGLAFQQTSNTQPIPILYEHQLGQASGLGGSQLIDTHLLQARANLTQASNLYSGQVQQPGQTNFYNTAQSPSALQQVTVPLPASQLSLPNFGSTGQPLIALPQTLQPPLQHTTPQAQAQSLSRPAQVSQPFRGLIPAGTQHSMIATTGKMSEMELKAFGSGIDIKPGTPPIAGRSTTPTSSPFRATSTSPNSQSSKMNSIVYQKQFQSAPATVRMTQPFPTQFAPQAKQRAEVLQSTQRFFSEQQQSKQIGGGKAQKVDSDSSKPPETLTDPPGVCQEKVEEKPPPAPSIATKPVRTGPIKPQAIKTEETKS

SEQ ID NO: 266266 - DNA, 2980 bp, Artificial Sequence
  derived and/or modified sequence
aaaagatgcccaacaggtggagccagaaggacaagagaaaccaagcccagctacagtcagaagcacagatcctgtcacgacaaaggagactaaagcagtctcagaaatgtctactgaaataggaacaatgatctcggtatcatctgcagaatatggtactaatgcaaaggagtctgtaacagactatactacaccctcttcttctttgcctaacaccgtggctactaataatacaaagatggaggatactttggttaataatgtgcccctgcccaacacccttcccctccctaagagggagactatacaacagagctccagcctaacttcagttcctcccactactttcagcctcaccttcaagatggagtctgcacgcaaagcatgggagaattctccaaatgtaagggaaaaggggtctccagtaacttccacagcacctccaattgcaactggagtcagcagtagtgccagtggaccaagcactgctaattacaattcgttctcaagtgcatccatgccccagattcctgttgcttcagtcactcctacagcatcactatcaggagctggtacatacactacctcttctttgagcacaaaatctacaaccacatcggaccctccaaatatttgtaaagtgaaacctcagcagttacagacaagcagcctgccttctgcaagtcatttttcacagttaagctgtatgccttcccttattgcccagcagcaacagaatccgcaagtttatgtgtctcagtctgcagcagctcaaatcccagccttctatatggacacaagtcatttattcaatacccaacatgcacgattggctccgccatccttggctcaacaacagggtttccaaccaggtctctctcagccaacttcagttcagctcctcacttcaaccatatagatctcagccagcttttatgcaaagcagtttatcccagccatctgtggtcctttctggtactgctattcacaactttccaactgtccaacaccaagaacttgccaaggcacaatccggtcttgcctttcagcaaacatcaaatactcagcccattcctatattgtatgaacatcaactggggcaggcatcaggactaggaggttcccagctgattgacacacatcttctccaggccagagcaaatcttacccaggcctcaaatctttattctggacaagtacaacagcctggtcagacaaatttttataacactgcccagtcaccaagtgctctccagcaggtaaactatggcatggttacagtacctttaccagcatcgcagctttccttgcctaattttggatctacagggcaacctctaattgctttgcctcagactcttcagcccccattacagcataccactccccaagcacaggctcagagtctgagtcgtcctgcacaagtaagccagcctttcagaggattaattcctgctggaacacagcatagcatgattgcaaccacaggaaaaatgtctgaaatggaactaaaagcctttggaagtggcattgatataaaaccaggcacacctccaatcgctggtagaagcaccacaccaacatctagtcccttccgggctacttctacaagtccgaacagccagtccagcaaaatgaacagcattgtctaccagaagcagttccagtcagcccctgccactgtgagaatgacacaaccatttcctacacagtttgcaccccaggcaaagcagagagcagaggttcttcagtccacgcaacggttcttctctgaacagcaacagagcaaacagataggaggaggcaaagcccagaaagtggacagtgattcaagtaaacctcctgaaacactgaccgaccctcctggggtctgtcaggaaaaagtagaagaaaagccaccccctgcaccctccatagccaccaaacctgttagaactggaccaatcaaacctcaggcgatcaaaaccgaagaaacaaaatcttaaaggctatggtttattgcaggggattgggaggggggcgggaaaacatggagaattaagtcagataatgctggcagccaaaggggcaaaatggcctgtgacattatcctgttcagagcttggagatgtacaagggacataggagcaatttacactgacacacagctgctgtaccagtgaaaacgaggctttgcaagcttgtacctactatataacatgtgcttggttgatggccatgcatcttcagtcagaatttatatataaatgtatgcacccatttttttgagtgcatataatttagacctaaaaatccttatgattagatgaaacaccaaaaatataaggaaaataacacagcagaggaatagctcagcctgaacagtgtgatggtcccagctactacatcagatgcggtttttttgctcccttatgttcttcggatatggttatggcatttgtaggcttggaggtaaagaactgaagataactggtgctggatagaggagccttattttttattatggcagcttgctatttttataacatggtgattgagttgaacacaatcaaagtacagtagtaactgatgtccccttcttcctggatgaatgagcagataaatattgatgtcagcatccttgaaccatatcaaagtgagcagtgtttggctactgcttctatttgaaatggtgctgtgttttggttgtggtctgaagctttgaagcgctacttagcatctcctttcttccatggagctctcacgattcaaacatgacagatttggtaaaatgctggttaggttgagtcttccttgcccccactcagtcatctttgtatgaatcccatgatttgggggtttttttctttttttttttataccagtttttagctggtgtttatgaagaacagtgagtacctagaactgtgccactaattaaaggaaatcctaagaaggtgcatttctttacagagctgtgtcatgccatcctttgggccct

SEQ ID NO: 266267 - DNA, 246 bp, Artificial Sequence
  derived and/or modified sequence
atgagtcactacggttcctattacggcggactcggctattcatgcggaggatttgggggattgggttatggctacggatgtggttgcgggagtttttgcaggagaggctctgggtgcggctatggtggttatggctacggttccggctttggtggctatggttatgggtcaggattcggaggttatgggtatggttgctgtcgaccttcctataatggaggatatggcttctccggcttctattag

SEQ ID NO: 266268 - DNA, 2292 bp, Artificial Sequence
  derived and/or modified sequence
atcctgccccccacccagatgttccagcagtaccccagaatgacctacccccccctgcacggccccatgagattcccccccagcctgagcgagaccaacaagggcctgagaggcagaggccccccccccagctgggccagcgagcccgagagacccagcatcctgagcgccagcgagctgaaggagctggacaagttcgacaacctggacgccgaggccgacgagggctgggccggcgcccagatggaggtggactacaccgagcagctgaacttcagcgacgacgacgagcagggcagcaacagccccaaggagaacaacagcgaggaccagggcagcaaggccagcgagaacaacgagaacaagaaggagaccgacgaggtgagcaacaccaagagcagcagccagatccccgcccagcccagcgtggccaaggtgccctacggcaagggccccagcttcaaccaggagagaggcaccagcagccacctgccccccccccccaagctgctggcccagcagcaccccccccccgacagacaggccgtgcccggcagacccggccccttccccagcaagcagcaggtggccgacgaggacgagatctggaagcagagaagaagacagcagagcgagatcagcgccgccgtggagagagccagaaagagaagagaggaggaggagagaagaatggaggagcagagaaaggccgcctgcgccgagaagctgaagagactggacgagaagctgggcatcctggagaagcagcccagccccgaggagatcagagagagagagagagagaaggagagagagagagagaaggagctggagaaggagcaggagcaggagagagagaaggagagagagaaggacagagagagacagcaggagaaggagaaggagctggagaaggagcaggagaagcagagagagatggagaaggagagaaagcaggagaaggagaaggagctggagagacagaaggagaaggagaaggagctgcagaagatgaaggagcaggagaaggagtgcgagctggagaaggagagagagaagctggaggagaagatcgagcccagagagcccaacctggagcccatggtggagaagcaggagagcgagaacagctgcaacaaggccgaggaggagcccgtgttcaccagacaggacagcaacagaagcgagaaggaggccacccccgtggtgcacgagaccgagcccgagagcggcagccagcccagacccgccgtgctgagcggctacttcaagcagttccagaagagcctgccccccagattccagagacagcaggagcagatgaagcagcagcagtggcagcagcagcagcagcagggcgtgctgccccagaccgtgcccagccagcccagcagcagcaccgtgcccccccccccccacagacccctgtaccagcccatgcagccccacccccagcacctggccagcatgggcttcgaccccagatggctgatgatgcagagctacatggaccccagaatgatgagcggcagacccgccatggacatcccccccatccaccccggcatgatcccccccaagcccctgatgagaagagaccagatggagggcagccccaacagcagcgagagcttcgagcacatcgccagaagcgccagagaccacgccatcagcctgagcgagcccagaatgctgtggggcagcgacccctacccccacgccgagccccagcaggccaccacccccaaggccaccgaggagcccgaggacgtgagaagcgaggccgccctggaccaggagcagatcaccgccgcctacagcgtggagcacaaccagctggaggcccaccccaaggccgacttcatcagagagagcagcgaggcccaggtgcagaagttcctgagcagaagcgtggaggacgtgagaccccaccacaccgacgccaacaaccagagcgcctgcttcgaggcccccgaccagaagaccctgagcgccccccaggaggagagaatcagcgccgtggagagccagcccagcagaaagagaagcgtgagccacggcagcaaccacacccagaagcccgacgagcagagaagcgagcccagcgccggcatccccaaggtgaccagcagatgcatcgacagcaaggagcccatcgagagacccgaggagaagcccaagaaggagggcttcatcagaagcagcgagggccccaagcccgagaaggtgtacaagagcaagagcgagaccagatggggccccagacccagcagcaacagaagagaggagtag

SEQ ID NO: 266269 - DNA, 2292 bp, Artificial Sequence
  derived and/or modified sequence
atcctcccccctacgcagatgttccagcaatatccacggatgacttacccacccctgcatggtccgatgaggtttccgcccagcctgagtgagaccaacaaaggcctgcgcggcagaggtcctcccccttcatgggcatctgaacccgaaagacccagcatattatccgcatccgaactaaaggaactggataaatttgacaatctggacgccgaagctgacgaaggttgggcaggagcccagatggaggtcgactatacagaacaactcaactttagtgacgatgacgagcaggggagtaacagcccaaaagaaaacaactcagaggaccagggatcaaaggcatctgaaaacaacgagaacaaaaaggagactgatgaggtgagcaacaccaagtcctcatcccaaatcccagcacagccaagcgtcgcaaaagtcccctatggaaaagggccttcctttaatcaagagcgaggaacttccagtcacctgccgcccccacccaaactcctcgcccaacagcatccaccccccgacaggcaagcagtcccgggaagacctggcccgttcccatcaaagcagcaggtggcagacgaggacgaaatctggaaacaaagacgacgccagcagagtgagatatccgcagcagtggagagagcaaggaaacgccgtgaagaggaagaacggcgcatggaggaacagagaaaggctgcatgcgcggaaaaattaaagcgcctagatgaaaaactaggaatcttggagaaacagccttcgcccgaagagatcagagagcgcgaaagagagaaggagcgagaaagggaaaaggaattggagaaagagcaggaacaggaaagagagaaggaacgcgagaaggatagagagcggcagcaagaaaaagaaaaggaattggagaaggagcaggagaaacagcgtgaaatggagaaggagcgaaaacaagaaaaagaaaaggaattagagcgtcaaaaagaaaaggaaaaggaactgcagaaaatgaaagagcaggaaaaggagtgtgagctggaaaaagagagggagaaactggaggagaagatcgaacctagggagcctaacctggaaccaatggtggagaagcaggaatccgaaaactcttgtaataaggcagaagaggagcctgttttcacacggcaagattctaaccggagcgagaaggaggctacaccggtagtacacgagactgaacccgaatcaggctcccagcccaggcccgcggttctctccggctactttaagcaattccagaagtctctgcctccgcgcttccagcggcagcaggaacagatgaaacagcagcagtggcagcagcagcagcagcagggcgtgctgccgcagacagtgccatcccagcctagtagtagtactgtccctcctccccctcatagacccctatatcaacctatgcagccacacccgcagcacctggcgagtatgggcttcgacccccggtggttgatgatgcaatcttacatggacccgaggatgatgagtgggcgcccagccatggatattcctcctattcacccaggcatgatcccgccaaaacctctcatgaggagggatcagatggagggctctccgaatagtagcgagtcttttgagcatattgcccgatccgccagggaccatgcgattagcctgtccgagcccagaatgctgtggggatccgacccctaccctcatgccgagcctcaacaggcaacgacaccaaaagccacagaagagcctgaggatgtgaggagcgaggctgcgctggatcaagaacaaataaccgccgcatacagcgtggagcataatcaactggaagcccaccctaaagccgattttatcagagaatcctctgaggctcaggtacagaagttcctctctcgctcagttgaagacgtgaggccacaccacaccgacgccaacaatcagagcgcttgctttgaagcaccagaccagaagaccctgtccgcgccccaagaggagaggattagtgctgtggagtcgcagccttctagaaaacgttctgtttcgcatggctccaaccatactcagaagcccgacgaacagcgcagcgagccgagcgctggcatccctaaagtgactagccgctgcatcgattccaaggagccgatcgagcggcccgaggaaaaaccaaagaaggagggcttcatcaggagttccgaaggccccaaaccggagaaggtgtacaagtcaaagagtgagacccggtggggacctagacctagtagcaaccgccgagaggaatag

SEQ ID NO: 266270 - DNA, 2292 bp, Artificial Sequence
  derived and/or modified sequence
atcctgccccccacccagatgttccagcagtaccccaggatgacctacccacccctgcacggccccatgaggttcccccccagcctgtctgagaccaacaagggcctgcggggccggggccccccacccagctgggccagcgagcctgagcggcccagcatcctgagcgccagcgagctgaaggagctggacaagtttgacaacctggatgctgaggctgatgagggctgggccggggcccagatggaggtggactacacagagcagctgaacttcagtgatgatgatgagcagggcagcaacagccccaaggagaacaacagcgaggaccagggcagcaaggcctctgaaaataatgaaaacaagaaggagacagatgaggtgagcaacaccaagagcagcagccagatcccagcccagcccagcgtggccaaggtgccctacggcaagggccccagcttcaaccaggagcggggcaccagcagccacctgcccccaccacccaagctgctggcccagcagcaccccccaccagaccggcaggccgtgcccggccggcccggccccttccccagcaagcagcaggtggctgatgaagatgagatctggaagcagaggcggcggcagcagagcgagatctctgctgctgtggagcgggccaggaagagaagagaggaggaggagaggaggatggaggagcagaggaaggccgcctgtgccgagaagctgaagaggctggatgagaagctgggcatcctggagaagcagcccagccctgaggagatccgggagcgggagcgggagaaggagcgggagcgggagaaggagctggagaaggagcaggagcaggagcgggagaaggagcgggagaaggaccgggagcggcagcaggagaaggagaaggagctggagaaggagcaggagaagcagcgggagatggagaaggagaggaagcaggagaaggagaaggagctggagcggcagaaggagaaggagaaggagctgcagaagatgaaggagcaggagaaggaatgtgagctggagaaggagcgggagaagctggaggagaagattgagccccgggagcccaacctggagcccatggtggagaagcaggagagcgagaacagctgcaacaaggccgaggaggagcctgtgttcacccggcaggacagcaacagaagtgagaaggaggccacccctgtggtgcatgaaacagagcctgagagcggcagccagcccaggcctgctgtgctgagcggctacttcaagcagttccagaagagcctgcccccacgcttccagaggcagcaggagcagatgaagcagcagcagtggcagcagcagcagcagcagggcgtgctgccccagacagtgcccagccagcccagcagcagcacagtgcccccaccaccccaccggcccctgtaccagcccatgcagccccacccccagcacctggcctccatgggctttgacccccgctggctgatgatgcagagctacatggaccccaggatgatgagcggccggcctgccatggacatcccccccatccaccctggcatgatcccccccaagcccctgatgagaagagaccagatggagggcagccccaacagcagcgagagctttgagcacatcgcccggagcgcccgggaccacgccatcagcctgtctgagcccaggatgctgtggggcagtgacccctacccccacgccgagccccagcaggccaccacccccaaggccacagaggagccagaagatgtgcgctctgaggccgccctggaccaggagcagatcacagctgcctacagcgtggagcacaaccagctggaggcccaccccaaggctgacttcatccgggagagcagcgaggcccaggtgcagaagttcctgagccgctctgtggaggatgtgcggccccaccacacagatgccaacaaccagagcgcctgctttgaggccccagaccagaagaccctgagcgccccccaggaggagcgcatctctgctgtggagagccagcccagcaggaagaggtctgtgagccacggcagcaaccacacccagaagccagatgagcagaggtctgagcccagcgctggcatccccaaggtgaccagccgctgcatcgacagcaaggagcccatcgagaggcctgaggagaagcccaagaaggagggcttcatccgcagcagcgagggccccaagccagagaaggtgtacaagagcaagtctgagacccgctggggcccccggcccagcagcaacagaagagaggagtag

SEQ ID NO: 266271 - DNA, 264 bp, Artificial Sequence
  derived and/or modified sequence
atggagcggaacaccatctacaccggctggctgcagagcaacctgattttagacccagtagaaaaccaggccctccacccggtgatcatggctctaattctgatgccaagcctgcattgttttggcaacatcctgattctgctcttcctgaagtcgccagctcagttgttttgtcgaatcgggagatttgaaacaggggaagagaagacccgacggagagagggttcagacgtaaccactgaagccgccattggggtcatgtag

SEQ ID NO: 266272 - DNA, 2292 bp, Artificial Sequence
  derived and/or modified sequence
atcctgccccccacccagatgttccagcagtacccccggatgacctaccctccgctccacggacctatgaggttccccccgagtttgtctgaaaccaacaagggccttaggggccgaggtcccccgccttcatgggcgagcgaaccagagagaccaagtatactcagcgcttccgagcttaaggagctagacaaattcgacaacctggatgccgaggcggacgagggttgggccggggcacagatggaagtagattatacagagcagctcaactttagtgacgatgacgaacagggctccaattcccctaaggaaaataattccgaagaccagggttccaaagctagtgaaaataatgagaacaaaaaagagactgatgaggtcagcaacacaaagtcatcttctcagataccagcccagccctctgttgccaaagttccttatggcaaaggacccagttttaaccaggagaggggtaccagcagtcatcttccacctccacccaaactgctagcccaacagcaccctccgcccgataggcaggctgtgcccggcagacccgggccgtttccctctaaacagcaggttgccgatgaggatgagatttggaagcagcgacggaggcagcagtcggaaattagcgctgccgtggagagagctaggaaacgaagagaagaggaggagcggcgcatggaggaacaacgtaaagccgcttgtgctgaaaaactgaagcggctggatgaaaaacttggaatcctcgagaaacagccaagcccagaggagatccgcgagcgcgagcgcgaaaaggagcgtgagcgagaaaaggagctcgagaaggagcaggagcaagagcgcgaaaaggaaagggagaaagatcgcgagcggcaacaggaaaaggaaaaggagctcgagaaggaacaggagaaacagcgggaaatggaaaaggagcggaaacaggaaaaagaaaaagaactggagcggcagaaggagaaggagaaggaactccagaaaatgaaagagcaagaaaaggaatgtgagctggaaaaggaacgagaaaagctcgaggagaagatcgagcctagagagccaaatctggaacccatggtagaaaagcaggaaagcgaaaattcatgcaacaaggccgaggaagaaccagtcttcacgcggcaggactcaaataggtcagaaaaggaagctactcctgtggttcacgaaacggaaccagagtcagggagccagcctcgtcccgcagtgctgtctggctacttcaagcagttccagaagagcctgcctcctagatttcagcggcagcaagaacagatgaaacagcagcagtggcaacagcagcagcagcaaggagttcttcctcaaaccgtgccatcacagcctagcagttctactgtgcctccccctccccacaggcccctttaccagcccatgcaaccccacccgcagcaccttgcttctatgggattcgatccacgctggcttatgatgcaatcttatatggacccgcgaatgatgtctggtaggcctgcaatggacatcccaccaattcatcctggcatgatacctcccaagcctttaatgcgcagggatcaaatggaaggctccccaaatagcagcgaaagttttgaacatatcgctagatccgctcgggatcacgcgataagcctgtcagagccccggatgctgtggggatccgatccgtacccccacgcggaaccccaacaagctaccacacccaaggctaccgaagaacctgaggacgtccgctcggaggcagctctagaccaagagcagattactgcagcgtactccgtggagcataatcagctagaggctcatcccaaggcggatttcatcagagagagctctgaggcccaagtgcagaagttcctgtctagaagtgtcgaggacgtacggccccaccacaccgacgcgaacaatcagagcgcctgttttgaagcgcctgatcaaaagactttgagcgcacctcaggaagaacgtatttcggcagtggaatcccaaccatcgcgcaaaaggagcgtaagccatggcagcaaccatacacagaaacccgacgaacagcgctctgaacccagtgcagggatacctaaggtgacaagtcgttgcattgacagtaaggaaccgattgagaggcccgaggaaaagcccaagaaagagggttttatacgatcctctgaagggcccaagcctgagaaggtgtacaagagcaagtctgagacaagatgggggcctaggccatcctctaaccggagggaagaatag

SEQ ID NO: 266273 - DNA, 2292 bp, Artificial Sequence
  derived and/or modified sequence
attctgccccctacccagatgttccagcaatatcccagaatgacctatcctcccctgcatggccctatgagatttcctccttctctgtcagagaccaacaaaggtctgaggggtagaggccctcctcccagttgggcatcggagcctgaaaggccatctatccttagtgctagcgaactgaaagagctggacaagttcgacaatctggacgcagaagcagatgaaggctgggctggagctcagatggaggtggactatacagaacagctgaactttagcgatgacgatgagcaggggtccaactctcccaaggagaacaactcagaagaccaaggaagcaaagcctccgagaataacgagaacaaaaaggagaccgatgaggtgtctaatacaaagtcctcctctcagatcccagcccagcccagcgtggccaaggtgccttacggtaagggcccttctttcaaccaagagcgcggtacaagctcacatctgcccccaccacccaagctcttggcacagcaacatcctccacctgaccgacaggctgttcccggacgtcctggcccatttccaagtaaacaacaggttgccgacgaagacgaaatctggaaacaaagaagaaggcagcagtccgaaatatcggctgctgtggagagggctagaaaacgccgagaagaggaagagcggcgaatggaagagcaaagaaaggccgcttgcgctgagaaactcaaaaggttggatgaaaaactaggcattctggagaaacagccgtctcccgaagaaatacgggagagagagagagagaaggagagagaaagggagaaggaactggaaaaagagcaggaacaggaacgtgagaaggaaagggagaaggaccgtgagcgtcagcaggaaaaagaaaaagaactggagaaagagcaggagaagcagcgggaaatggaaaaagaacggaagcaagaaaaggagaaggagctagaaaggcaaaaggagaaggaaaaggaactgcagaagatgaaggaacaggagaaagagtgtgaactggaaaaggaaagggagaaattggaggagaagattgagccacgagaacctaatttggagcccatggtggagaagcaagagagcgaaaacagttgcaataaagctgaggaagagcccgtttttacccgtcaggatagtaatcgctcagagaaggaagccacccctgtagtccacgagactgagcctgagagtggcagccagccaaggcctgccgtgttaagcggatattttaaacagttccagaagtccctgccgcctcgtttccaacgtcagcaagagcaaatgaaacagcaacagtggcagcagcagcagcagcagggcgtgctcccgcaaactgtgccatcccagccatcgagcagtacggtgccccctcctcctcacaggcccctgtaccagccgatgcagcctcatcctcagcatctcgcttccatgggtttcgaccctaggtggctgatgatgcagagttatatggatcccagaatgatgtctgggagacctgccatggacattcctcctatccatccgggtatgatcccgcctaaacctctcatgcggcgagatcagatggaaggttccccaaacagtagcgagtcctttgaacacatcgccaggtcggccagagatcacgcaatttccctctccgagccccgaatgttatggggctctgacccctaccctcacgccgagccgcagcaggcaaccacccctaaagccaccgaggaaccagaagacgtgcgttccgaagccgcactggaccaggagcagatcaccgcagcatacagcgtagaacataatcagctggaggcccaccccaaggccgacttcatccgcgagtcctccgaggcccaggttcagaagtttctctctaggtctgtggaagatgtccgaccccaccatacagatgcaaataatcaaagcgcctgcttcgaggctccagaccagaagacccttagtgccccacaggaggagagaattagcgctgtagaatcacaaccatctcgaaaaaggtcagtttcgcacggctcaaaccatacgcagaagccggatgagcagcggagtgaacccagcgcagggatccccaaagtcacaagcaggtgcattgattcaaaagagccaatagaaagaccagaagaaaaacccaagaaagagggatttatccgctcatcagaaggcccaaagccagaaaaggtgtacaaaagcaaatccgaaactcggtggggcccaaggccatcttctaataggcgggaagaatag

SEQ ID NO: 266274 - DNA, 2289 bp, Artificial Sequence
  derived and/or modified sequence
atactaccaccaactcagatgttccaacagtatccgaggatgacatatcctcctctacatggtcccatgagattcccaccttctttatctgaaacaaacaaaggccttcgaggaagaggcccacctccttcatgggcctctgagcctgaacgcccatccattcttagtgcatcagaactgaaggagcttgataaatttgataacctagatgctgaagctgatgaaggttgggcaggtgctcagatggaagtagattatacagagcaactgaatttcagtgatgatgatgaacaaggaagtaacagtcctaaagagaataacagtgaggatcaaggttcaaaagcctctgaaaacaacgaaaacaaaaaagaaacagatgaagtttccaacactaaatcatcttcccaaatacctgcccaaccatcagtagcaaaagttccctatgggaaaggaccttcatttaatcaggaacgtggaacatcttcacatctgccaccacctccaaagttgcttgcacagcagcatccacctccagatcgacaggcagtacctggaagaccaggcccctttccctccaagcagcaagtagctgatgaagatgaaatatggaagcaaagacgaagacaacaatcagaaatttctgcagcagtagaacgtgctcgtaaacggcgtgaagaggaagagcgaagaatggaagaacaaaggaaggcagcttgtgcggagaaactgaaacgattggatgagaagcttggcatcctggaaaaacaaccatctccagaggaaattagggaaagggagcgagaaaaagaacgggagcgtgagaaagaacttgaaaaagaacaagaacaggagcgagagaaggagagggaaaaagacagagagagacagcaggaaaaggagaaagagctggagaaggagcaggaaaaacaaagagaaatggagaaagaaagaaagcaagaaaaagaaaaagaactagaacggcagaaagaaaaggaaaaagaactacaaaagatgaaagaacaagaaaaggaatgtgagctggagaaggaaagggaaaaattagaggagaaaattgaacccagagaacctaatttagagcccatggtagaaaaacaagaaagtgaaaacagctgtaataaagcagaggaggaacccgttttcactagacaagacagcaatcgcagtgaaaaggaagccacaccagtggtgcatgaaacagaaccagaatcagggtctcaacctcggccggctgtattatctggctatttcaaacagtttcagaagtctttacctccacgattccagcggcagcaggaacagatgaaacagcagcagtggcagcagcagcaacagcaaggtgtacttccacagactgttccttcacaaccgtccagtagtactgtccctcctccaccacacagacctctttatcagcctatgcagcctcatcctcagcatttggcttctatgggttttgatccaaggtggctcatgatgcagtcctacatggatcctcgaatgatgtcaggaagacctgctatggatattccacccattcatcctggaatgattcctcctaaaccattaatgagaagagaccagatggaagggtcaccgaacagttctgagtcatttgagcatatagctcgatctgcaagagatcacgcaatttccctttctgagcctcgtatgctgtgggggtcagatccctatcctcatgctgagcctcaacaagcaactactcccaaagcaacagaagagcctgaggatgtaaggtctgaagctgcgttggaccaggaacagattactgctgcttattctgtagaacataatcaattagaggctcacccaaaggcagactttatcagagaatcaagtgaggcacaagtacaaaagtttttaagcagatctgtggaagatgttagacctcaccatactgatgcaaataatcagtctgcttgttttgaagcacctgatcaaaagaccttatccgctcctcaagaggagcggatttcagctgtagaaagtcagccttcccggaaaagaagtgtttcccatggatctaaccatacgcaaaaaccagacgagcagagaagtgaaccatctgcaggcattcctaaagtaaccagcagatgcattgattcaaaagaaccaatagaaaggccagaggagaaaccaaaaaaggaaggctttatacgatcttctgaaggaccaaaacctgaaaaagtatataaatctaaatcagaaactcgttggggcccacgaccaagctctaacagaagggaagaa

SEQ ID NO: 266275 - protein, 208 aa, Artificial Sequence
  derived and/or modified sequence
MAKRVAIVGAGVSGLASIKCCLEEGLEPTCFERSDDLGGLWRFTEHVEEGRASLYKSVVSNSCKEMSCYSDFPFPEDYPNYVPNSQFLEYLKMYANHFDLLKHIQFKTKVCSVTKCSDSAVSGQWEVVTMHEEKQESAIFDAVMVCTGFLTNPYLPLDSFPGINAFKGQYFHSRQYKHPDIFKDKRVLVIGMGNSGTDIAVEASHLAE

SEQ ID NO: 266276 - DNA, 627 bp, Artificial Sequence
  derived and/or modified sequence
atggccaaacgggtcgctatcgttggagctggagtgagcggactagccagcattaagtgctgcttggaagaagggctggaaccaacctgtttcgagagaagcgatgatctcgggggcctgtggagattcactgagcacgtggaagagggaagggcatccctgtataagtccgtcgtgtccaatagctgtaaagagatgagttgttacagcgacttccctttccctgaggattaccctaactatgtgcctaactcacaattcctggagtacctgaagatgtatgccaaccatttcgacctgctcaaacacattcaattcaagaccaaggtttgtagcgtcactaaatgctctgatagtgctgtgtccgggcaatgggaagtggtgaccatgcacgaggaaaaacaagaatctgccattttcgatgccgtgatggtatgtaccggatttttgacaaacccttatttgcctcttgactccttcccgggcataaacgcctttaaagggcagtattttcactcaaggcaatataagcaccccgatatatttaaggataaaagagtgctcgtaattggcatgggcaacagtggcacggacattgctgtagaagcttcgcacttagccgagtag

SEQ ID NO: 266277 - DNA, 627 bp, Artificial Sequence
  derived and/or modified sequence
atggccaagagggtggccatcgtgggcgctggggtgtctggcctggccagcatcaagtgctgcctggaggagggcctggagcccacctgctttgagaggagtgatgacctgggcggcctgtggaggttcacagagcacgtggaggagggccgggccagcctgtacaagtctgtggtgagcaacagctgcaaggagatgagctgctacagcgacttccccttccctgaggactaccccaactacgtgcccaacagccagttcctggagtacctgaagatgtatgccaaccactttgacctgctgaagcacatccagttcaagaccaaggtgtgcagcgtgaccaagtgcagcgacagcgctgtgtctggccagtgggaggtggtgaccatgcatgaggagaagcaggagagcgccatctttgatgctgtgatggtgtgcaccggcttcctgaccaacccctacctgcccctggacagcttccctggcatcaatgccttcaagggccagtacttccacagccggcagtacaagcacccagacatcttcaaggacaagagggtgctggtgattggcatgggcaacagcggcacagacattgctgtggaggccagccacctggccgagtag

SEQ ID NO: 266278 - DNA, 627 bp, Artificial Sequence
  derived and/or modified sequence
atggccaagcgggtggccatcgtgggcgccggcgtgagcggcctggctagcataaaatgttgcctggaggagggtctggaacctacctgcttcgaacgcagcgacgacctggggggattgtggcgcttcaccgaacatgtcgaggaggggcgtgccagcttgtacaaatctgtcgtatctaactcatgcaaggaaatgtcatgctacagcgacttcccgtttcccgaagactacccaaactacgtgcccaatagtcagtttctggaatacctgaagatgtatgccaaccatttcgacttacttaagcacatccagttcaagaccaaagtgtgtagcgtcaccaaatgctcggactccgccgtcagtggccaatgggaggtggttaccatgcacgaagagaagcaggaatccgccatcttcgatgccgtgatggtgtgcaccgggttcttaaccaacccctacctgccactcgactcctttcctggcattaacgcatttaaaggccaatacttccactccaggcagtataaacatcctgatatatttaaagataagcgtgttctggttatcggaatgggtaacagcggtaccgacattgctgttgaggcctcccacctcgctgagtag

SEQ ID NO: 266279 - DNA, 627 bp, Artificial Sequence
  derived and/or modified sequence
atggcaaaaagggtcgccatagtaggggctggagttagcgggctggcatcaataaagtgctgcttagaggaaggtctagagcccacctgctttgagcgctccgacgaccttggcggtctgtggaggtttactgaacacgtagaagaaggacgtgcttccctgtataagagcgtggtatcgaattcctgtaaggagatgagctgctactctgacttcccattccctgaggactacccaaattacgtccctaacagccagttcctggaatatctgaaaatgtacgccaaccacttcgaccttctcaaacatatccagttcaagacaaaagtgtgcagtgtgactaagtgttccgattccgcagtctccggccaatgggaggtggtgaccatgcacgaggagaagcaggaatctgccatctttgacgcagtgatggtgtgcactggattcctcacgaatccatatcttcctttggacagtttccccggtattaatgccttcaagggccagtactttcacagtcggcaatataaacaccccgatatcttcaaggacaaacgggtgttggtcattggcatgggcaattcagggactgacatagctgtggaggctagccacctcgccgagtag

SEQ ID NO: 266280 - DNA, 627 bp, Artificial Sequence
  derived and/or modified sequence
atggccaagagagtggccatcgtgggcgccggcgtgagcggcctggccagcatcaagtgctgcctggaggagggcctggagcccacctgcttcgagagaagcgacgacctgggcggcctgtggagattcaccgagcacgtggaggagggcagagccagcctgtacaagagcgtggtgagcaacagctgcaaggagatgagctgctacagcgacttccccttccccgaggactaccccaactacgtgcccaacagccagttcctggagtacctgaagatgtacgccaaccacttcgacctgctgaagcacatccagttcaagaccaaggtgtgcagcgtgaccaagtgcagcgacagcgccgtgagcggccagtgggaggtggtgaccatgcacgaggagaagcaggagagcgccatcttcgacgccgtgatggtgtgcaccggcttcctgaccaacccctacctgcccctggacagcttccccggcatcaacgccttcaagggccagtacttccacagcagacagtacaagcaccccgacatcttcaaggacaagagagtgctggtgatcggcatgggcaacagcggcaccgacatcgccgtggaggccagccacctggccgagtag

SEQ ID NO: 266281 - protein, 469 aa, Artificial Sequence
  derived and/or modified sequence
MGKKVAIIGAGVSGLASIRSCLEEGLEPTCFEKSNDIGGLWKFSTFVSSVNKHPDFATTGQWDVTTERDGKKESAVFDAVMVCSGHHVYPNLPKESFPGLNHFKGKCFHSRDYKEPGVFNGKRVLVVGLGNSGCDIATELSRTAEQVMISSRSGSWVMSRVWDNGYPWDMLLVTRFGTFLKNNLPTAISDWLYVKQMNARFKHENYGLMPLNGVLRKEPVFNDELPASILCGIVSVKPNVKEFTETSAIFEDGTIFEGIDCVIFATGYSFAYPFLDESIIKSRNNEIILFKGVFPPLLEKSTIAVIGFVQSLGAAIPTVDLQSRWAAQVIKGTCTLPSMEDMMNDINEKMEKKRKWFGKSETIQTDYIVYMDELSSFIGAKPNIPWLFLTDPKLAMEVYFGPCSPYQFRLVGPGQWPGARNAILTQWDRSLKPMQTRVVGRLQKPCFFFHWLKLFAIPILLIAVFLVLT

SEQ ID NO: 266282 - DNA, 1508 bp, Artificial Sequence
  derived and/or modified sequence
aaactgcccagacggttggacaggacgtagacacacagaagaaaagaagacaaagaacgggtaggaaaattaaaaaggttaccatggggaagaaagtggccatcattggagctggtgtgagtggcttggcctccatcaggagctgtctggaagaggggctggagcccacctgctttgagaagagcaatgacattgggggcctgtggaaattttcaacatttgtatccagtgtaaataaacatcctgattttgcaactactggccagtgggatgttaccactgaaagggatggtaaaaaagaatcggctgtctttgatgctgtaatggtttgttccggacatcatgtgtatcccaacctaccaaaagagtcctttccaggactaaaccactttaaaggcaaatgcttccacagcagggactataaagaaccaggtgtattcaatggaaagcgtgtcctggtggttggcctggggaattcgggctgtgatattgccacagaactcagccgcacagcagaacaggtcatgatcagttccagaagtggctcctgggtgatgagccgggtctgggacaatggttatccttgggacatgctgctcgtcactcgatttggaaccttcctcaagaacaatttaccgacagccatctctgactggttgtacgtgaagcagatgaatgcaagattcaagcatgaaaactatggcttgatgcctttaaatggagtcctgaggaaagagcctgtatttaacgatgagctcccagcaagcattctgtgtggcattgtgtccgtaaagcctaacgtgaaggaattcacagagacctcggccatttttgaggatgggaccatatttgagggcattgactgtgtaatctttgcaacagggtatagttttgcctaccccttccttgatgagtctatcatcaaaagcagaaacaatgagatcattttatttaaaggagtatttcctcctctacttgagaagtcaaccatagcagtgattggctttgtccagtcccttggggctgccattcccacagttgacctccagtcccgctgggcagcacaagtaataaagggaacttgtactttgccttctatggaagacatgatgaatgatattaatgagaaaatggagaaaaagcgcaaatggtttggcaaaagcgagaccatacagacagattacattgtttatatggatgaactctcctccttcattggggcaaagcccaacatcccatggctgtttctcacagatcccaaattggccatggaagtttattttggcccttgtagtccctaccagtttaggctggtgggcccagggcagtggccaggagccagaaatgccatactgacccagtgggaccggtcgttgaaacccatgcagacacgagtggtcgggagacttcagaagccttgcttctttttccattggctgaagctctttgcaattcctattctgttaatcgctgttttccttgtgttgacctaatcatcattttctcta

SEQ ID NO: 266283 - DNA, 1410 bp, Artificial Sequence
  derived and/or modified sequence
atgggcaagaaagtcgcgatcattggtgccggggtctccggcttggcgtccattaggtcatgtcttgaggaagggttggagccaacttgttttgagaagagcaacgatatcgggggcttatggaagttcagtacgtttgtcagttccgtgaataaacatcctgacttcgcgaccactggccagtgggatgttactaccgaacgggacgggaagaaagagagcgctgtgtttgacgctgtgatggtttgctccgggcatcacgtatatcctaacctgcccaaggagtccttcccaggtttaaaccattttaaggggaaatgctttcactctcgcgactataaagaaccaggtgtctttaatggcaaacgcgtccttgtagtgggcttagggaattccggatgtgatatcgccactgaactgtcccggacagcggagcaagtgatgataagctcacgctccggctcgtgggtaatgtctcgagtgtgggacaacggctacccttgggatatgctcctggtaacccgattcgggacttttctcaagaacaacttgcctactgccatctcggattggttgtatgtcaaacagatgaacgctcgattcaaacacgaaaattatggtttgatgcctttaaacggcgttctccgaaaggaacccgtcttcaatgatgagctgcccgcttccattttgtgcgggattgtttcggtgaaaccgaatgtgaaggagtttacggaaacgagcgcaatcttcgaggatggaactatctttgaaggcatagactgtgtgatcttcgccaccggatactcattcgcatatccctttctggacgagtccattattaagtccagaaacaacgagatcatactctttaaaggcgtattcccgcctctgctagagaagtccaccattgcggttatcgggtttgttcagtccttgggggcagccattccaaccgtggatctgcagagccggtgggctgctcaggtaatcaagggcacctgtacactgccttctatggaggatatgatgaatgacattaacgagaaaatggagaaaaaacgtaagtggtttggtaaatcggagaccatccagaccgactatatcgtgtatatggacgaactttcttcctttatcggtgccaaacccaacattccttggctgtttcttaccgaccccaaactggcgatggaagtgtacttcgggccctgcagtccatatcaatttcggcttgtcggccccgggcagtggccaggagctaggaacgctatcctgacacagtgggaccgatccctgaagccaatgcagacgcgggtcgttgggagactccagaagccatgcttcttcttccattggctgaagttgttcgccatcccaatcctccttatagcagtctttctggtcctgacgtag

SEQ ID NO: 266284 - DNA, 1410 bp, Artificial Sequence
  derived and/or modified sequence
atgggcaagaaggtggccatcatcggggccggcgtgtctggcctggccagcatccgcagctgcctggaggagggcctggagcccacctgctttgagaagagcaatgacattggaggcctgtggaagttcagcacctttgtgtcctctgtgaacaagcacccagactttgccaccaccggccagtgggatgtgaccacagaaagagatggcaagaaggagagcgctgtgtttgatgctgtgatggtgtgcagcggccaccacgtgtaccccaacctgcccaaggagagcttccctggcctgaaccacttcaagggcaagtgcttccacagccgggactacaaggagcccggggtcttcaacgggaagagggtgctggtggtgggcctgggcaacagcggctgtgacatcgccacagagctgagcaggacagctgagcaggtgatgatcagcagccgcagcggctcctgggtgatgagccgggtgtgggacaatggctacccctgggacatgctgctggtgacccgcttcggcaccttcctgaagaacaacctgcccacagccatcagtgactggctgtatgtgaagcagatgaatgcccgcttcaagcatgagaactacggcctgatgcccctgaatggagtgctgaggaaggagcctgtgttcaatgatgagctgcctgccagcatcctgtgtggcatcgtgtctgtgaagcccaacgtgaaggagttcacagagaccagcgccatctttgaagatggcaccatctttgagggcatcgactgtgtgatctttgccaccggctacagctttgcctaccccttcctggatgagagcatcatcaagagcagaaataatgagatcatcctcttcaagggcgtcttcccccccctgctggagaagagcaccatcgccgtcatcggctttgtgcagagcctgggcgccgccatccccaccgtggacctgcagagccgctgggccgcccaggtgatcaagggcacctgcaccctgcccagcatggaggacatgatgaatgacatcaatgagaagatggagaagaagaggaagtggtttgggaagtctgagaccatccagacagactacatcgtgtacatggatgagctgagcagcttcatcggggccaagcccaacatcccctggctgttcctgacagaccccaagctggccatggaggtgtacttcggcccctgcagcccctaccagttccggctggtgggccctggccagtggccaggggccagaaatgccatcctgacccagtgggacaggagcctgaagcccatgcagaccagggtggtgggccgcctgcagaagccctgcttcttcttccactggctgaagctgtttgccatccccatcctgctgattgctgtgttcctggtgctgacctag

SEQ ID NO: 266285 - DNA, 1410 bp, Artificial Sequence
  derived and/or modified sequence
atgggcaagaaggtggccatcatcggcgccggcgtgagcggcctggcctccattagaagttgcctagaggaaggactggagcctacatgtttcgaaaagagtaacgacataggcggcctttggaagttctccacgtttgtaagctctgtgaataaacaccccgatttcgccaccaccggacagtgggacgtgaccactgaaagggatggcaaaaaggaaagcgccgtgttcgacgctgtgatggtgtgttcaggccatcatgtctaccctaatctgcccaaggaatcattccccggactaaatcatttcaagggtaaatgcttccactctcgcgactacaaagaacctggggtgtttaacgggaagcgggtgctcgtagtgggcttagggaattctggatgcgacatcgccacggaactctccaggacagccgaacaggtaatgattagcagccggagcggctcatgggtgatgtcccgagtgtgggacaatggctatccgtgggatatgttattagtgacaagatttggcaccttcctgaagaacaatctacctaccgctatatccgactggctctacgtcaagcagatgaacgctcgcttcaagcatgaaaactatggcctgatgcctctgaacggtgtgctgcgcaaggaacctgtgttcaatgacgagctgcctgctagcatcctgtgtggaatagtttccgtgaagcctaacgtcaaggagtttacagaaacaagtgctatttttgaggacggcaccatcttcgagggaattgactgcgtgatattcgccactggctactcctttgcttaccccttccttgatgagtccattatcaaaagccgcaataacgaaatcattctattcaagggggtcttcccacctttgcttgaaaagtccactattgccgtaatcggcttcgttcaatcactgggtgcagccatccctacggtcgacctgcagtcccgatgggctgcccaggttataaagggcacgtgtacgttaccctctatggaggatatgatgaatgacatcaacgaaaagatggaaaagaagcggaagtggtttggaaagtcagagaccattcaaacagattacattgtgtacatggacgaactgtcctcctttataggtgccaaacctaatattccctggctctttctgactgaccccaagctcgccatggaggtgtactttggaccatgtagcccatatcagtttaggctcgtcggccccggacagtggcccggggcgcgcaatgccatactgacccagtgggatagatcgcttaagcccatgcaaacaagggtagtggggcgtctgcaaaaaccttgttttttttttcactggttaaaactgttcgctatccctatccttttgattgccgtttttctcgtgctgacctag

SEQ ID NO: 266286 - DNA, 1410 bp, Artificial Sequence
  derived and/or modified sequence
atgggcaagaaagttgcaatcatcggtgcaggcgtttctgggctggcctccatccgatcctgcttagaggaaggacttgagcctacctgtttcgaaaaaagcaatgatatcgggggtctgtggaaattctccacttttgtatcttccgttaataagcaccccgacttcgccaccaccggtcagtgggacgtcacaaccgaacgtgatggaaagaaggagagcgctgtcttcgatgccgtcatggtatgtagcggccaccatgtgtatccaaacctgcccaaggaatcctttcccggactgaaccacttcaaaggcaagtgcttccattctcgcgactataaagaacctggagtgttcaatggaaagcgcgtgctcgtggtgggtctgggcaattccgggtgcgacatcgccacagagctttccagaacggcagagcaggttatgatttcgtccaggtcagggtcttgggtcatgagccgagtgtgggacaacggatacccctgggacatgttgttggtgacacggtttggcaccttcttgaaaaacaacctgcccactgcaatttcggactggttgtacgtgaagcagatgaacgcacggtttaaacatgagaactacgggctgatgccactgaatggcgtgttgagaaaagagccagtcttcaatgacgaactccccgctagtattctctgtgggattgtctctgttaaaccgaatgtgaaggaattcaccgagacatcagctattttcgaggacggaaccatcttcgagggtattgactgcgttatctttgctactgggtacagttttgcctatccatttctcgacgagagcatcatcaagagtcgcaataatgaaatcatattgttcaagggggtttttcccccactgctggagaagagtaccatagctgtgatcggattcgttcagtctttaggcgctgcaatccccactgtggacctccagagccggtgggctgcgcaggttattaaagggacgtgcaccctgcccagcatggaggacatgatgaacgacattaacgagaaaatggagaaaaaacggaaatggttcgggaagtctgaaactattcaaactgattatatagtctatatggatgagctgtcatccttcattggcgctaaacctaatatcccctggctgtttctgacggatccaaagctggcaatggaggtctacttcggtccctgtagtccataccagtttcggctcgtggggcctggtcaatggcccggtgccaggaacgcaattctgacgcaatgggatcgatctctcaagcctatgcaaacgcgggtggttgggagattgcaaaagccatgcttcttcttccattggctcaagctttttgcaattcccatcctgctaatagccgtcttcctagtgttaacatag

SEQ ID NO: 266287 - DNA, 1410 bp, Artificial Sequence
  derived and/or modified sequence
atgggcaagaaggtggccatcatcggcgccggcgtgagcggcctggccagcatcagaagctgcctggaggagggcctggagcccacctgcttcgagaagagcaacgacatcggcggcctgtggaagttcagcaccttcgtgagcagcgtgaacaagcaccccgacttcgccaccaccggccagtgggacgtgaccaccgagagagacggcaagaaggagagcgccgtgttcgacgccgtgatggtgtgcagcggccaccacgtgtaccccaacctgcccaaggagagcttccccggcctgaaccacttcaagggcaagtgcttccacagcagagactacaaggagcccggcgtgttcaacggcaagagagtgctggtggtgggcctgggcaacagcggctgcgacatcgccaccgagctgagcagaaccgccgagcaggtgatgatcagcagcagaagcggcagctgggtgatgagcagagtgtgggacaacggctacccctgggacatgctgctggtgaccagattcggcaccttcctgaagaacaacctgcccaccgccatcagcgactggctgtacgtgaagcagatgaacgccagattcaagcacgagaactacggcctgatgcccctgaacggcgtgctgagaaaggagcccgtgttcaacgacgagctgcccgccagcatcctgtgcggcatcgtgagcgtgaagcccaacgtgaaggagttcaccgagaccagcgccatcttcgaggacggcaccatcttcgagggcatcgactgcgtgatcttcgccaccggctacagcttcgcctaccccttcctggacgagagcatcatcaagagcagaaacaacgagatcatcctgttcaagggcgtgttcccccccctgctggagaagagcaccatcgccgtgatcggcttcgtgcagagcctgggcgccgccatccccaccgtggacctgcagagcagatgggccgcccaggtgatcaagggcacctgcaccctgcccagcatggaggacatgatgaacgacatcaacgagaagatggagaagaagagaaagtggttcggcaagagcgagaccatccagaccgactacatcgtgtacatggacgagctgagcagcttcatcggcgccaagcccaacatcccctggctgttcctgaccgaccccaagctggccatggaggtgtacttcggcccctgcagcccctaccagttcagactggtgggccccggccagtggcccggcgccagaaacgccatcctgacccagtgggacagaagcctgaagcccatgcagaccagagtggtgggcagactgcagaagccctgcttcttcttccactggctgaagctgttcgccatccccatcctgctgatcgccgtgttcctggtgctgacctag

SEQ ID NO: 266288 - DNA, 507 bp, Artificial Sequence
  derived and/or modified sequence
atggaggagcagctggttctcaaaggtggacagcatccacaccaacccgtctggcatgacggtcgtgccgtggctggccagcctcttcatcctcattgggcaccacagccacgacctcgggggagtctcggccagcatctccttagaggtagcctgttggcagagagtctgcagcccttaagtgctggacaggtatgtagtaggaagccacgtagcagactcagaaaatgtcctagtaggagtctgaggtcagagcctattagcgtaccaacactctggaccggtcacgctgaacgagggcagtgtcctctgctcccacccgctccaacgcacggcccactgttggatgactgttatagcttttttaggcggctgggcctgtcccaggtgaagccttttgtacctaggctacacttaaagggttgtagactagcctgggagagcctcttccaagtgctgacatgccggcagtgcagcctcacaggcccaagccagctgctcaattag

SEQ ID NO: 266289 - DNA, 405 bp, Artificial Sequence
  derived and/or modified sequence
atggccaccgctgggggtgggtccggtgcagatccaggttctcgaggcctactgaggctcctgtccttctgtgtgctcctggctgggctctgtcggggaaacagcgtggaacggaaaatttacataccattaaacaaaactgccccctgtgttagacttctcaacgccactcaccaaattggatgccaaagctcgatctctggagacactggtgtgattcacgtcgtagaaaaggaagaggatctgcagtgggtgctcactgatgggccgaatcccccttacatggtactgctcgaatcaaaacactttacccgtcaaaacgtaaggcttagcgacacattcctgtgcagctttatggaattcctctcttattccagagacctgatggaaaagctgaagggttag

SEQ ID NO: 266290 - DNA, 699 bp, Artificial Sequence
  derived and/or modified sequence
atggccacagccggcggggggtctggcgctgatcccggcagtcggggcctccttcgactcctttccttttgcgtgttgctggccggcttatttctcgacttcgagcctgatccgctgccactttgtccagacgtttctttcttcccacagccacagcctccgactccacaaagcaaaggcacgggcctgtgcaggggcaatagcgtggagagaaaaatatatatccctcttaacaagacagctccttgtgtccgactgctaaacgcaacccaccagattggatgtcagtcctccatcagcggagacacaggtgtcatccacgtcgtggaaaaggaggaggacctgcagtgggtgttaactgacggaccaaatcccccttacatggttctcctggagtccaaacatttcacaagagacctcatggagaagctgaagggccgcacgagtcgtatcgccggtctggctgtgtccttaaccaagccctcgccagccagcggcttttctccgtctgtgcagtgccctaacgacggattcggtgtctattccaactcttatggcccagagttcgctcattgccgagaaatacagtggaactccctgggtaatggacttgcttacgaggatttcagcttcccgatttttctcttagaggatgagaatgaaacaaaggttatcaaacagtgttaccaggaccactag

SEQ ID NO: 266291 - DNA, 405 bp, Artificial Sequence
  derived and/or modified sequence
atggccacagctgggggcggcagcggggctgaccccggcagccggggcctgctgcggctgctgtccttctgtgtgctgctggccggcctgtgccggggcaacagcgtggagaggaagatctacatccccctgaacaagacagccccctgtgtgcggctgctgaatgccacccaccagatcggctgccagagcagcatcagcggggacaccggggtcatccacgtggtggagaaggaggaggacctgcagtgggtgctgacagatggccccaaccccccctacatggtgctgctggagagcaagcacttcacccggcagaatgtgcggctgagtgacaccttcctgtgcagcttcatggagttcctgagctacagccgggacctgatggagaagctgaagggctag

SEQ ID NO: 266292 - DNA, 699 bp, Artificial Sequence
  derived and/or modified sequence
atggccacagctgggggcggcagcggggctgaccccggcagccggggcctgctgcggctgctgtccttctgtgtgctgctggccggcctcttcctggactttgagccagaccccctgcccctgtgcccagatgtgtccttcttcccccagccccagccccccaccccccagagcaaaggaacaggcctgtgccggggcaacagcgtggagaggaagatctacatccccctgaacaagacagccccctgtgtgcggctgctgaatgccacccaccagatcggctgccagagcagcatcagcggggacacaggagtcatccacgtggtggagaaggaggaggacctgcagtgggtgctgacagatggccccaaccccccctacatggtgctgctggagagcaagcacttcacccgggacctgatggagaagctgaagggccgcaccagcagaattgctggcctggccgtgtccctgaccaagcccagccctgccagcggcttcagccccagcgtgcagtgccccaatgatggcttcggcgtgtacagcaacagctatggccctgagtttgcccactgccgggagatccagtggaacagcctgggcaatggcctggcctatgaggacttctccttccccatcttcctgctggaggatgaaaatgagaccaaggtgatcaagcagtgctaccaggaccactag

SEQ ID NO: 266293 - DNA, 405 bp, Artificial Sequence
  derived and/or modified sequence
atggccaccgccggcggcggcagcggcgccgaccccggcagccgggggctgctacggctactatctttctgtgtgctgttggccgggttgtgccgagggaactccgtggagaggaaaatttacatccctctgaataaaaccgccccgtgtgtccgcctgctgaacgcaacacatcagataggttgccagtcatccatttctggagacacaggcgtgatacacgtcgtcgaaaaggaggaagatctgcagtgggtgctcaccgacgggcccaatccgccttatatggtactccttgagtctaaacactttacgaggcagaacgtgcgcctgagtgatacttttctgtgcagcttcatggaatttttgtcttatagccgtgacctcatggagaaactgaagggatag

SEQ ID NO: 266294 - DNA, 699 bp, Artificial Sequence
  derived and/or modified sequence
atggccaccgccggcggcggcagcggcgccgaccccggcagccggggactgctccgacttttatcgttctgcgtattgttggcgggtttgtttctagactttgaaccagaccctctacctctgtgcccggacgtctctttttttccccaaccccaaccacctactccacagtcaaagggcactggcctgtgccgcgggaattccgtggagcgaaaaatctacatcccactcaacaaaactgcaccctgcgtcaggcttttgaacgccacccaccaaatcggatgtcagtctagcataagtggcgatactggcgtgatccatgtggttgagaaagaggaggacttacagtgggtcctcaccgacggtcctaatcctccctatatggtgctgcttgagagcaaacacttcacaagagaccttatggagaaactgaaagggcggacctccagaatcgcaggcctggccgtgagtcttacgaagccttcccccgcgagtgggttcagtccgtccgttcaatgcccgaatgatggcttcggagtgtattcaaatagctacgggcccgaatttgcacattgtcgggagattcagtggaattcccttggcaatgggctcgcctatgaggactttagcttccccatctttctgttggaagacgaaaatgaaacaaaggtgatcaaacagtgttaccaggatcactag

SEQ ID NO: 266295 - DNA, 448 bp, Artificial Sequence
  derived and/or modified sequence
cagacaggagccgaacgggggcttccgctcagcagagaggcaagatggctacggcagggggtggctctggggctgacccgggaagtcggggtctccttcgccttctgtctttctgcgtcctactagcaggtttgtgcaggggaaactcagtggagaggaagatatatatccccttaaataaaacagctccctgtgttcgcctgctcaacgccactcatcagattggctgccagtcttcaattagtggagacacaggggttatccacgtagtagagaaagaggaggacctacagtgggtattgactgatggccccaaccccccttacatggttctgctggagagcaagcattttaccaggcagaatgtcaggctgtctgataccttcctgtgttccttcatggaattcctttcctattccagggatttaatggagaagctgaaagggag

SEQ ID NO: 266296 - DNA, 702 bp, Artificial Sequence
  derived and/or modified sequence
ggcaagatggctacggcagggggtggctctggggctgacccgggaagtcggggtctccttcgccttctgtctttctgcgtcctactagcaggcctcttcctggacttcgagcctgaccctctcccactttgtccagatgtctcgtttttcccacaaccccagccacccaccccacagtcgaaaggaacaggtttgtgcaggggaaactcagtggagaggaagatatatatccccttaaataaaacagctccctgtgttcgcctgctcaacgccactcatcagattggctgccagtcttcaattagtggagacacaggggttatccacgtagtagagaaagaggaggacctacagtgggtattgactgatggccccaaccccccttacatggttctgctggagagcaagcattttaccagggatttaatggagaagctgaaagggagaaccagccgaattgctggtcttgcagtgtccttgaccaagcccagtcctgcctcaggcttctctcctagtgtacagtgcccaaatgatgggtttggtgtttactccaattcctatgggccagagtttgctcactgcagagaaatacagtggaattcgctgggcaatggtttggcttatgaagactttagtttccccatctttcttcttgaagatgaaaatgaaaccaaagtcatcaagcagtgctatcaagatcac

SEQ ID NO: 266297 - DNA, 405 bp, Artificial Sequence
  derived and/or modified sequence
atggccactgctggcggtggctctggcgcagatcccggttccagaggtctgctgcgtctcttatccttttgcgtgctcctggctggcctgtgcaggggcaactcggttgagcgtaagatttacattccactaaacaagactgccccatgtgtgcgattgctcaacgccacacatcagattggctgccagtcctcaatctctggcgataccggtgtgattcacgtggtcgagaaggaggaggacttacagtgggtgttgaccgatggcccaaatccgccttatatggtactcctcgagtccaaacattttactcggcagaatgtgcgtctttccgatactttcttgtgctcttttatggaatttctgtcttactctagggacttaatggaaaaactgaagggatag

SEQ ID NO: 266298 - DNA, 699 bp, Artificial Sequence
  derived and/or modified sequence
atggctacggctggaggtgggtctggagccgatcccggaagcaggggactgctgcgcctgctaagcttctgtgtattgttggcaggcctattcctggactttgaacctgatccacttcctctgtgcccagacgtgtcctttttcccacaacctcagcccccaacccctcagtcaaaagggacaggactgtgtagggggaattcagtggaaaggaagatttacattccactgaataaaacggcaccttgtgtgcggctcctgaatgcaacccaccagattggatgccagtcctctatctctggcgatacgggagtaatccacgtggtggagaaggaggaggatttacagtgggttctgactgacggacctaatcccccatacatggtgctgctggagtctaaacactttacacgcgatctgatggagaagctgaagggtcggaccagcaggatagctggtctggcagtctctctgaccaaaccgtccccggcttccggattttcacctagcgtgcagtgcccaaacgacggtttcggagtgtatagtaactcttacgggccagagtttgcacattgtagagagatccaatggaatagcctgggcaatgggctcgcctatgaagacttctcgtttcctatctttttgctggaagacgaaaatgagaccaaggtaatcaaacaatgctatcaggaccactag

SEQ ID NO: 266299 - DNA, 405 bp, Artificial Sequence
  derived and/or modified sequence
atggccaccgccggcggcggcagcggcgccgaccccggcagcagaggcctgctgagactgctgagcttctgcgtgctgctggccggcctgtgcagaggcaacagcgtggagagaaagatctacatccccctgaacaagaccgccccctgcgtgagactgctgaacgccacccaccagatcggctgccagagcagcatcagcggcgacaccggcgtgatccacgtggtggagaaggaggaggacctgcagtgggtgctgaccgacggccccaaccccccctacatggtgctgctggagagcaagcacttcaccagacagaacgtgagactgagcgacaccttcctgtgcagcttcatggagttcctgagctacagcagagacctgatggagaagctgaagggctag

SEQ ID NO: 266300 - DNA, 699 bp, Artificial Sequence
  derived and/or modified sequence
atggccaccgccggcggcggcagcggcgccgaccccggcagcagaggcctgctgagactgctgagcttctgcgtgctgctggccggcctgttcctggacttcgagcccgaccccctgcccctgtgccccgacgtgagcttcttcccccagccccagccccccaccccccagagcaagggcaccggcctgtgcagaggcaacagcgtggagagaaagatctacatccccctgaacaagaccgccccctgcgtgagactgctgaacgccacccaccagatcggctgccagagcagcatcagcggcgacaccggcgtgatccacgtggtggagaaggaggaggacctgcagtgggtgctgaccgacggccccaaccccccctacatggtgctgctggagagcaagcacttcaccagagacctgatggagaagctgaagggcagaaccagcagaatcgccggcctggccgtgagcctgaccaagcccagccccgccagcggcttcagccccagcgtgcagtgccccaacgacggcttcggcgtgtacagcaacagctacggccccgagttcgcccactgcagagagatccagtggaacagcctgggcaacggcctggcctacgaggacttcagcttccccatcttcctgctggaggacgagaacgagaccaaggtgatcaagcagtgctaccaggaccactag

SEQ ID NO: 266301 - protein, 549 aa, Artificial Sequence
  derived and/or modified sequence
MSARGVVQHALPTPRRGALTMSLNSSLSCRKELSNLTEEEGGEGGVIITQFIAIIVITIFVCLGNLVIVVTLYKKSYLLTLSNKFVFSLTLSNFLLSVLVLPFVVTSSIRREWIFGVVWCNFSALLYLLISSASMLTLGVIAIDRYYAVLYPMVYPMKITGNRAVMALVYIWLHSLIGCLPPLFGWSSVEFDEFKWMCVAAWHREPGYTAFWQIWCALFPFLVMLVCYGFIFRVARVKARKVHCGTVVIVEEDAQRTGRKNSSTSTSSSGSRRNAFQGVVYSANQCKALITILVVLGAFMVTWGPYMVVIASEALWGKSSVSPSLETWATWLSFASAVCHPLIYGLWNKTVRKELLGMCFGDRYYREPFVQRQRTSRLFSISNRITDLGLSPHLTALMAGGQPLGHSSSTGDTGFSCSQDSGTDMMLLEDYTSDDNPPSHCTCPPKRRSSVTFEDEVEQIKEAAKNSILHVKAEVHKSLDSYAASLAKAIEAEAKINLFGEEALPGVLVTARTVPGGGFGGRRGSRTLVSQRLQLQSIEEGDVLAAEQR

SEQ ID NO: 266302 - DNA, 2152 bp, Artificial Sequence
  derived and/or modified sequence
gtctgtgtgatggagagagacatggaaaaggcgacgtcccagcggctggaactggggcggaggaacgggaacagggaaggcctgagttaggcaccacaaaggttttcaggagaaaagtggggcgagccgagaggcctggtgcactgtgcgtcctctgagaggtgaaggagcactgtgtggtcagagggctgcgagctctctgtttgggttccgaggaagacagaatgggctgaactggaactgacctaaatgtcagcaagaggagtcgtccagcatgctctgcccaccccacgccgaggtgcactgaccatgagcctcaactcctccctcagctgcaggaaggagctgagtaatctcactgaggaggagggtggcgaagggggcgtcatcatcacccagttcatcgccatcattgtcatcaccatttttgtctgcctgggaaacctggtcatcgtggtcaccttgtacaagaagtcctacctcctcaccctcagcaacaagttcgtcttcagcctgactctgtccaacttcctgctgtccgtgttggtgctgccttttgtggtgacgagctccatccgcagggaatggatctttggtgtagtgtggtgcaacttctctgccctcctctacctgctgatcagctctgccagcatgctaaccctcggggtcattgccatcgaccgctactatgctgtcctgtaccccatggtgtaccccatgaagatcacagggaaccgggctgtgatggcacttgtctacatctggcttcactcgctcatcggctgcctgccacccctgtttggttggtcatccgtggagtttgacgagttcaaatggatgtgtgtggctgcttggcaccgggagcctggctacacggccttctggcagatctggtgtgccctcttcccctttctggtcatgctggtgtgctatggcttcatcttccgcgtggccagggtcaaggcacgcaaggtgcactgtggcacagtcgtcatcgtggaggaggatgctcagaggaccgggaggaagaactccagcacctccacctcctcttcaggcagcaggaggaatgcctttcagggtgtggtctactcggccaaccagtgcaaagccctcatcaccatcctggtggtcctcggtgccttcatggtcacctggggcccctacatggttgtcatcgcctctgaggccctctgggggaaaagctccgtctccccgagcctggagacttgggccacatggctgtcctttgccagcgctgtctgccaccccctgatctatggactctggaacaagacagttcgcaaagaactactgggcatgtgctttggggaccggtattatcgggaaccatttgtgcaacgacagaggacttccaggctcttcagcatttccaacaggatcacagacctgggcctgtccccacacctcactgcgctcatggcaggtggacagcccctggggcacagcagcagcacgggggacactggcttcagctgctcccaggactcagggacagatatgatgctgcttgaggactacacgtctgatgacaaccctccctctcactgcacttgcccacccaagagaaggagctcggtgacatttgaggatgaagtggaacaaatcaaagaagctgccaagaactcgattcttcatgtgaaagctgaagtacacaagtccttggacagttacgcagcaagcttggccaaagccattgaggccgaagccaaaatcaacttatttggggaggaggctttgccaggggtcttggttacagcacggactgtcccggggggcggcttcgggggccgccgaggcagcagaactcttgtgagccagaggctgcagttgcagagcatcgaagaaggagatgttttagctgccgagcagagatgagggcctcagggtgccgtggggctgcagcctgagaggctggcccggggaggagttcccatcaccgcctgtgccgcggccttgggagcatgtcactgtgtacagctggccacacacagggaaggagcagcatctggtatgcagccaccaggacaaggactgaaaataatgtctacagtccacagcttcagcatttccagagaccacatgtgagcttcttttaggtcccagtgatgggaccagaagcatctaaagc

SEQ ID NO: 266303 - DNA, 1650 bp, Artificial Sequence
  derived and/or modified sequence
atgtctgccaggggggtggttcagcacgccttgcctactcccagaagaggtgccctgacaatgagcttaaatagttctctgagctgtcggaaggaattaagcaatttgaccgaagaggagggcggagaagggggtgtgatcataacccagtttatcgctatcatcgtaattacgatattcgtttgtctagggaacctcgtgatcgtggtaacactgtataaaaaaagctacttactaaccctctcgaacaagttcgtgttctccctaaccttgagcaatttccttctgtctgtcctggttctaccttttgtggtcacatcatctatacgacgggaatggatctttggtgtcgtttggtgtaatttctcggccctcctgtatctactgatctcctccgccagtatgctcacactgggcgtaattgccatcgaccggtactatgccgtgctgtacccgatggtttatcctatgaaaattaccggcaatcgcgcagttatggccctcgtgtacatttggttgcattccctcatcggttgtctgcctccgctcttcggttggtctagcgtggaattcgatgaatttaagtggatgtgtgtggccgcatggcatcgggagccaggatatactgcattctggcagatttggtgtgcgttatttccttttctggtaatgttagtatgttacgggttcattttccgtgttgctagagtgaaggctcgtaaagtacactgtggtaccgtggtgatcgtcgaggaagacgcccagcgaactgggcggaagaattcttctactagtacctccagctccggtagccgccggaatgcattccaaggtgtggtgtacagcgctaaccaatgtaaagctctgatcacaatattggtagttttgggggcattcatggtgacctggggtccatatatggtcgttattgcatcggaggctctttggggtaaaagctcagtgtccccctctttagaaacatgggccacttggctgtcttttgcatctgctgtgtgtcaccctttgatttacggcttgtggaataagaccgttcggaaggagctcctcgggatgtgcttcggtgaccgctattatagggagccctttgttcaacgccagcgcacatcacggcttttctctatctcaaacaggattaccgatctgggcctgtccccacacttaaccgctcttatggccggagggcagcctctgggccactccagtagcacaggagatactggatttagctgttctcaagatagcggcactgatatgatgttactagaggactataccagcgacgacaaccctcccagtcattgtacatgtcctcctaagaggcggtcaagtgttactttcgaagatgaagtagagcaaattaaagaggctgcaaagaatagcatcctgcatgtgaaggccgaggtgcacaagtccctggattcttacgctgccagcctagcaaaagctatcgaggctgaggccaagatcaatctattcggtgaggaggcccttcccggagtgctcgtgactgcccgcaccgtcccgggggggggctttgggggcagaagaggctctagaaccttagtgtctcagaggcttcagctacagtccattgaagagggagacgtacttgccgctgagcagcgatag

SEQ ID NO: 266304 - DNA, 1650 bp, Artificial Sequence
  derived and/or modified sequence
atgtctgcccggggcgtggtgcagcacgccctgcccaccccaagaagaggagccctgaccatgagcctgaacagcagcctgagctgcaggaaggagctgagcaacctgacagaggaggagggcggggagggcggcgtcatcatcacccagttcatcgccatcatcgtcatcaccatctttgtgtgcctgggcaacctggtgattgtggtgaccctgtacaagaagagctacctgctgaccctgagcaacaagtttgtgttcagcctgaccctgagcaacttcctgctgtctgtgctggtgctgccctttgtggtgaccagcagcatccggcgggagtggatctttggagtggtgtggtgcaacttcagcgccctgctgtacctgctgatcagcagcgcctccatgctgaccctgggcgtgattgccatcgaccgctactatgctgtgctgtaccccatggtgtaccccatgaagatcaccggcaacagagctgtgatggccctggtgtacatctggctgcacagcctgattggctgcctgccccccctgtttggctggagctctgtggagtttgatgagttcaagtggatgtgtgtggccgcctggcaccgggagcccggctacacagccttctggcagatctggtgtgccctcttccccttcctggtgatgctggtgtgctacggcttcatcttccgggtggcccgggtgaaggccaggaaggtgcactgcggcaccgtggtgattgtggaggaggatgcccagaggactggaaggaagaacagcagcaccagcaccagcagcagcggcagcagaagaaatgccttccagggcgtggtgtacagcgccaaccagtgcaaggccctgatcaccatcctggtggtgctgggcgccttcatggtgacctggggcccctacatggtggtgattgccagcgaggccctgtggggcaagagctctgtgagccccagcctggagacctgggccacctggctgagctttgccagcgctgtgtgccaccccctcatctacggcctgtggaacaagacagtgaggaaggagctgctgggcatgtgcttcggggaccgctactaccgggagccctttgtgcagaggcagaggaccagccgcctcttcagcatcagcaaccgcatcacagacctgggcctgagcccccacctgacagccctgatggccggcggccagcccctgggccacagcagcagcactggagacaccggcttcagctgcagccaggacagcggcacagacatgatgctgctggaggactacaccagtgatgacaacccccccagccactgcacctgcccccccaagagaagaagctctgtgacctttgaagatgaggtggagcagatcaaggaggccgccaagaacagcatcctgcacgtgaaggccgaggtgcacaagagcctggacagctatgctgccagcctggccaaggccatcgaggccgaggccaagatcaacctgtttggagaggaggccctgcccggggtgctggtgacagccaggacagtgcctgggggcggctttggaggccggcggggcagcaggaccctggtgtcccagaggctgcagctgcagagcattgaggagggagatgtgctggccgctgagcagaggtag

SEQ ID NO: 266305 - DNA, 1650 bp, Artificial Sequence
  derived and/or modified sequence
atgagcgcccggggcgtggtgcagcacgccctgcccaccccccggcgaggggcattgacgatgtcactgaatagcagcctgtcttgccgtaaggagctgagcaaccttactgaggaggaaggtggtgaaggaggagttatcattactcagttcatagcaattattgtgatcacaatttttgtgtgcctgggcaatttggtgatagtggtgaccctgtataaaaagtcctatctcttaactctctctaataagttcgtgttctccctgacgctatccaatttcctcttgtccgtgctggtccttccctttgttgtgaccagttctatcaggagggagtggatttttggcgttgtgtggtgcaacttttccgccctgctgtatctgcttatcagtagcgcctcaatgctgacattaggcgtgattgccattgatcgctactacgccgtgctgtatccgatggtttatcctatgaagattactggtaaccgagcagtaatggctctggtttacatctggctgcattctctgatcggatgccttccaccactcttcggttggagttctgttgaattcgacgaatttaaatggatgtgtgtggctgcctggcaccgggaacctggctatacggctttctggcagatctggtgcgccctgttcccgttcttggttatgctcgtatgctatggttttattttccgcgttgcgcgggttaaggcccgaaaggtccattgcgggactgtggtaatcgttgaggaggatgctcagcggacgggcaggaaaaactccagtaccagcactagctcatccgggtctaggagaaatgctttccagggagttgtgtacagtgctaatcagtgtaaagctctaatcacgatactggtggtgctgggcgcatttatggtaacatggggtccttacatggtggtcatcgcgtctgaagccctttggggaaagtcctctgtttcgccgagcctagaaacatgggctacatggctatcctttgcgtcagcagtgtgccaccctttgatctatggtctgtggaataagaccgtgcggaaagaactactgggaatgtgtttcggagataggtactaccgtgaaccattcgtgcagcggcagagaaccagtcgactgttttctatcagcaataggataactgacttaggcttgtccccacatttgacagctctcatggccggtggacagcccctgggccatagttcttcaacgggagatactggattctcttgtagtcaagactcaggtacagacatgatgttgctggaggattacacctctgatgacaatcctccgagtcactgcacatgcccgcccaaaagacggtcctcagtgaccttcgaggacgaagtcgagcagatcaaagaagctgcgaagaattccatcctgcacgtcaaggcggaagtgcacaaaagtctggattcttacgctgcctccctggccaaggctatcgaggccgaggcaaaaatcaacctcttcggggaggaggcactcccaggggtcctggttactgccaggaccgtgccaggaggtggcttcggggggcggcgtggatcccggactctagtttcacaacgcctccaactgcagtccattgaagagggtgacgtgcttgccgccgaacaacgctag

SEQ ID NO: 266306 - DNA, 1650 bp, Artificial Sequence
  derived and/or modified sequence
atgtccgcccgtggggtagtacagcatgcgttacccactcccaggaggggggctctgactatgagtctgaatagcagcctgtcctgtcggaaggaattgagtaacctgaccgaagaagagggcggtgaaggcggtgttattatcacacagttcattgcgatcatcgtaataaccattttcgtgtgtctaggcaatcttgttatcgtggttactctctacaaaaagagttatttgctcacactatctaataaatttgtgttctcccttacgttgtctaatttcctcctttccgtcttggttctgccctttgtggtgacctcttctatccgaagggagtggatctttggagtggtgtggtgcaattttagcgccctgctgtacctgctgatctcctccgcgtccatgttgaccctcggagtgattgccattgatagatactatgccgttctgtacccgatggtgtatccgatgaagattactggtaaccgggctgtaatggccctggtgtacatctggctgcactcccttatcggctgcctgccgccacttttcggctggtcatctgtggaatttgacgagttcaagtggatgtgcgtggctgcttggcatagggagcccggatatacagcgttctggcagatctggtgtgctctgtttcccttcttagtgatgctagtgtgctacggattcatattcagagtggccagggtgaaagccagaaaagttcattgtggtacagtggtgatagtggaggaggacgctcaaagaacaggacgcaagaatagtagtacgtctacaagctcctctggctctaggcggaacgcttttcagggagtagtgtattccgctaaccagtgcaaagccctgattaccatcctcgtcgtgctaggagcgtttatggtgacctggggcccatatatggtcgttatcgccagcgaggcgctgtggggaaagtccagcgtgtcacctagcctagagacctgggctacatggctttctttcgcatctgctgtctgccatccattaatttacggtttatggaacaaaaccgtgcggaaagagctcctggggatgtgttttggcgaccgttactatcgtgaaccctttgtccagcggcagaggacaagtcgcctcttctccatttctaatcgcatcactgacctcgggctctcacctcatctcacggcactgatggccggtggacagcccctgggccacagttctagtacaggggacacaggattcagttgctctcaggatagtggtactgatatgatgttgctggaagactacaccagtgatgataatcccccttcacactgtacatgcccccctaaaagacgtagctcagtcaccttcgaggacgaggtcgagcaaattaaggaggccgcaaagaactctattttgcacgtgaaagcagaagtgcacaaatccctggatagttatgccgcaagtcttgccaaggccattgaggccgaagccaagatcaatctgttcggggaagaagctctccctggcgttttagtgaccgctcggaccgtgccgggaggcggatttggtggacggagaggttcacggaccttagtgtctcaacgattgcagctgcagagcattgaagagggagacgtactggctgcagagcagcgctag

SEQ ID NO: 266307 - DNA, 1650 bp, Artificial Sequence
  derived and/or modified sequence
atgagcgccagaggcgtggtgcagcacgccctgcccacccccagaagaggcgccctgaccatgagcctgaacagcagcctgagctgcagaaaggagctgagcaacctgaccgaggaggagggcggcgagggcggcgtgatcatcacccagttcatcgccatcatcgtgatcaccatcttcgtgtgcctgggcaacctggtgatcgtggtgaccctgtacaagaagagctacctgctgaccctgagcaacaagttcgtgttcagcctgaccctgagcaacttcctgctgagcgtgctggtgctgcccttcgtggtgaccagcagcatcagaagagagtggatcttcggcgtggtgtggtgcaacttcagcgccctgctgtacctgctgatcagcagcgccagcatgctgaccctgggcgtgatcgccatcgacagatactacgccgtgctgtaccccatggtgtaccccatgaagatcaccggcaacagagccgtgatggccctggtgtacatctggctgcacagcctgatcggctgcctgccccccctgttcggctggagcagcgtggagttcgacgagttcaagtggatgtgcgtggccgcctggcacagagagcccggctacaccgccttctggcagatctggtgcgccctgttccccttcctggtgatgctggtgtgctacggcttcatcttcagagtggccagagtgaaggccagaaaggtgcactgcggcaccgtggtgatcgtggaggaggacgcccagagaaccggcagaaagaacagcagcaccagcaccagcagcagcggcagcagaagaaacgccttccagggcgtggtgtacagcgccaaccagtgcaaggccctgatcaccatcctggtggtgctgggcgccttcatggtgacctggggcccctacatggtggtgatcgccagcgaggccctgtggggcaagagcagcgtgagccccagcctggagacctgggccacctggctgagcttcgccagcgccgtgtgccaccccctgatctacggcctgtggaacaagaccgtgagaaaggagctgctgggcatgtgcttcggcgacagatactacagagagcccttcgtgcagagacagagaaccagcagactgttcagcatcagcaacagaatcaccgacctgggcctgagcccccacctgaccgccctgatggccggcggccagcccctgggccacagcagcagcaccggcgacaccggcttcagctgcagccaggacagcggcaccgacatgatgctgctggaggactacaccagcgacgacaacccccccagccactgcacctgcccccccaagagaagaagcagcgtgaccttcgaggacgaggtggagcagatcaaggaggccgccaagaacagcatcctgcacgtgaaggccgaggtgcacaagagcctggacagctacgccgccagcctggccaaggccatcgaggccgaggccaagatcaacctgttcggcgaggaggccctgcccggcgtgctggtgaccgccagaaccgtgcccggcggcggcttcggcggcagaagaggcagcagaaccctggtgagccagagactgcagctgcagagcatcgaggagggcgacgtgctggccgccgagcagagatag

SEQ ID NO: 266308 - protein, 513 aa, Artificial Sequence
  derived and/or modified sequence
MSSKPEPKDVHQLNGTGPSASPCSSDGPGREPLAGTSEFLGPDGAGVEVVIESRANAKGVREEDALLENGSQSNESDDVSTDRGPAPPSPLKETSFSIGLQVLFPFLLAGFGTVAAGMVLDIVQHWEVFQKVTEVFILVPALLGLKGNLEMTLASRLSTAANIGHMDTPKELWRMITGNMALIQVQATVVGFLASIAAVVFGWIPDGHFSIPHAFLLCASSVATAFIASLVLGMIMIGVIIGSRKIGINPDNVATPIAASLGDLITLALLSGISWGLYLELNHWRYIYPLVCAFFVALLPVWVVLARRSPATREVLYSGWEPVIIAMAISSVGGLILDKTVSDPNFAGMAVFTPVINGVGGNLVAVQASRISTFLHMNGMPGENSEQAPRRCPSPCTTFFSPDVNSRSARVLFLLVVPGHLVFLYTISCMQGGHTTLTLIFIIFYMTAALLQVLILLYIADWMVHWMWGRGLDPDNFSIPYLTALGDLLGTGLLALSFHVLWLIGDRDTDVGD

SEQ ID NO: 266309 - DNA, 1542 bp, Artificial Sequence
  derived and/or modified sequence
atgagcagcaagcccgagcccaaggacgtgcaccagctgaacggcaccggccccagcgccagcccctgcagcagcgacggccccggcagagagcccctggccggcaccagcgagttcctgggccccgacggcgccggcgtggaggtggtgatcgagagcagagccaacgccaagggcgtgagagaggaggacgccctgctggagaacggcagccagagcaacgagagcgacgacgtgagcaccgacagaggccccgccccccccagccccctgaaggagaccagcttcagcatcggcctgcaggtgctgttccccttcctgctggccggcttcggcaccgtggccgccggcatggtgctggacatcgtgcagcactgggaggtgttccagaaggtgaccgaggtgttcatcctggtgcccgccctgctgggcctgaagggcaacctggagatgaccctggccagcagactgagcaccgccgccaacatcggccacatggacacccccaaggagctgtggagaatgatcaccggcaacatggccctgatccaggtgcaggccaccgtggtgggcttcctggccagcatcgccgccgtggtgttcggctggatccccgacggccacttcagcatcccccacgccttcctgctgtgcgccagcagcgtggccaccgccttcatcgccagcctggtgctgggcatgatcatgatcggcgtgatcatcggcagcagaaagatcggcatcaaccccgacaacgtggccacccccatcgccgccagcctgggcgacctgatcaccctggccctgctgagcggcatcagctggggcctgtacctggagctgaaccactggagatacatctaccccctggtgtgcgccttcttcgtggccctgctgcccgtgtgggtggtgctggccagaagaagccccgccaccagagaggtgctgtacagcggctgggagcccgtgatcatcgccatggccatcagcagcgtgggcggcctgatcctggacaagaccgtgagcgaccccaacttcgccggcatggccgtgttcacccccgtgatcaacggcgtgggcggcaacctggtggccgtgcaggccagcagaatcagcaccttcctgcacatgaacggcatgcccggcgagaacagcgagcaggcccccagaagatgccccagcccctgcaccaccttcttcagccccgacgtgaacagcagaagcgccagagtgctgttcctgctggtggtgcccggccacctggtgttcctgtacaccatcagctgcatgcagggcggccacaccaccctgaccctgatcttcatcatcttctacatgaccgccgccctgctgcaggtgctgatcctgctgtacatcgccgactggatggtgcactggatgtggggcagaggcctggaccccgacaacttcagcatcccctacctgaccgccctgggcgacctgctgggcaccggcctgctggccctgagcttccacgtgctgtggctgatcggcgacagagacaccgacgtgggcgactag

SEQ ID NO: 266310 - DNA, 1542 bp, Artificial Sequence
  derived and/or modified sequence
atgtcaagcaaacccgaacccaaggatgtccaccagcttaatggcacgggtccgagtgctagtccctgtagtagcgacggacctggcagggagccactcgctggcaccagcgaatttttaggccccgatggggctggcgtggaggtcgtcattgaatcgcgggctaatgccaaaggggttcgagaagaggatgccctgctcgaaaacggtagccaatcaaacgagagtgacgacgtttctaccgataggggccccgcccccccttctcctcttaaggaaacctccttcagcataggactacaggttcttttcccattcctgctcgctgggtttggcacggtggcagccggaatggttctcgatattgtgcagcactgggaggtcttccaaaaggtgacagaagtatttatcctggtgcccgccctgctggggttaaagggcaacttggagatgactctcgcctctagactgagtaccgcagccaatattggtcacatggacacacctaaagagttgtggcgtatgatcacaggaaatatggccctgatccaggtacaggctacagttgtgggctttctggcttccatcgctgccgtcgtcttcggatggattcccgatgggcacttcagcattccgcacgcattcctgctctgcgcgtctagtgtcgcaacagcattcattgcatccctggtactgggcatgattatgattggtgtcattattggaagcaggaaaattggaatcaatcccgataacgtggcgacacccatagccgcaagtttgggcgacttgattactctggcattgctgtctggcattagctggggactgtacctggagcttaaccattggcgttacatctaccccctggtgtgtgcctttttcgttgccctacttccggtctgggtcgtgctggcccgccggtctccagctacccgtgaagtgctgtatagcggctgggaacctgtgatcatagctatggctatttctagcgtcggcggcttgattttagataagactgtgagcgaccctaatttcgcaggaatggcagtgtttacacctgtgatcaatggagtggggggtaacctggtggctgtacaggctagtagaatttcaacattcctccacatgaacggcatgcccggagagaattcagaacaggctccgcggcgttgcccttctccctgtaccacattcttttctcccgatgttaatagcaggagcgcacgggttctttttctgctggttgtccccggtcacctggtcttcctgtatacaatttcttgtatgcaagggggtcacacaacgctgacacttatctttattatcttctatatgactgccgccctgctccaagtgctgattctgctgtacatagctgattggatggtccactggatgtggggcaggggtctggaccctgataacttctccatcccttacctgactgctctgggagatttgttgggaaccgggctcctggccctctcatttcacgtgctgtggttgataggcgaccgggacactgacgtgggcgattag

SEQ ID NO: 266311 - DNA, 1542 bp, Artificial Sequence
  derived and/or modified sequence
atgagcagcaagccagagcccaaggatgtgcaccagctgaatggcaccggccccagcgccagcccctgcagcagtgatggccctggccgggagcccctggccggcaccagcgagttcctgggcccagatggagctggggtggaggtggtgattgagagccgggccaatgccaagggcgtgcgggaggaggatgccctgctggagaatggcagccagagcaatgaaagtgatgatgtgtccacagaccggggccctgccccacccagccccctgaaggagaccagcttcagcatcggcctgcaggtgctcttccccttcctgctggccggctttggaacagtggccgccggcatggtgctggacatcgtgcagcactgggaggtgttccagaaggtgacagaggtgttcatcctggtgcctgccctgctgggcctgaagggcaacctggagatgaccctggccagccggctgagcacagctgccaacatcggccacatggacacccccaaggagctgtggaggatgatcactggaaacatggccctgatccaggtgcaggccaccgtggtgggcttcctggccagcattgctgctgtggtgtttggctggatcccagatggccacttcagcatcccccacgccttcctgctgtgtgccagctctgtggccacagccttcatcgccagcctggtgctgggcatgatcatgattggagtcatcatcggcagcaggaagattggcatcaacccagacaacgtggccacccccatcgccgccagcctgggggacctgatcaccctggccctgctgagcggcatctcctggggcctgtacctggagctgaaccactggagatacatctaccccctggtgtgtgccttctttgtggccctgctgcctgtgtgggtggtgctggcccggcgcagccctgccacccgggaggtgctgtacagcggctgggagcccgtcatcatcgccatggccatcagctctgtgggcggcctcatcctggacaagacagtgtctgaccccaactttgctggcatggctgtgttcacccctgtgatcaatggagtgggcggcaacctggtggccgtgcaggccagccgcatcagcaccttcctgcacatgaatggcatgcctggagaaaattctgagcaggccccccggcgctgccccagcccctgcaccaccttcttctccccagatgtgaacagccgcagcgcccgggtgctcttcctgctggtggtgcccggccacctggtgttcctgtacaccatcagctgcatgcagggcggccacaccaccctgaccctcatcttcatcatcttctacatgacagctgccctgctgcaggtgctgatcctgctgtacatcgctgactggatggtgcactggatgtggggccggggcctggaccctgacaacttcagcatcccctacctgacagccctgggggacctgctgggcaccggcctgctggccctgtccttccacgtgctgtggctgattggagaccgggacacagatgtgggggactag

SEQ ID NO: 266312 - DNA, 1542 bp, Artificial Sequence
  derived and/or modified sequence
atgagcagcaagcccgagcccaaggacgtgcaccagctgaacggcacagggccaagtgccagcccgtgttcatcagacggaccaggccgcgagcctctggccggaaccagcgagtttctgggccccgatggggccggggtggaagtcgtgatcgagagcagagctaatgccaaaggcgtgagagaggaggacgctctgctggagaacgggtcccagtctaatgaatcagacgacgtgagcactgatcggggtccggccccgcccagtccattaaaggagacaagcttttcgatcggtctgcaagttctgtttccattcctgttggccggcttcggcacagtagcagctggaatggtgctggatattgtgcagcactgggaggttttccaaaaggtgactgaggtgttcattttagtcccagctctgcttggtctgaaggggaacctcgagatgactctggccagcaggctgagcacagctgccaacataggacatatggataccccgaaggagctgtggagaatgatcactggcaacatggctctgatccaggttcaggcgactgtggtgggcttcttagcctcaatcgcagctgttgtcttcggctggatccctgatggccacttctctatcccccacgcgtttttgctctgcgccagtagtgtggccaccgccttcatcgccagccttgtcctgggtatgatcatgataggggtgataattggcagtagaaagatcggaattaacccagataacgtcgctacccctattgcggcttccctcggcgacctgattactctagcattgctgtccggcatctcttggggtttgtacctagaactgaatcattggagatatatatatcccctggtttgcgcattttttgtggcccttcttcctgtgtgggttgtactcgctcggaggagcccggctactagagaggttctctattctggatgggaacctgtgatcattgccatggccatctcatctgtcgggggactaatactcgacaaaactgtgtcagatccgaattttgctggcatggcggtctttacccctgtcattaatggagtgggcgggaatttggtggcagtgcaggcgtcaaggatctccacatttctccacatgaacggaatgccaggggaaaacagtgagcaggcccccagaaggtgccccagtccttgcactactttcttttcgcctgacgttaacagcagatcagctcgcgtgctctttttgctggtagtgcccgggcatttggtgttcctgtataccatctcctgcatgcagggcgggcacaccacgctgacactgatattcattatcttctacatgacggccgctctccttcaagtactcatcttgctgtacattgctgattggatggtgcattggatgtggggtagggggctagaccccgacaacttcagtatcccataccttacggctctgggcgatttgctcggcaccgggttgctggccctgtcatttcatgtgttgtggttgattggggatcgcgacacagacgtgggcgactag

SEQ ID NO: 266313 - DNA, 1542 bp, Artificial Sequence
  derived and/or modified sequence
atgtccagtaagcctgagcccaaggacgtgcaccagttaaatggtactggcccaagcgccagtccgtgttcctcagatggccctggccgtgaaccccttgcaggaacatccgaatttttaggtccagacggagcaggcgtggaagtcgttattgaatctcgagccaacgccaaaggagttcgcgaggaggatgcgctactggaaaacggcagtcagtcaaacgagagcgacgacgtgagcacggatcgcggtcccgcacccccttccccactgaaggagacctctttcagtatcggcctgcaggttctgttcccatttctcctggccggatttgggaccgtggccgcaggtatggtgttagacattgtgcagcactgggaggtatttcaaaaggtaactgaagtgtttatcctagttccagccctgctcggactgaaaggcaacctagagatgaccctggcttcccggctgagtactgccgctaatatcggccacatggataccccgaaagaactatggagaatgatcaccggaaatatggctctgatacaagtgcaggcgacagtcgtcggatttctggcatctatcgctgctgtggtcttcggctggataccagatggacatttttctattccacacgcattcctgttatgcgcctctagcgttgcaacagccttcattgcatccctggtgttgggcatgattatgatcggagttatcatagggtccagaaaaattgggataaatcccgataacgtggcgacgcccatcgctgccagcttaggagatctcatcaccttagccctccttagtggtatctcttggggattatacctggaacttaaccactggaggtacatttatccccttgtctgtgccttcttcgtggccctgctgccagtgtgggtggtcctggccagaaggtcacctgctactcgtgaagttctgtacagtggctgggaacccgtgattatcgcaatggctatctcgagcgtgggaggactgatcctggacaagactgtttccgatcccaattttgctggtatggccgtcttcacccccgtaataaacggagtgggaggcaacctggtcgccgtacaagcatctaggattagcactttcttacacatgaacggaatgcccggtgaaaacagtgagcaggccccacgcagatgtccaagtccttgtaccaccttctttagtcctgacgtcaattctagatctgcacgcgtgctttttctgcttgtagtcccgggtcatctggtattcctatacactataagctgcatgcaaggaggccatacaaccctgaccttaatcttcattattttctatatgaccgccgctcttttgcaggtgcttatcttgctttatattgccgattggatggtacattggatgtggggtcggggactagacccagacaatttttctattccctatctcactgcattaggggacctgctgggcactgggctgctagccctgagctttcacgtactgtggcttatcggggatcgggacactgacgttggcgattag

SEQ ID NO: 266314 - DNA, 4997 bp, Artificial Sequence
  derived and/or modified sequence
ccaccggcagccaaccagttgggcccgagtccgcgggcaagaagcgattgggggcgcgtgagctcggctccccggtcccccgtccgggtgcccccccgccgggcccgaagcgatatatcctgccctccccggccacctcccccgcgtggaagcggagcggcggcctcgctgtaacgcagaagcgaaatgtagcgagccgggtgtcgcggctggacgctcgccttggctgggggtgtgggggggcacgccgggggccaaggaggactgtcgaggaggagtgatgagaagagggggtgccctgcaccccccgagaccacgggccacgctgccacttgccaggcgccccccttcctcccaggcgaggggcaggtgttccacactgattctcgtgactttaaggaccagggatttgaagaggtattagctcttcccaggaagggaggaagtttctggaagagaagggaaagacggcagacgctgcgctgggaccagcagagcctgaggagctgtgggaagctgacagagcccagccaaaggagcgggaaggagccgcagccccaggctggcactgtgttctgaaagatttgaactcaagctgctttttacggaagaggggccacttcagagggcaccccagaatttggttgagctcttctactctggatgccccctgctctgaggagcctgccactgagaaccaaagaagataagaggacagatactttttcttcaagcacagagctggtgggttggagtcaggcatctgcacccctagtggctgtctggtgaggaatttcttgtttcttcccagcttgcggcttcagtgcttgatggggctgcctgttggtggatcagtttttgcagtgcctggtaggagtggagagccgtgggaagaggtcctgcggcgcccaagcctgggttcaccccaagactaagttctttcccaagttagagaagaagagagaaagcaaaaagaagagaggaaagttctcccttcccctcctccgtgcctgtcatgtcctctaagccagagccgaaggacgtccaccaactgaacgggactggcccttctgcctctccctgctcttcagatggcccagggagagagcccttggctgggacctcagagttcctggggcctgatggggctggggtagaggtggtgattgagtctcgggccaacgccaagggggttcgggaggaggacgccctgctggagaacgggagccagagcaacgaaagtgacgacgtcagcacagaccgtggccctgcgccaccttccccgctcaaggagacctccttttccatcgggctgcaagtactgtttccattcctcctggcaggctttgggaccgtggctgctggcatggtgttggacatcgtgcagcactgggaagtcttccagaaggtgacagaggtcttcatcctagtgcctgcgctgctggggctcaaagggaacctggaaatgaccctggcatcaaggctttccactgcagccaacattggacacatggacacacccaaggagctctggcggatgatcactgggaacatggccctcatccaggtgcaggccacggtggtgggcttcctggcgtccatcgcagccgtcgtctttggctggatccctgatggccacttcagtattccgcacgccttcctgctctgtgctagcagcgtggccacagccttcattgcctccctggtactgggtatgatcatgattggagtcatcattggctctcgcaagattgggatcaacccagacaacgtggccacacccattgctgccagcctgggcgacctcatcaccttggcgctgctctcaggcatcagctggggactctacctggaactgaatcactggcgatacatctacccactggtgtgtgctttctttgtggccctgctgcctgtctgggtggtgctggcccgacgaagtccagccacaagggaggtgttgtactcgggctgggagcctgttatcattgccatggccatcagcagtgtgggaggcctcatcttggacaagactgtctcagaccccaactttgctgggatggctgtcttcacgcctgtgattaatggtgttgggggcaatctggtggcagtgcaggccagccgcatctccaccttcctgcacatgaatggaatgcccggagagaactctgagcaagctcctcgccgctgtcccagtccttgtaccaccttcttcagccctgatgtgaattctcgctcagcccgggtcctcttcctcctcgtggtcccaggacacctggtgttcctctacaccatcagctgtatgcagggcgggcacaccaccctcacactcatcttcatcatcttctatatgacagctgcactgctccaggtgctgattctcctgtacatcgcagactggatggtgcactggatgtggggccggggcctggacccggacaacttctccatcccatacttgactgctctgggggacctgcttggcactgggctcctagcactcagcttccatgttctctggctcataggggaccgagacacggatgtcggggactagcttggtcactcaacattttccccatccctctgcactttctatttgaaatttttcttttgttcccctgtccctcctccaccccacactcccacctctttctaggacttcactttgataccaaattctcattattttcaatgggaatttttatacattgagccaagtttgtatagcaagaatttgggaaacacagatggcctgagataagcagtacaagtaggtttttgagacaatcaccaagtgcagtttcatggtgggtgcctccaggtgatgtggactggagcaggggagttttgtctggaatctggggacatggggtttggctttagcaacctgtcttggccctaatgagaaaccctttgtaagtgggctctggatttttggttttgttttctttttatctgttttgttttatttttggttttggttgaacagagggacagaagaataagtaacactcccaaacacagacatacttttgtagaagtggaccaacttcaaagctctggacaggagacacctgctccaggcccctgtgatcccagttctgttctcttgccctctggacctaagcgttcccactcgcagaaagagtaaggtggactgacttttcaatttgtgcacatgcctcttgttcaatggcctggtcaacatcaacaacccctccctctgatcatttccagttgattgtcatatccaggaaaaaatggaacagtgcactcttctccctgttgacccatgtccacctattggttccccaaaatccacattctccctgggcccaaatgactttgtctccctgggcccagattctttgtctctcttcaaccttcatctcaaattgtctctaagcactaccttccccagagcttgccaggttgggttttgagattagggtcaggtcatgggtatgtggagaatggtttggaggttgaggacaaccacaggtgtctcattgctgccatttctcctgaggacataatcacttggtcaccttggaccctgtcacttcctaaaattactcgttctgtcatgccatagaggtcagttttcctctttcttggcttctacccacaaacattcaccaatcatttattcgttcatttagcaaatatgcagcctccgcaagatgagctctcctgcagacaagcatggtctgaaacattctttgagcaatatttattgagtgcctactatgtgttaggtactgtgccaggcactgataagccagtggtaagggaaacacagctctaacctcacctcattctccaggttacaaaggccatgtgcccctttgaatctggcagagaaagtttcctcgttgtaagtatttgcatctacttcaagccagattcttctgcctctttctcctttccagacccctactctgtgcagtgctgaccacagctagagccaccgccccattgctcaaccagtatttatttccctaaacgacccttcctcacattcccttccctccacctctccttaccaagcacccaaaagaggatttagaactagcagggtggacatcatctggttgtttctacttttctctgcctagcacaaaattgggagaaaactggagcctccatccgcagtcacacgtgtacagatctggggatttggatgtaggctttttctaacttctctctcagaagcttctacagaaacccttccatctgtagcctcaagggcccacctccaagggaaggcttaggcaatgatcctgtttctaccaacactgcaccttatcccaggaacctgccctagacctccagagaccatattttctctccctccatttctacccagacctccaggcctccttctggaatcatagaaccgtagaattggaaggaattttagaggttttctagttggagttgtgtccaacagaattcattaacaccagcctgggcttgtttttcctcctccctctggacttttttcatcttttcctccacctcaaaaaatacttacacacagattcttcttgtacaggcatcaaaaccaactcctctgcccctaaggctgtgtccctgtggtctccagccacccctaccccagtcactcgccccttcctcatctctggaatttggccaggcagtcccagaagactctggagtgacctcctttgcctaaaaagcagacagataggcatgccccaggccctgagtgagcagaggaggactgtagggtgagagggaaagaaaatgaaggtgactttcatggaagtttcatttcttttccccgattgtaccaactgcatgtacttttggcctggctgcaaggagcaatattggtttactctcgtatccttaaaaagttacagaactgtgtcttaagagaattatttatagttactataactgaattgacaaatgtcaacttaactgataaattatatttggtaaaataaagaggacgtttatttaga

SEQ ID NO: 266315 - protein, 233 aa, Artificial Sequence
  derived and/or modified sequence
MKDPLAKDERIYVTNYYYGNTLVEFRNLENFKQGRWSNSYKLPYSWIGTGHVVYNGAFYYNRAFTRNIIKYDLKQRYVAAWAMLHDVAYEEATPWRWQGHSDVDFAVDENGLWLIYPALDDEGFSQEVIVLSKLNAADLSTQKETTWRTGLRRNFYGNCFVICGVLYAVDSYNQRNANISYAFDTHTNTQIVPRLLFENEYSYTTQIDYNPKDRLLYAWDNGHQVTYHVIFAY

SEQ ID NO: 266316 - protein, 873 aa, Artificial Sequence
  derived and/or modified sequence
MGNREMEELIPLVNRLQDAFSALGQSCLLELPQIAVVGGQSAGKSSVLENFVGRDFLPRGSGIVTRRPLVLQLVTSKAEYAEFLHCKGKKFTDFDEVRLEIEAETDRVTGMNKGISSIPINLRVYSPHVLNLTLIDLPGITKVPVGDQPPDIEYQIREMIMQFITRENCLILAVTPANTDLANSDALKLAKEVDPQGLRTIGVITKLDLMDEGTDARDVLENKLLPLRRGYVGVVNRSQKDIDGKKDIKAAMLAERKFFLSHPAYRHIADRMGTPHLQKVLNQQLTNHIRDTLPNFRNKLQGQLLSIEHEVEAYKNFKPEDPTRKTKALLQMVQQFAVDFEKRIEGSGDQVDTLELSGGAKINRIFHERFPFEIVKMEFNEKELRREISYAIKNIHGIRTGLFTPDMAFEAIVKKQIVKLKGPSLKSVDLVIQELINTVKKCTKKLANFPRLCEETERIVANHIREREGKTKDQVLLLIDIQVSYINTNHEDFIGFANAQQRSSQVHKKTTVGNQGTNLPPSRQIVIRKGWLTISNIGIMKGGSKGYWFVLTAESLSWYKDDEEKEKKYMLPLDNLKVRDVEKSFMSSKHIFALFNTEQRNVYKDYRFLELACDSQEDVDSWKASLLRAGVYPDKSVMNKKAENDENGQAENFSMDPQLERQVETIRNLVDSYMSIINKCIRDLIPKTIMHLMINNVKDFINSELLAQLYSSEDQNTLMEESAEQAQRRDEMLRMYQALKEALGIIGDISTATVSTPAPPPVDDSWIQHSRRSPPPSPTTQRRPTLSAPLARPTSGRGPAPAIPSPGPHSGAPPVPFRPGPLPPFPSSSDSFGAPPQVPSRPTRAPPSVPSRRPPPSPTRPTIIRPLESSLLD

SEQ ID NO: 266317 - DNA, 2434 bp, Artificial Sequence
  derived and/or modified sequence
gagcggatgccaccccgtttccagcctccggtgctcaccgtaatgctcacaacaacctagcaaagtggggatcatcttcaccactgtacagatgaagaaattgaaggtcagacattcaaggttatgtggccacatgagagaaataccagagctgggatgaagactcaacggctctcagacaccaggttgcttcttgagagaagccggatggatgtgcatgcagggagggaagttgcctctgaggaacggcctacagtggcttacaactcccgggagggatgtggaatctatccccccaacagcccatgaagacttataaaagctgacagatgcaaggttttcagccatgcctttgataagatactataaaagtaaagtagcttctgccctaaaagctgagcgctatttccagaaaatcaacaatggaaatgataggcatttcttttgaaactggcacattcataatggacatagaagaatcaacataagaaagtagcaggtattggtctttcctgtggtccctgatgatctatccacttgacctcttcaggaacattccctggaagcaggggaagtgctttgcttccctgtctcccgagggagaaagggcatttgatggcatggagccactctgccagccaggagccaggcccgctctaagggggctacagcatgcctcagattgctacaggctcctctcccctcccgggtccggccttgtcggcaccaacccctcagttcctgccccatctccccactgcggttgctgtcaggcctggagcatttcctccttcactttcacgggtcccacacccttcaagatcaacagtgaccaggccactccctgccatctgagaagcccagaaaccatcttccgtcagagggagattagcaatgaagctttctgacgtctctccctgtaccaggctcaaaaggaatttcatcctttctttccattcactgcaatgagctctcacactcatttgaaatgtgcggcctgatgacccacacacctctcaggggagccatggccccacggctgtctccccctgaagatgtcgtccctgtctgagcccctcctcattacaggagagaacgagcacctgccagcaccggcagcccctcgatcctaacctcagatggcaccctttgggtgcggagtgggaaaggaagaagactcagctggtgaaggctcagtacttttccttttccgcaatcactaagtaattttctcatccttgaaagcaattttctgctgaaattcagaaagaacttattttgaagttacgccagtaaaagctctggaaactgtgatgggagcttgtgctggaagccgaggacagagctccatgctgattctccattcctcttatttatttgcatgatctgagctaatttctcagctgtaatctacaccacccaccacctagaaacttcccagaaacgtccagcaggggaggggtgggaacgagaaagaaagcacccaacgctctggcagggtctgcgcagccgccagactctgtttctagacggtcacggccgacttagtaattcacttagaagatctcctgaaataagcacaaaatgttggcagcaaatggtcaaagggaaatgccccagttttcttaggggacggaccctgttactttatcagatagcagtgtgagctgaagtgtgaagacagggcagacactaatggtattttgttcatcctgaatttttttttttggcattaattttgatctttaaaaaatattgcattaggaaatgtaaatgcatatgagtaagtgaaagaaaccaatctggaaagtctacacaccgtacgattccagctatatgacattctggaaaaggcaagaatagagaggcagtaaaaagatcagcaaagagtaaaaaataagtcggaaagggacaaataaggttcttagggtgtggagactacatctgtgtgatagtacgatgggtgggtacatggcattatgcatttgtccaaacccaccgaacggacaacaccaagagggaaccctgctataaactgtggcctctgtgcgatcatgatgtgtcaatatgggttcatcagctgtgacaaatgaaccccacaggttggggatgttgacatgggggaggctgtgcatatgttggggaaggtgatatgtgggaactctctataccttctgcccaatattattgcgaacctaaaactgctctcaaaaatatagcctaagaaaaagtaactttaatcttgggagttattgtttactgggtacagagtttcagttctggaaggtgaaaagagttctggaggtagatggaggtgatatttgtacaacaatgtgaatacttagtgccattgaaccgtacacttaaaaatagttcagacggctaactttatgttgtgtatgttttactgcaattaaaaaatgttacttatctt

SEQ ID NO: 266318 - protein, 869 aa, Artificial Sequence
  derived and/or modified sequence
MGNREMEELIPLVNRLQDAFSALGQSCLLELPQIAVVGGQSAGKSSVLENFVGRDFLPRGSGIVTRRPLVLQLVTSKAEYAEFLHCKGKKFTDFDEVRLEIEAETDRVTGMNKGISSIPINLRVYSPHVLNLTLIDLPGITKVPVGDQPPDIEYQIREMIMQFITRENCLILAVTPANTDLANSDALKLAKEVDPQGLRTIGVITKLDLMDEGTDARDVLENKLLPLRRGYVGVVNRSQKDIDGKKDIKAAMLAERKFFLSHPAYRHIADRMGTPHLQKVLNQQLTNHIRDTLPNFRNKLQGQLLSIEHEVEAYKNFKPEDPTRKTKALLQMVQQFAVDFEKRIEGSGDQVDTLELSGGAKINRIFHERFPFEIVKMEFNEKELRREISYAIKNIHGIRTGLFTPDMAFEAIVKKQIVKLKGPSLKSVDLVIQELINTVKKCTKKLANFPRLCEETERIVANHIREREGKTKDQVLLLIDIQVSYINTNHEDFIGFANAQQRSSQVHKKTTVGNQGTNLPPSRQIVIRKGWLTISNIGIMKGGSKGYWFVLTAESLSWYKDDEEKEKKYMLPLDNLKVRDVEKSFMSSKHIFALFNTEQRNVYKDYRFLELACDSQEDVDSWKASLLRAGVYPDKSVAENDENGQAENFSMDPQLERQVETIRNLVDSYMSIINKCIRDLIPKTIMHLMINNVKDFINSELLAQLYSSEDQNTLMEESAEQAQRRDEMLRMYQALKEALGIIGDISTATVSTPAPPPVDDSWIQHSRRSPPPSPTTQRRPTLSAPLARPTSGRGPAPAIPSPGPHSGAPPVPFRPGPLPPFPSSSDSFGAPPQVPSRPTRAPPSVPSRRPPPSPTRPTIIRPLESSLLD

SEQ ID NO: 266319 - DNA, 2610 bp, Artificial Sequence
  derived and/or modified sequence
atgggcaacagagagatggaggagctgatccccctggtgaacagactgcaggacgccttcagcgccctgggccagagctgcctgctggagctgccccagatcgccgtggtgggcggccagagcgccggcaagagcagcgtgctggagaacttcgtgggcagagacttcctgcccagaggcagcggcatcgtgaccagaagacccctggtgctgcagctggtgaccagcaaggccgagtacgccgagttcctgcactgcaagggcaagaagttcaccgacttcgacgaggtgagactggagatcgaggccgagaccgacagagtgaccggcatgaacaagggcatcagcagcatccccatcaacctgagagtgtacagcccccacgtgctgaacctgaccctgatcgacctgcccggcatcaccaaggtgcccgtgggcgaccagccccccgacatcgagtaccagatcagagagatgatcatgcagttcatcaccagagagaactgcctgatcctggccgtgacccccgccaacaccgacctggccaacagcgacgccctgaagctggccaaggaggtggacccccagggcctgagaaccatcggcgtgatcaccaagctggacctgatggacgagggcaccgacgccagagacgtgctggagaacaagctgctgcccctgagaagaggctacgtgggcgtggtgaacagaagccagaaggacatcgacggcaagaaggacatcaaggccgccatgctggccgagagaaagttcttcctgagccaccccgcctacagacacatcgccgacagaatgggcaccccccacctgcagaaggtgctgaaccagcagctgaccaaccacatcagagacaccctgcccaacttcagaaacaagctgcagggccagctgctgagcatcgagcacgaggtggaggcctacaagaacttcaagcccgaggaccccaccagaaagaccaaggccctgctgcagatggtgcagcagttcgccgtggacttcgagaagagaatcgagggcagcggcgaccaggtggacaccctggagctgagcggcggcgccaagatcaacagaatcttccacgagagattccccttcgagatcgtgaagatggagttcaacgagaaggagctgagaagagagatcagctacgccatcaagaacatccacggcatcagaaccggcctgttcacccccgacatggccttcgaggccatcgtgaagaagcagatcgtgaagctgaagggccccagcctgaagagcgtggacctggtgatccaggagctgatcaacaccgtgaagaagtgcaccaagaagctggccaacttccccagactgtgcgaggagaccgagagaatcgtggccaaccacatcagagagagagagggcaagaccaaggaccaggtgctgctgctgatcgacatccaggtgagctacatcaacaccaaccacgaggacttcatcggcttcgccaacgcccagcagagaagcagccaggtgcacaagaagaccaccgtgggcaaccagggcaccaacctgccccccagcagacagatcgtgatcagaaagggctggctgaccatcagcaacatcggcatcatgaagggcggcagcaagggctactggttcgtgctgaccgccgagagcctgagctggtacaaggacgacgaggagaaggagaagaagtacatgctgcccctggacaacctgaaggtgagagacgtggagaagagcttcatgagcagcaagcacatcttcgccctgttcaacaccgagcagagaaacgtgtacaaggactacagattcctggagctggcctgcgacagccaggaggacgtggacagctggaaggccagcctgctgagagccggcgtgtaccccgacaagagcgtggccgagaacgacgagaacggccaggccgagaacttcagcatggacccccagctggagagacaggtggagaccatcagaaacctggtggacagctacatgagcatcatcaacaagtgcatcagagacctgatccccaagaccatcatgcacctgatgatcaacaacgtgaaggacttcatcaacagcgagctgctggcccagctgtacagcagcgaggaccagaacaccctgatggaggagagcgccgagcaggcccagagaagagacgagatgctgagaatgtaccaggccctgaaggaggccctgggcatcatcggcgacatcagcaccgccaccgtgagcacccccgcccccccccccgtggacgacagctggatccagcacagcagaagaagccccccccccagccccaccacccagagaagacccaccctgagcgcccccctggccagacccaccagcggcagaggccccgcccccgccatccccagccccggcccccacagcggcgccccccccgtgcccttcagacccggccccctgccccccttccccagcagcagcgacagcttcggcgcccccccccaggtgcccagcagacccaccagagccccccccagcgtgcccagcagaagacccccccccagccccaccagacccaccatcatcagacccctggagagcagcctgctggactag

SEQ ID NO: 266320 - DNA, 3280 bp, Artificial Sequence
  derived and/or modified sequence
agccaagcggcgggctggcggcgggctccgacgtctgcgccaggacctggctggctgagcccggcgcagcagcagcagccagggcagcgcggcccctactccctgtcaggtcgtagaggcgagcagggaccagctggtcgccggcccctcgggcaagatggggaaccgggagatggaggagctgatcccgctggtgaaccgtctgcaggacgcgttttcggcgctgggacagagctgcctgctggagctgccgcagatcgccgtggtgggcggccagagcgccggcaagagctcggtgctcgagaacttcgtgggcagggactttctccctcgagggtcgggcattgtaacaagacgacctcttgtgctgcagcttgttacttctaaagcagaatatgccgagtttctacattgcaaaggaaagaaatttacagattttgatgaagttcgccttgagattgaagcagaaacagatcgcgtgactggaatgaataaaggcatttcctccatacccattaatttacgagtctattccccacacgtgttaaatctaacccttattgatctacctggaataactaaagtgcctgtgggagatcagccaccagatatcgagtatcagatcagagaaatgattatgcagttcatcacgagggagaactgtctgattttagctgttactccagccaacactgatcttgcaaactcagatgcgctgaagctagctaaagaagttgatcctcaaggtctgagaaccattggagttatcaccaaactggaccttatggatgaaggaacggatgccagggatgttctagagaacaaactgttgcctcttcgcaggggttacgtgggggtggtaaacagaagccagaaggacatagatgggaagaaggacataaaggcagccatgctggcagagaggaagtttttcctttcccacccggcttacagacatatcgctgaccgaatgggaaccccacacctgcagaaggtccttaatcagcaacttaccaaccacattcgggataccctaccaaacttcaggaacaaactacagggacagttgctctccatagaacatgaagtagaagcctacaaaaatttcaaaccagaagacccaacaaggaagaccaaagcattgctgcagatggttcagcaatttgctgtggactttgagaagagaattgaagggtcaggggatcaagtagataccctggaactctcaggtggtgctaaaatcaatcgtatttttcatgaacgctttccttttgagatagtaaagatggagttcaatgagaaagaattgcgaagagaaataagctatgcaatcaaaaacatacatggtatcaggacagggttgtttactccagacatggcatttgaagcgatagtcaagaaacagattgtaaagttgaaagggccttccttgaagagtgtggatctggtaatacaagaattaatcaacactgtgaagaagtgtaccaaaaaactggcaaacttccccagactctgcgaggaaacggaaaggattgttgctaaccacattcgtgagcgagaagggaagacaaaggaccaggtattgctattgattgacattcaagtctcttacatcaacaccaaccatgaagacttcattggcttcgcaaatgctcagcagaggagcagtcaggttcacaagaaaaccacagttggaaatcagggaaccaatcttccgccttcaaggcaaattgtgattcgcaaggggtggctcaccatcagcaacattggcatcatgaaaggcggctcgaagggatactggttcgtccttactgcggaaagcttgtcctggtataaagatgatgaggaaaaagaaaagaagtacatgcttcccttggacaacctgaaagttcgggatgtggaaaagagctttatgtctagcaagcacatctttgcactctttaatacagagcaaaggaatgtatacaaagactatcgcttccttgagctggcatgtgattcccaggaggatgtcgacagctggaaggcatctctactaagagctggggtctatcctgacaaatctgtagctgaaaatgatgagaatggacaagcagaaaacttttccatggacccacaattggagaggcaagtggagaccattcgcaacctcgtagactcctacatgtccattatcaacaaatgtatccgagatctaattccaaaaacaataatgcaccttatgatcaataacgttaaagatttcataaattccgagctcctagcacagttgtattcttcagaggaccaaaataccctgatggaggaatctgctgagcaggctcagcgccgggatgagatgcttcgaatgtatcaagcactgaaagaagcccttgggataattggggacatcagcacagccaccgtgtccactccggcaccccctccagtggatgactcctggatacagcactctcgcaggtcacctcctccaagccccacaacccaaaggaggccaacactaagtgctcccctcgcaaggcccacatccggccgaggaccagctcctgccattccctctcctggcccccactctggggctcctccagtcccattccgtccaggcccattacctcctttccccagcagcagtgactccttcggagcccctccacaagttccatctaggcctacgagggccccgcccagtgtcccaagccggagaccacccccatcaccaactcgtcccactataatccgcccactagaatcctccctgttagactaaacgaagtgtctggcatggcaattaatcactaatgaattatgcgaaagcaacatatttgataaccgttgcagtaaatcatgagtagtcgcatgtgtggacatcagtaggcaagtaaccagttttactaatgcattcatcgctcatcttcattgctcatggtatgtcaaacctttggggtttgactcagaaactgctaaccttttagaggctttatatgttgtactgaccaaggtaggtttgtatagcagccctatactttggggatcatttgcctaccatggcatatatttgaaattgctttggacaagttttctaggctatctaccaggtagctcattaaacgtaattcttcagatatgagatagtgggcttagacctaagccatacatatttcttttcccacattctgtttaggatgacagtaattctgttgtctaccattaatgctactacctactccataattgcctatttagctcctcttttcttcctttttatttcataagactgcta

SEQ ID NO: 266321 - DNA, 2610 bp, Artificial Sequence
  derived and/or modified sequence
atgggcaatcgtgagatggaggagcttattccactagtgaatcggcttcaagacgccttctctgcactggggcagagctgtctgttggagctgccgcagatcgctgtggtcggtggacagagtgcagggaaatcgtctgtgctcgagaactttgtgggcagagatttcctccctcgtggctctgggatcgtgaccaggcgcccgctagttttgcagctagtgacttctaaagctgagtacgctgagtttctgcactgcaaaggcaaaaaatttacagatttcgatgaggtacgcctagagatcgaggccgagacagaccgtgtgaccggaatgaacaagggcatctcctcaatccccatcaacttaagggtctatagtcctcacgtccttaatctgactttgatcgatctccccggtattaccaaggtgcccgtgggagatcagccccctgatatcgaatatcagattcgcgagatgattatgcagtttatcacccgagaaaactgtctgattttggcggtcacaccagctaatacagacctcgccaactcagatgcattaaagctggccaaagaggtggaccctcaaggtttacgtacgatcggcgtgattacaaagttggatttgatggatgagggtacagatgccagagatgtcctggaaaacaagctgctgccattaagacgcggctacgttggcgtggtcaatcggagtcagaaggacatagatgggaagaaggatatcaaggcggctatgctggctgaacgtaaattctttctcagtcatccagcttatcgccacatcgcggacagaatggggaccccgcacttacagaaagtgcttaaccaacagctcacaaatcatattagagatacactgcccaatttccggaataagctacagggtcaactattgtctattgaacatgaggtggaagcctacaagaattttaaacctgaagatcccaccagaaaaactaaggcactccttcaaatggttcaacagtttgcggttgatttcgaaaaaaggattgagggctctggagatcaggtcgacacccttgagttgtcaggaggggccaaaatcaatagaatttttcatgagcggttcccattcgagatcgttaaaatggagttcaacgaaaaggaactgcgcagggaaatcagctacgccatcaaaaatatccatggcatccggactggcctgttcacccctgatatggccttcgaagcaattgtcaagaaacagatcgtaaagcttaagggacctagcttaaagagcgtcgatctcgtcatccaagagcttatcaacacagtgaagaagtgtacgaagaaattggctaacttcccaagattatgcgaggagaccgaaaggatagtggccaaccatatccgcgagcgcgaaggcaagacaaaagatcaagtgcttctgctgatagatattcaggtgagctacattaatacaaaccatgaagattttatcggatttgccaacgcccaacagagatcttcgcaggtacacaaaaagaccaccgtagggaaccagggcacgaacctgccaccctctaggcagatcgtaattcgaaaaggctggttgactattagcaacattggaatcatgaagggaggcagtaagggatactggttcgtcctgactgcggaatccctgtcatggtacaaggacgatgaggagaaggagaagaaatacatgctcccgctggacaacctgaaggtgagggacgtggagaagagcttcatgtccagtaaacacatcttcgcactgttcaatactgaacagaggaatgtctacaaagactatcggttcctggagctggcttgtgatagtcaggaggatgtcgactcttggaaggccagcctgctccgcgccggggtgtatcctgacaaatccgtggctgaaaatgacgaaaatggccaggccgaaaattttagcatggaccctcagctggagcgtcaagtggagacgatacgaaatctggtcgactcttacatgtccataatcaataagtgtattcgagacctgatcccaaagacaatcatgcacctgatgatcaacaacgtcaaagattttataaattccgagttgctcgctcaactctatagttctgaagaccagaatacactgatggaggagtctgcagagcaagcacagcggcgggatgagatgctacgcatgtatcaggccctaaaggaagcgctcgggattatcggagatatcagtaccgctacagtcagcacacctgccccaccccccgtggacgactcgtggattcagcacagcaggcgcagcccgcctccatcccctacaacacagcggagaccgacgctgtcggcccctctggcgcgccccacaagcggcagaggtcctgctccggcaattccaagcccaggtcctcactctggcgcccccccagtccccttcaggccagggcccttgcccccttttccttcgtcttcagattcatttggcgcgcctcctcaagtaccctcccggccaaccagggctccccctagcgtgccttctcgtaggccccccccgtcaccaactaggccgaccattattaggccacttgagtcaagcctgctggactag

SEQ ID NO: 266322 - DNA, 2610 bp, Artificial Sequence
  derived and/or modified sequence
atgggcaaccgggagatggaggagctgatccccctggtgaaccggctgcaggatgccttcagcgccctgggccagagctgcctgctggagctgccccagattgctgtggtgggcggccagagcgctgggaagagctctgtgctggagaactttgtgggccgggacttcctgccccggggcagcggcatcgtgacccggcggcccctggtgctgcagctggtgaccagcaaggccgagtatgcagagttcctgcactgcaagggcaagaagttcacagactttgatgaggtgcggctggagattgaagctgagacagacagagtgacaggcatgaacaagggcatcagcagcatccccatcaacctgcgggtgtacagcccccacgtgctgaacctgaccctgattgacctgcccggcatcaccaaggtgcctgtgggggaccagcccccagacatcgagtaccagatccgggagatgatcatgcagttcatcacccgggagaactgcctgatcctggccgtgaccccagccaacacagacctggccaacagtgatgccctgaagctggccaaggaggtggacccccagggcctgcggaccatcggggtcatcaccaagctggacctgatggatgagggcacagatgccagagatgtgctggagaacaagctgctgcccctgcggcggggctacgtgggcgtggtgaacagaagccagaaggacattgatggcaagaaggacatcaaggccgccatgctggccgagaggaagttcttcctgagccacccagcctaccgccacatcgctgacaggatgggcaccccccacctgcagaaggtgctgaaccagcagctgaccaaccacatccgggacaccctgcccaacttcaggaacaagctgcagggccagctgctgagcattgaacatgaggtggaggcctacaagaacttcaagccagaggaccccaccaggaagaccaaggccctgctgcagatggtgcagcagtttgctgtggactttgagaagagaattgagggcagcggggaccaggtggacaccctggagctgtctggaggagccaagatcaaccgcatcttccacgagcgcttcccctttgagatcgtgaagatggagttcaatgagaaggagctgcggcgggagatctcctatgccatcaagaacatccacggcatcagaacaggcctcttcaccccagacatggcctttgaggccatcgtgaagaagcagatcgtgaagctgaagggccccagcctgaagtctgtggacctggtgatccaggagctgatcaacacagtgaagaagtgcaccaagaagctggccaacttcccccggctgtgtgaggagacagaaagaattgtggccaaccacatccgggagcgggagggcaagaccaaggaccaggtgctgctgctgattgacatccaggtgtcctacatcaacaccaaccacgaggacttcatcggctttgccaatgcccagcagaggagcagccaggtgcacaagaagaccaccgtgggcaaccagggcaccaacctgccccccagccggcagatcgtcatcaggaagggctggctgaccatcagcaacatcggcatcatgaagggcggcagcaagggctactggtttgtgctgacagctgagagcctgtcctggtacaaggatgatgaggagaaggagaagaagtacatgctgcccctggacaacctgaaggtgagagatgtggagaagagcttcatgagcagcaagcacatctttgccctcttcaacacagagcagagaaatgtgtacaaggactaccgcttcctggagctggcctgtgacagccaggaggatgtggacagctggaaggccagcctgctgcgggccggcgtgtacccagacaagtctgtggctgaaaatgatgaaaatggccaggccgagaacttctccatggacccccagctggagcggcaggtggagaccatccggaacctggtggacagctacatgagcatcatcaacaagtgcatccgggacctgatccccaagaccatcatgcacctgatgatcaacaacgtgaaggacttcatcaacagcgagctgctggcccagctgtacagcagcgaggaccagaacaccctgatggaggagagcgctgagcaggcccagaggagagatgagatgctgaggatgtaccaggccctgaaggaggccctgggcatcatcggggacatcagcacagccaccgtgtccaccccagcccctcctcctgtggatgacagctggatccagcacagcagaagaagccccccacccagccccaccacccagaggcggcccaccctgagcgcccccctggcccggcccaccagcggccggggccctgccccagccatccccagccctggcccccacagcggggcccctcctgtgcccttccggcccggccccctgccccccttccccagcagcagtgacagctttggagccccaccccaggtgcccagccggcccacccgggccccacccagcgtgcccagccggcggcccccacccagccccacccggcccaccatcatccggcccctggagagcagcctgctggactag

SEQ ID NO: 266323 - DNA, 2610 bp, Artificial Sequence
  derived and/or modified sequence
atgggcaaccgggagatggaggagctgatccccctggtgaaccggctgcaggatgccttcagcgccctcggacaaagctgtctcctggaattaccccaaatcgccgtcgtgggcggccaatccgcggggaagtcttccgttctggaaaattttgtcggccgcgattttttgccacgtggttctggaatcgtcacacgtaggcccctggtgctgcaactggtaacttctaaggcggaatacgccgagtttctgcattgcaagggtaagaagtttacggatttcgacgaagtgcggctggagattgaggcggagactgatcgagtgacaggcatgaataaaggaatctcctccattcccattaacttgagggtgtacagccctcatgtgctgaacctaactctgattgaccttccaggaatcacaaaggtccctgtgggcgaccagccgcccgatattgaatatcaaatcagggaaatgattatgcagtttatcacaagggagaattgccttatcttggcagttactcccgccaacactgatctggcaaatagcgatgcccttaagttggccaaggaggtggacccccaaggactaaggacaataggcgtgattactaagttggatttaatggatgagggcaccgatgcacgggacgtgctggagaacaaactcctgccactgagaagggggtatgtgggagtagtgaataggtctcagaaagacatcgacggcaagaaggatatcaaggctgcgatgctggctgagagaaagttcttcctgtcccaccccgcatataggcatatcgccgatcgcatgggcacgccccacctccagaaggtgcttaaccagcagctcacaaatcatatccgtgacacgcttcccaatttcagaaataaacttcagggccagctgctttccatcgaacatgaagtagaagcatacaaaaattttaagccagaggatccaactagaaagacaaaggctctcctgcaaatggtgcagcagttcgcagtagacttcgagaagaggattgagggatccggagaccaagtggatacactggaactgagcggaggcgctaaaatcaatcgtattttccacgaaaggttcccttttgaaatcgtgaagatggagttcaatgagaaggagctgagacgcgagattagctacgccattaaaaacatacacgggattcgaactggcctcttcaccccagatatggcctttgaagctatcgtcaagaagcagatcgtaaagcttaaaggcccttctctgaaaagtgtcgatctggtgatccaggagctgatcaacacggtcaaaaagtgtactaagaaattggcgaatttcccaaggttgtgcgaggagactgagaggattgtcgctaatcatattcgcgagcgcgaaggcaagaccaaggatcaggtactgttgctgatcgatatccaagtttcctatattaacacgaatcacgaggacttcatcggatttgcgaatgctcagcaaagatcctcccaggttcacaaaaagacgactgtggggaatcagggtaccaacctgcctccttcacgccagattgtaatacggaagggctggctaacgattagcaacattggcatcatgaaaggtggctcgaagggctattggttcgtcctgacagccgagagtttatcgtggtacaaggacgatgaagagaaggaaaagaagtacatgctacctcttgataacctgaaagtcagggacgtcgagaagtcctttatgtcaagtaagcacatctttgctctctttaatacagagcagcgcaacgtgtacaaagattatcgattcctggaactcgcatgcgatagtcaggaagacgtggacagctggaaggcaagccttctccgggccggagtataccctgacaaaagcgttgccgagaacgacgagaacgggcaggctgaaaacttcagcatggaccctcagctggagcgacaggtggagaccatacgcaacctggtcgacagttatatgtctattataaataagtgcattcgggacctgattccaaaaaccatcatgcatctcatgattaacaatgtgaaggacttcatcaacagcgagctgctggctcagctatactccagcgaggaccaaaatacccttatggaggaaagcgctgagcaggcccagagacgtgacgagatgctgaggatgtatcaggcactgaaagaagcacttgggattataggagacatatcaaccgcaaccgtaagtacccccgcccctccccccgttgacgactcttggatacagcactcaagacggtcaccacccccaagcccaacaacacagcgcagaccgacgctctcggccccactggccagacccaccagcggtaggggacccgcccccgccataccttctccgggaccccacagtggcgcccctccagtgcctttcagacctgggcctttgccgccatttccatcatccagtgatagcttcggcgcaccaccacaggtacctagtcgtcctacaagagccccaccttccgtgcctagcaggaggcctccacctagtcccacccggcccactatcattaggccacttgagagctccctcctggattag

SEQ ID NO: 266324 - DNA, 2610 bp, Artificial Sequence
  derived and/or modified sequence
atggggaacagggagatggaagagttaatcccacttgtgaataggctccaggatgcattctcggccctgggacagtcgtgcctgctggagctgccccagatcgccgtagtgggcggtcagagcgctggaaaatcttctgtcctggagaattttgtcggaagagacttcctgccacgtggatctggcattgtaacgcgtcgacctctcgtgctgcagctcgtgacctctaaggccgagtacgcagagttcctgcactgcaagggcaagaaattcactgactttgacgaagttagattggagatcgaagcagagacagatagagtcaccggcatgaacaagggcattagttctattcctattaatcttagagtgtattctccgcacgttctcaacttaactttgatcgaccttccaggcatcaccaaggtgccggtcggagaccaacctccagacatagaataccagattagagagatgatcatgcaatttattaccagagagaactgtctgatccttgctgtgactccagcaaataccgacctggctaattccgacgcactgaagctcgcaaaagaggtggacccacagggcttgcggaccataggggttataaccaaactggatcttatggacgaggggaccgacgccagagatgtgctggagaataaacttctgccactccgccgaggctatgttggagttgtcaaccggtcccagaaggacatagacgggaagaaggacatcaaggccgcaatgctggcggaaagaaaattcttcctctcgcacccagcctaccgacacatcgccgatcgtatgggcacacctcatctgcagaaagttctgaatcagcagctgacaaatcatatccgcgatacactccctaactttaggaataagctgcaggggcaattgctatcaatagaacatgaagttgaggcatacaaaaattttaagcccgaagatcctacaagaaaaacaaaggccctgcttcagatggttcaacagtttgctgttgacttcgaaaaaagaatcgagggtagtggggaccaagtggatacattggaactgtccgggggagctaagattaatcgaatttttcacgaacgattcccatttgagatcgtgaagatggaattcaacgaaaaagagctccgtagggagattagctacgctatcaaaaacatacacggtatccggactggcctatttaccccggatatggccttcgaggctattgttaagaaacagatagtgaaactcaaaggtccatccctgaagtctgtcgacctggtgattcaagagctgatcaatactgtgaagaagtgcacgaaaaaactggctaactttccccgtttatgtgaggagactgaacgcattgtagcaaaccatatcagagaacgggaaggaaaaaccaaggatcaggtacttctcctcatcgatatacaggtgtcatatatcaacaccaatcatgaggactttattgggtttgcaaacgcccagcagcgctccagccaggttcataagaaaaccacggtagggaaccaaggaaccaatctgcctcctagtcgtcagatagtcattcgcaaagggtggctgacgatcagcaacattggaatcatgaaggggggaagtaagggctactggttcgtgctaactgccgaaagcctgtcatggtataaggatgatgaagagaaggaaaaaaaatacatgctgcctctagacaaccttaaagtgcgcgatgttgaaaaatcctttatgtcaagcaagcacatttttgcactgtttaatactgagcaaaggaatgtctacaaggactatcgcttcttagagctggcgtgcgattcccaggaggacgtcgactcatggaaagcatcccttttgcgggcaggggtctaccccgacaaatcggtggcagagaatgatgaaaatggtcaagccgaaaatttctcaatggatccacagctggagcgccaggtggagacaattcgcaatctggtggattcttatatgtccattataaacaagtgcatcagggatctgattcccaaaaccatcatgcatttgatgatcaataatgtaaaagactttatcaattcggagttgctggctcagttgtactcctcggaggaccagaacacactgatggaggagagcgccgaacaggctcaacgccgtgatgagatgcttcggatgtaccaggcgcttaaagaagcactgggcattatcggcgacatctcaactgctacagtgtccaccccggctccacctccggttgacgattcatggatccagcactcgcggaggtcgcctcccccatcccctacaacacaacgcaggcccacccttagtgctcctctggccagaccgacgtccggaagaggtccagctccagctataccctcgccaggaccgcacagtggcgcaccaccggtacccttcaggcctggccctcttcctcccttcccttcttcatccgactcattcggcgcaccaccccaggttccctcacggcctacaagagccccaccttccgttccgagccgtagaccccctccttcccctaccaggcctaccataatccggccacttgagtcatctctgctcgactag

SEQ ID NO: 266325 - protein, 1146 aa, Artificial Sequence
  derived and/or modified sequence
MVLGTVLLPPNSYGRDQDTSLCCLCTEASESALPDLTEALHRPYGCDVEPQALNEAIRWSSKENLLGATESDPNLFVALYDFVASGDNTLSITKGEKLRVLGYNQNGEWSEVRSKNGQGWVPSNYITPVNSLEKHSWYHGPVSRSAAEYLLSSLINGSFLVRESESSPGQLSISLRYEGRVYHYRINTTADGKVYVTAESRFSTLAELVHHHSTVADGLVTTLHYPAPKCNKPTVYGVSPIHDKWEMERTDITMKHKLGGGQYGEVYVGVWKKYSLTVAVKTLKEDTMEVEEFLKEAAVMKEIKHPNLVQLLGVCTLEPPFYIVTEYMPYGNLLDYLRECNREEVTAVVLLYMATQISSAMEYLEKKNFIHRDLAARNCLVGENHVVKVADFGLSRLMTGDTYTAHAGAKFPIKWTAPESLAYNTFSIKSDVWAFGVLLWEIATYGMSPYPGIDLSQVYDLLEKGYRMEQPEGCPPKVYELMRACWKWSPADRPSFAETHQAFETMFHDSSISEEVAEELGRAASSSSVVPYLPRLPILPSKTRTLKKQVENKENIEGAQDATENSASSLAPGFIRGAQASSGSPALPRKQRDKSPSSLLEDAKETCFTRDRKGGFFSSFMKKRNAPTPPKRSSSFREMENQPHKKYELTGNFSSVASLQHADGFSFTPAQQEANLVPPKCYGGSFAQRNLCNDDGGGGGGSGTAGGGWSGITGFFTPRLIKKTLGLRAGKPTASDDTSKPFPRSNSTSSMSSGLPEQDRMAMTLPRNCQRSKLQLERTVSTSSQPEENVDRANDMLPKKSEESAAPSRERPKAKLLPRGATALPLRTPSGDLAITEKDPPGVGVAGVAAAPKGKEKNGGARLGMAGVPEDGEQPGWPSPAKAAPVLPTTHNHKVPVLISPTLKHTPADVQLIGTDSQGNKFKLLSEHQVTSSGDKDRPRRVKPKCAPPPPPVMRLLQHPSICSDPTEEPTALTAGQSTSETQEGGKKAALGAVPISGKAGRPVMPPPQVPLPTSSISPAKMANGTAGTKVALRKTKQAAEKISADKISKEALLECADLLSSALTEPVPNSQLVDTGHQLLDYCSGYVDCIPQTRNKFAFREAVSKLELSLQELQVSSAAAGVPGTNPVLNNLLSCVQEISDVVQR

SEQ ID NO: 266326 - DNA, 3441 bp, Artificial Sequence
  derived and/or modified sequence
atggtgctgggcaccgtgctgctgccccccaacagctacggcagagaccaggacaccagcctgtgctgcctgtgcaccgaggccagcgagagcgccctgcccgacctgaccgaggccctgcacagaccctacggctgcgacgtggagccccaggccctgaacgaggccatcagatggagcagcaaggagaacctgctgggcgccaccgagagcgaccccaacctgttcgtggccctgtacgacttcgtggccagcggcgacaacaccctgagcatcaccaagggcgagaagctgagagtgctgggctacaaccagaacggcgagtggagcgaggtgagaagcaagaacggccagggctgggtgcccagcaactacatcacccccgtgaacagcctggagaagcacagctggtaccacggccccgtgagcagaagcgccgccgagtacctgctgagcagcctgatcaacggcagcttcctggtgagagagagcgagagcagccccggccagctgagcatcagcctgagatacgagggcagagtgtaccactacagaatcaacaccaccgccgacggcaaggtgtacgtgaccgccgagagcagattcagcaccctggccgagctggtgcaccaccacagcaccgtggccgacggcctggtgaccaccctgcactaccccgcccccaagtgcaacaagcccaccgtgtacggcgtgagccccatccacgacaagtgggagatggagagaaccgacatcaccatgaagcacaagctgggcggcggccagtacggcgaggtgtacgtgggcgtgtggaagaagtacagcctgaccgtggccgtgaagaccctgaaggaggacaccatggaggtggaggagttcctgaaggaggccgccgtgatgaaggagatcaagcaccccaacctggtgcagctgctgggcgtgtgcaccctggagccccccttctacatcgtgaccgagtacatgccctacggcaacctgctggactacctgagagagtgcaacagagaggaggtgaccgccgtggtgctgctgtacatggccacccagatcagcagcgccatggagtacctggagaagaagaacttcatccacagagacctggccgccagaaactgcctggtgggcgagaaccacgtggtgaaggtggccgacttcggcctgagcagactgatgaccggcgacacctacaccgcccacgccggcgccaagttccccatcaagtggaccgcccccgagagcctggcctacaacaccttcagcatcaagagcgacgtgtgggccttcggcgtgctgctgtgggagatcgccacctacggcatgagcccctaccccggcatcgacctgagccaggtgtacgacctgctggagaagggctacagaatggagcagcccgagggctgcccccccaaggtgtacgagctgatgagagcctgctggaagtggagccccgccgacagacccagcttcgccgagacccaccaggccttcgagaccatgttccacgacagcagcatcagcgaggaggtggccgaggagctgggcagagccgccagcagcagcagcgtggtgccctacctgcccagactgcccatcctgcccagcaagaccagaaccctgaagaagcaggtggagaacaaggagaacatcgagggcgcccaggacgccaccgagaacagcgccagcagcctggcccccggcttcatcagaggcgcccaggccagcagcggcagccccgccctgcccagaaagcagagagacaagagccccagcagcctgctggaggacgccaaggagacctgcttcaccagagacagaaagggcggcttcttcagcagcttcatgaagaagagaaacgcccccaccccccccaagagaagcagcagcttcagagagatggagaaccagccccacaagaagtacgagctgaccggcaacttcagcagcgtggccagcctgcagcacgccgacggcttcagcttcacccccgcccagcaggaggccaacctggtgccccccaagtgctacggcggcagcttcgcccagagaaacctgtgcaacgacgacggcggcggcggcggcggcagcggcaccgccggcggcggctggagcggcatcaccggcttcttcacccccagactgatcaagaagaccctgggcctgagagccggcaagcccaccgccagcgacgacaccagcaagcccttccccagaagcaacagcaccagcagcatgagcagcggcctgcccgagcaggacagaatggccatgaccctgcccagaaactgccagagaagcaagctgcagctggagagaaccgtgagcaccagcagccagcccgaggagaacgtggacagagccaacgacatgctgcccaagaagagcgaggagagcgccgcccccagcagagagagacccaaggccaagctgctgcccagaggcgccaccgccctgcccctgagaacccccagcggcgacctggccatcaccgagaaggacccccccggcgtgggcgtggccggcgtggccgccgcccccaagggcaaggagaagaacggcggcgccagactgggcatggccggcgtgcccgaggacggcgagcagcccggctggcccagccccgccaaggccgcccccgtgctgcccaccacccacaaccacaaggtgcccgtgctgatcagccccaccctgaagcacacccccgccgacgtgcagctgatcggcaccgacagccagggcaacaagttcaagctgctgagcgagcaccaggtgaccagcagcggcgacaaggacagacccagaagagtgaagcccaagtgcgcccccccccccccccccgtgatgagactgctgcagcaccccagcatctgcagcgaccccaccgaggagcccaccgccctgaccgccggccagagcaccagcgagacccaggagggcggcaagaaggccgccctgggcgccgtgcccatcagcggcaaggccggcagacccgtgatgccccccccccaggtgcccctgcccaccagcagcatcagccccgccaagatggccaacggcaccgccggcaccaaggtggccctgagaaagaccaagcaggccgccgagaagatcagcgccgacaagatcagcaaggaggccctgctggagtgcgccgacctgctgagcagcgccctgaccgagcccgtgcccaacagccagctggtggacaccggccaccagctgctggactactgcagcggctacgtggactgcatcccccagaccagaaacaagttcgccttcagagaggccgtgagcaagctggagctgagcctgcaggagctgcaggtgagcagcgccgccgccggcgtgcccggcaccaaccccgtgctgaacaacctgctgagctgcgtgcaggagatcagcgacgtggtgcagagatag

SEQ ID NO: 266327 - DNA, 3441 bp, Artificial Sequence
  derived and/or modified sequence
atggtgttgggcaccgttttgttgccaccaaactcatacggcagagatcaagacactagcctgtgctgcctgtgcacggaagcttccgaatctgcactgcccgacctgacagaagctctgcaccgaccctacggctgcgatgtggagccccaggcactgaacgaggccattagatggtctagtaaggagaatttgctgggggcaaccgaatcggatccaaacctgtttgtcgcattatacgatttcgtggccagcggggacaatactctgagcattactaagggcgagaagctcagagtattgggctataatcaaaatggtgaatggagtgaagtccggagtaagaatggacaggggtgggtgccatctaattatattactcctgtgaacagcctagagaagcactcttggtaccacggccctgtgtcgcgtagcgccgccgagtatctgctgagcagcctcatcaacggttccttcctcgtgcgcgaatctgagtcgtctcccgggcagttaagcatctcgcttcgctatgagggccgggtctaccattaccgcataaacactacggcggacggcaaagtctatgtgacagccgagtcccggttcagtaccctagccgagctggtgcaccaccacagcaccgtggccgacgggctcgtgacaacgttgcattaccctgcccccaaatgcaataagcctacagtctacggggtttctccgatccacgataaatgggagatggaaagaacagacattaccatgaagcataaacttggagggggacagtatggagaagtatacgtcggagtttggaaaaagtactcactgacggtggccgttaaaaccttgaaagaagacaccatggaggttgaggagttcctcaaggaggcggccgtcatgaaagagataaaacatcccaatctggtccagctgctgggagtttgcacgctcgaaccccctttctacatagttacagagtatatgccatacggaaatctgttagactacctgcgcgaatgcaacagggaggaagttaccgccgtcgtcctcctgtatatggccacccaaatatcaagcgcaatggagtatttggaaaaaaagaacttcatccatagagatctagcagcacggaactgtctagtgggcgagaaccatgtggttaaagttgccgactttggcctctcccggcttatgaccggggacacatatacagctcatgccggcgccaagtttcccatcaagtggaccgctcccgaatccttggcatacaacacattctcaatcaagagtgatgtctgggcattcggagtgctgttgtgggagatcgcgacgtacggcatgtcaccctacccaggtatcgacctgtctcaggtatacgatctcctggagaaggggtacaggatggagcagccagagggctgcccacccaaagtttacgaactgatgagagcctgttggaaatggagtcctgccgacaggcctagcttcgctgaaactcaccaggcctttgaaaccatgttccatgattcgtccatcagtgaagaggtggccgaggagttgggccgagcagccagctccagctccgtggtcccatatctcccacgcctgcccatactgccaagcaagacacgcaccctgaaaaagcaagtcgaaaacaaggaaaatatcgaaggtgcccaggatgccaccgaaaatagcgctagtagcttggcacccggctttattcgtggggcgcaggcatctagcggctctcccgccctgcctagaaagcagcgtgacaagtctccctctagcctgttggaagacgcaaaagaaacctgctttacaagagatcgaaaaggcggttttttcagctcattcatgaagaaacgaaacgcccccaccccaccaaagcggagttcatcatttcgcgagatggaaaaccaaccacataaaaaatatgagctgactgggaacttcagctctgttgcatctctacaacacgctgatggttttagttttacccctgcccagcaggaggcgaaccttgtcccccctaagtgctatggaggctccttcgctcaaagaaatctatgcaacgacgacgggggcgggggcggtggtagcggaactgctggcgggggatggagcggaatcactggctttttcacacctcgtctgataaagaaaacacttgggctgagagcagggaagcccactgcgtccgatgatacatccaagccatttcctagatcaaacagtacatcttcgatgagtagtggacttcctgagcaggaccgaatggccatgaccctgccgcgcaactgccagagaagtaagctgcaactagaaaggacagtcagcacatcctctcagcccgaagagaacgtggatagagccaacgatatgctcccaaagaagtccgaagaaagtgccgcaccctctcgggagcggcctaaagcaaaacttcttccaaggggcgcaacggctctgccattgaggactccatctggggacctggctattactgaaaaggacccgcctggggtgggcgtggctggcgtggctgccgcgccaaaggggaaagagaaaaacggcggggcaagactgggcatggctggagtgcctgaggacggagagcaacccgggtggccttctcctgccaaagccgcccctgtgttgccaacgacccacaaccataaggtacctgttctgatctccccaacgcttaaacatactccagctgatgtccagttaatcgggactgacagccagggaaataaattcaaactgctgagcgagcaccaggtgacatcatctggggacaaagatagaccacggcgggtaaagcctaagtgtgcaccaccccctccacctgtaatgagactgttacaacatccatcgatctgttccgatcccacagaagagccaacagccctgacagctggccagtccacttccgagacacaggagggggggaaaaaggctgcactcggtgccgtccctatcagtggtaaagcaggacggcctgtgatgccacccccacaggtccctcttcccacatcttcaatttcccctgctaagatggccaatggcaccgccggtaccaaggtggctctgcgaaaaaccaagcaagccgcagaaaagatctcggccgacaaaatcagcaaggaagccctgttggaatgtgccgacctgttgagctcagctttgacggagccagttcccaattcccaattggtggacaccggccaccagttgctggactattgctcgggatatgtggactgtatcccacagacaagaaacaaattcgcctttcgagaggctgtgtccaaactcgagttatccctgcaggaactgcaggtgagcagtgccgccgccggcgtgccaggaaccaatccggtgttgaacaacctactgtcctgcgtccaggagatcagtgatgttgtgcagagatag

SEQ ID NO: 266328 - DNA, 3441 bp, Artificial Sequence
  derived and/or modified sequence
atggtgctgggcaccgtgctgctgccccccaacagctatggccgggaccaggacaccagcctgtgctgcctgtgcacagaggccagcgagagcgccctgcctgacctgacagaggccctgcaccggccctacggctgtgatgtggagccccaggccctgaatgaggccatccgctggagcagcaaagaaaacctgctgggcgccacagaaagtgaccccaacctgtttgtggccctgtatgactttgtggccagcggggacaacaccctgagcatcaccaagggggagaagctgcgggtgctgggctacaaccagaatggagagtggagcgaggtgcgcagcaagaatggccagggctgggtgcccagcaactacatcacccctgtgaacagcctggagaagcacagctggtaccacggccctgtgagccgctctgctgctgagtacctgctgagcagcctcatcaatggcagcttcctggtgcgggagagcgagagcagccctggccagctgagcatcagcctgcgctatgagggccgggtgtaccactaccgcatcaacaccacagcagatggcaaggtgtatgtgacagctgagagccgcttcagcaccctggccgagctggtgcaccaccacagcacagtggctgatggcctggtgaccaccctgcactacccagcccccaagtgcaacaagcccaccgtgtatggagtgagccccatccatgacaagtgggagatggagaggacagacatcaccatgaagcacaagctgggcggcggccagtatggagaggtgtatgtgggcgtgtggaagaagtacagcctgactgtggccgtgaagaccctgaaggaggacaccatggaggtggaggagttcctgaaggaggccgctgtgatgaaggagatcaagcaccccaacctggtgcagctgctgggcgtgtgcaccctggagccccccttctacatcgtgacagagtacatgccctacggcaacctgctggactacctgcgggagtgcaaccgggaggaggtgacagctgtggtgctgctgtacatggccacccagatcagcagcgccatggagtacctggagaagaagaacttcatccaccgggacctggccgccaggaactgcctggtgggagaaaatcatgtggtgaaggtggccgactttggcctgagccggctgatgactggagacacctacacagcccatgctggggccaagttccccatcaagtggacagcccctgagagcctggcctacaacaccttcagcatcaagagtgatgtgtgggcctttggagtgctgctgtgggagatcgccacctacggcatgagcccctacccaggcatcgacctgagccaggtgtatgacctgctggagaagggctacaggatggagcagcctgagggctgcccccccaaggtgtatgagctgatgagggcctgctggaagtggagccctgctgaccggcccagctttgctgagacccaccaggcctttgagaccatgtttcatgacagcagcatcagcgaggaggtggccgaggagctgggccgggccgccagcagcagctctgtggtgccctacctgccccggctgcccatcctgcccagcaagaccaggaccctgaagaagcaggtggagaacaaggagaacatcgagggcgcccaggatgccacagagaacagcgccagcagcctggcccctggcttcatccggggggcccaggccagcagcggcagccctgccctgcccaggaagcagagggacaagagccccagcagcctgctggaggatgccaaggagacctgcttcacccgggacagaaaaggaggcttcttcagcagcttcatgaagaagagaaatgcccccaccccacccaagaggagcagcagcttccgggagatggagaaccagccccacaagaagtatgagctgaccggcaacttcagctctgtggccagcctgcagcacgcagatggcttctccttcaccccagcccagcaggaggccaacctggtgccccccaagtgctacggcggcagctttgcccagaggaacctgtgcaatgatgatggcggcggcggcggcggcagcggcacagctgggggcggctggagcggcatcaccggcttcttcacccccaggctcatcaagaagaccctgggcctgcgggccggcaagcccacagccagtgatgacaccagcaagcccttccccaggagcaacagcaccagctccatgagcagcggcctgcctgagcaggacaggatggccatgaccctgcccaggaactgccagaggagcaagctgcagctggagaggacagtgtccaccagcagccagcctgaggagaatgtggaccgggccaatgacatgctgcccaagaagtctgaggagagcgctgcccccagccgggagcggcccaaggccaagctgctgcccaggggggccacagccctgcccctgcggacccccagcggggacctggccatcacagagaaggaccccccaggagtgggcgtggccggcgtggccgccgcccccaagggcaaggagaagaatggaggagcccggctgggcatggccggcgtgcctgaagatggagagcagcccggctggcccagccctgccaaggccgcccctgtgctgcccaccacccacaaccacaaggtgcctgtgctgatcagccccaccctgaagcacaccccagcagatgtgcagctgattggaacagacagccagggcaacaagttcaagctgctgtctgagcaccaggtgaccagcagcggggacaaggaccggccccggcgggtgaagcccaagtgtgcccctcctcctcctcctgtgatgaggctgctgcagcaccccagcatctgcagcgaccccacagaggagcccacagccctgacagctggccagagcaccagcgagacccaggagggcggcaagaaggccgccctgggcgctgtgcccatcagcggcaaggccggccggcctgtgatgcccccaccccaggtgcccctgcccaccagcagcatcagccctgccaagatggccaacggcacagctggcaccaaggtggccctgaggaagaccaagcaggccgctgagaagatctctgctgacaagatcagcaaggaggccctgctggagtgtgccgacctgctgagcagcgccctgacagagcctgtgcccaacagccagctggtggacaccggccaccagctgctggactactgcagcggctacgtggactgcatcccccagaccaggaacaagtttgccttccgggaggccgtgtccaagctggagctgagcctgcaggagctgcaggtgagcagcgctgctgctggggtgcccggcaccaaccctgtgctgaacaacctgctgagctgtgtgcaggagatcagtgatgtggtgcagaggtag

SEQ ID NO: 266329 - DNA, 3441 bp, Artificial Sequence
  derived and/or modified sequence
atggtgctgggcaccgtgctgctgccccccaacagctacggccgggaccaggacacaagcctgtgctgtctctgcactgaagcatccgagtccgctctgccggatttaactgaagccttgcacaggccctatggctgtgacgtagagcctcaggccctgaacgaggccattagatggtcgtcaaaggagaacttactgggggccacggagagcgatcccaacctgtttgtcgccctttatgactttgtagcaagtggcgataacacgttgtcaattacgaagggggagaaactcagagtcctgggatacaaccagaacggggagtggtccgaggttagaagcaagaacggtcaggggtgggtgccctccaactacatcacacccgtgaactctctagagaaacacagctggtatcacggccctgtgagcagatccgccgctgagtacctgctttctagcctgattaatggaagcttcctagttcgagaatccgaaagctcccctggacagctttcaatcagcctccgctatgagggtcgggtctaccactacagaatcaataccacagccgacggtaaggtgtacgtcaccgccgagagtaggttcagcacattagctgagctcgtgcatcatcactcaaccgtggctgacggcctggtgaccacactgcactacccagcacctaagtgtaataagcccacagtatacggtgtctccccgatccacgacaaatgggaaatggagaggaccgacattactatgaagcataaattgggcggaggacaatacggggaggtgtacgtgggggtgtggaaaaaatattcccttacagtggcagttaaaactctaaaagaagacacaatggaggtcgaagaatttctcaaagaagccgctgtcatgaaggagattaagcatccaaaccttgtccaacttttaggggtctgcaccctcgagcctcctttttacattgtaacagagtacatgccctatgggaacttattagattatctgcgtgagtgcaaccgcgaggaagtgactgctgtcgtgttactgtatatggcgacccaaatctcaagcgcaatggagtacctcgaaaagaagaattttatccatcgggatctggcagccagaaactgtctagtgggcgaaaatcacgtagtgaaggtggccgatttcggcttatcacgcctcatgactggagatacgtacaccgcccacgcgggagcaaagtttcctatcaaatggacagcccctgaaagtctggcctacaacaccttctccatcaaatctgacgtctgggccttcggggtgctgctgtgggagatagcaacctacggaatgtccccctatcctgggattgatttgtcccaggtgtacgatctgttagagaaggggtaccggatggaacagccagaggggtgtccgccaaaagtctacgagcttatgagagcgtgttggaagtggtcccccgcagatcggccatcgttcgctgaaactcatcaagcatttgagactatgtttcacgactcaagtatctcggaggaagtggctgaagaactggggcgcgctgcttcctcaagcagcgtcgttccttatctgcctagactgccaattctgccctctaagactcgcaccctaaagaaacaggttgagaataaagaaaacatagaaggcgcgcaggatgccaccgagaactcagcgagttccctggcccccggattcattagaggggctcaggcctcctcaggttctcccgccttacctcgcaaacagagagataaaagccccagtagcctgctcgaggacgccaaggaaacctgctttacccgggatcgtaaaggtgggttttttagcagcttcatgaaaaagcgcaacgccccaactccaccgaagcgttcaagctcttttcgtgaaatggagaaccagccacacaagaagtatgagttgactggtaacttcagctctgtcgcctccctccagcacgctgacggcttctcattcactcccgcacagcaggaggccaacctggtccccccgaaatgttatggaggcagtttcgcccagaggaacctgtgtaacgatgacgggggcgggggagggggatcaggcaccgccggcggcggatggtcagggatcacgggattctttaccccacgtttgatcaaaaaaaccctggggctgagggcaggcaagcctacagcatctgacgatacctccaagccctttcctcgaagcaactccacctctagcatgagctctggtctgcctgaacaagataggatggccatgactcttcctaggaattgtcagcggagcaaacttcaactggagcgcacagtcagcacgtcctcacagcctgaggaaaatgttgaccgagccaatgatatgctcccaaaaaaatccgaagaaagcgccgcaccctcccgggagcgccctaaagccaaattgttgccacgcggggctaccgctctgcccctgaggacccccagcggggatctggcgattactgaaaaggacccacccggtgtcggagtggcaggagtggccgccgcacccaaggggaaggagaagaacggaggggcccggttaggaatggccggtgtcccagaagatggtgagcagcctggttggccaagcccggcaaaggctgcccccgtgctccctacaacccacaaccacaaggtgccagttttaatttctcccacattaaagcatactcccgcagatgtgcaactgatcggtactgactctcagggcaacaaattcaagttactttccgagcatcaggtgacgtccagcggcgacaaagatcgccccagaagagtgaagccgaaatgcgcacctcctccacctcccgtaatgcgtctgctccaacaccccagcatctgttcggatccaacagaagagcccaccgcactcactgccggacagtccacgtcagaaacacaggagggcggcaaaaaagcagcacttggagccgtacccatctccgggaaagccggccgacctgtcatgcctcctccccaggtgccactgcctacatcctctatcagcccggcaaaaatggctaacggaacagcgggcactaaagttgctctgaggaaaactaagcaggccgccgagaagattagtgcagataaaatcagtaaagaggcattgctggaatgcgcagacttgctaagtagtgctctcactgagccagttcctaattcccaactggttgacacaggtcatcagctcttggactattgtagtggttacgtggactgcattccgcaaactcggaacaagtttgctttcagagaggcagtaagcaaactggaactaagtttgcaggaattgcaggtgtcatcagctgctgccggggttcccggaactaatcctgtgctgaataacctgctgagctgtgtccaagaaatctccgacgtggtgcagcgctag

SEQ ID NO: 266330 - DNA, 3441 bp, Artificial Sequence
  derived and/or modified sequence
atggtactggggacagtcctcttacctcccaatagctatgggagagaccaagacacttcactgtgctgcttgtgtacggaggccagcgaatctgcactgccagacctgactgaggcactccaccgaccgtatgggtgtgatgtcgagccgcaggccctgaacgaggcaatacggtggtcatcgaaagagaacctcttaggggctactgagtctgacccaaacctcttcgtcgccctgtacgacttcgtggccagtggggacaacactctcagcatcacgaaaggggagaaactccgcgtactgggctataaccaaaacggagaatggagcgaagtccggtctaagaacggacaggggtgggttccttcgaattacatcacccccgtgaactcgctggagaagcattcctggtaccacggacccgtgtcacgaagcgccgcagagtatcttctgagttcgctcattaatgggagctttctggtgagggaatcagagtcctccccgggtcaactgtcaatctcactgcgctatgaaggacgcgtttaccattaccgaataaatacgaccgctgatgggaaggtgtacgttaccgcagagtctagattttccactttagcagagcttgtgcatcaccacagcactgtggccgatgggttagtcactacacttcattatcctgcaccgaagtgcaataagccaacagtatatggggtgtccccaatccacgataagtgggagatggagcgcacggacatcaccatgaaacataaattgggcggaggccagtacggtgaagtgtacgtcggcgtttggaaaaagtattctcttacggttgccgtgaagaccttgaaagaagatactatggaagtcgaagaatttcttaaagaagcagcggttatgaaagagatcaagcatcccaatctggtacaactgttgggtgtgtgcactctcgagcctccattctacattgtgacggaatatatgccctacggtaacctgcttgactatctcagggagtgtaatcgggaggaggtaacagcagtggtgctgttatatatggccactcaaataagctcagctatggagtacttggagaagaaaaacttcattcacagggatctggcggcaaggaattgtctagtaggagaaaaccacgttgtcaaagtggccgatttcggattgtcacggttgatgacaggggatacctacactgcgcacgccggtgctaagtttcccattaagtggactgcaccggaatccctggcctacaatacgttcagtatcaagtcagatgtctgggcattcggagtgttgctttgggagatcgccacatacggaatgagcccctatcccggtatcgatctaagccaggtgtatgacctccttgaaaagggctaccgcatggaacagccagaaggatgtcctcccaaggtctatgagcttatgagggcatgctggaagtggtcaccggctgatcgaccctcttttgctgaaacccatcaggcattcgaaactatgtttcacgattcaagcatatccgaggaagtggcagaggagctgggccgagctgcttctagtagcagcgttgtaccgtatctacctcggcttccaatactgccttcaaaaactagaactctgaagaaacaggtggaaaacaaagaaaacattgaaggagcccaagatgccacagagaatagcgccagttcactcgcaccaggattcatccgaggtgcacaggcatccagcggttcccctgccttgccacgtaaacagcgtgataagtccccaagttcactgctagaggatgcaaaggaaacctgttttactcgggatcgtaaagggggattcttctctagcttcatgaagaaacgaaatgctcctacaccacccaagcgctcatcctccttccgggagatggagaaccagccacataagaaatacgaattaaccgggaactttagcagcgtggcttcgctccagcacgccgacgggttctccttcacaccagctcaacaggaggccaacctggtacctcccaaatgttacggaggctctttcgcgcaaaggaatctgtgcaacgatgacggagggggaggcggaggcagcggaacagcgggtggcggatggtccggcatcaccggcttcttcactccccgactcataaaaaagaccttaggcctacgagcaggcaagcccacagcctccgacgatacgtcaaaaccctttccccgaagtaactcaacaagtagtatgtcttcagggctgcccgagcaggatcggatggccatgacattgccgagaaattgccagcgctctaaacttcagctggagcggactgttagtaccagcagccagcccgaagagaatgtggacagggctaacgacatgctgcccaaaaaatctgaagaatccgcagccccttcacgagaaaggccaaaggcgaagctcttacccagaggcgcaacggccctgccattaaggaccccctcaggtgacctagcaattacagagaaggatcctcccggtgttggggtggcgggagtcgccgcagctcccaagggaaaagaaaagaacggcggagccagactgggtatggccggagtccccgaagacggggagcagcccggttggccttctccggcaaaagccgctccagtactgcctactacccataatcataaggtgcctgtgcttatttctcctaccctgaagcacacaccagcagatgtgcaattgattgggaccgactctcaggggaacaagtttaagctcctgtctgaacaccaggtgacctcttcaggcgacaaagaccgcccacgaagagtgaagccaaaatgtgcccctccacccccacctgttatgaggctgttgcagcatcccagcatttgtagcgaccccacagaagagcccactgcactgaccgctggacagagcacttccgaaacgcaggagggaggcaaaaaggccgctctgggcgcagtgcctatcagcggtaaagctggtcgcccagtgatgccacctccccaggtcccgctgccaacctcatccatctcgcccgctaagatggctaatggtactgcagggactaaggttgcactgcgcaaaactaagcaggccgctgaaaaaatctcggccgataagatttctaaagaggcccttttggagtgtgccgacctgctgagctcagccttgactgagcccgtaccgaatagccagctggttgacactggccatcagcttttggattactgttctggatatgtcgattgcattcctcagacccgtaacaagttcgccttccgcgaggcggtgtcgaagctggagctttccctgcaagaacttcaagtgtctagcgctgctgccggtgtaccaggaaccaatcctgttctgaataatttactttcctgcgtgcaggagataagcgacgttgtgcaaagatag

SEQ ID NO: 266331 - DNA, 11831 bp, Artificial Sequence
  derived and/or modified sequence
atggtccttgggacagttctccttccacctaatagttatggcagagatcaggacacttcactttgctgcctgtgcactgaggcctcagaatctgctctacccgacttaacagaagctttgcatcgtccctatggttgtgatgttgaaccccaggcactaaatgaggctatcaggtggagctccaaggagaacttgctcggagccactgagagtgaccctaatctcttcgttgcactttatgattttgtagcaagtggtgataacacactcagcatcactaaaggtgaaaagctacgagtccttggttacaaccagaatggtgagtggagtgaagttcgctctaagaatgggcagggctgggtgccaagcaactacatcaccccagtgaacagcctggaaaaacactcctggtaccatggacctgtgtcacgcagtgcagctgagtatctgctcagcagtctaatcaatggcagcttcctggtgcgagaaagtgagagtagccctgggcagctgtccatctcgctcaggtacgagggacgtgtgtatcactacaggatcaataccactgcagatggcaaggtgtatgtgactgctgagagccgcttcagcaccttggcagagcttgtacaccatcactccacagtggctgatgggctggtgacaacattacactacccagcacccaagtgtaataagcctacagtctatggtgtgtcccccatccacgacaaatgggaaatggagcgaacagatattaccatgaagcacaaacttgggggcggtcagtatggagaggtttacgttggcgtctggaagaaatacagccttacagttgctgtgaaaacattgaaggaagataccatggaggtagaagaattcctgaaagaagctgcagtaatgaaggaaatcaagcatcctaatctggtacaacttttaggtgtgtgtactttggagccaccattttacattgtgactgaatacatgccatacgggaatttgctggattacctccgagaatgcaaccgagaagaggtgactgcagttgtgctgctctacatggccactcagatttcttctgcaatggagtacttagagaagaagaatttcatccatagagatcttgcagctcgtaactgcctagtgggagaaaaccatgtggtaaaagtggctgactttggcttaagtagattgatgactggagacacttatactgctcatgctggagccaaatttcctattaagtggacagcaccagagagtcttgcctacaataccttctcaattaaatctgacgtctgggcttttggggtattgttgtgggaaattgctacctatggaatgtcaccatatccaggtattgacctgtctcaggtctatgacctactagaaaaaggatatcgaatggaacagcctgagggatgcccccctaaggtttatgaacttatgagagcatgctggaagtggagccctgccgataggccctcttttgctgaaacacaccaagcttttgaaaccatgttccatgactccagcatttctgaagaggtagctgaggagcttgggagagccgcctcctcgtcatctgttgttccatacctgccccggctacctatacttccttccaagactcggacactgaagaaacaggtggagaacaaggagaacattgaaggggcacaagatgccacagaaaattctgcttccagtttagcaccagggttcatcagaggtgcacaggcctctagtggatccccagcactgcctcgaaagcaaagagacaagtcacccagcagcctcttggaagatgccaaagagacatgcttcaccagggataggaaggggggcttcttcagctccttcatgaagaagagaaatgctcctacaccccccaaacgcagcagctccttccgagaaatggagaatcagccccataagaaatacgaactcacgggtaacttctcatctgttgcttctctacagcatgctgatgggttctctttcactcctgcccagcaagaggcgaatctggtgccacccaagtgctatggggggagctttgcacagaggaacctctgtaatgacgacggtggtgggggtgggggcagtggcactgctgggggtgggtggtctggcatcacaggcttctttacaccacgcttaatcaaaaagacactgggcttacgagcaggtaaacccacagccagtgatgacacttccaagccttttccaaggtcaaactctacatcttccatgtcctcagggcttccagagcaggataggatggcaatgacccttcccaggaactgccagaggtccaaactccagctggaaaggacagtgtccacctcttctcagccagaagagaatgtggacagggccaatgacatgcttccaaaaaaatcagaggaaagtgctgctccaagcagggagagaccaaaagccaagttattgcccagaggagccacagctcttcctctcagaacaccctctggggatctagccattacagagaaggaccctccaggggtgggagtggctggagtggcagctgcccccaagggtaaagagaagaatggtggggcacgacttgggatggctggagttccagaggatggagagcagccgggctggccttctccagccaaggctgcccccgtcctcccaaccactcacaaccacaaagtgccagtccttatctcacccactctgaaacacactccagctgacgtgcagctcattggcacagactctcaggggaataaattcaagctcttatctgagcatcaggtcacatcctctggagacaaggaccgaccccgacgggtaaaaccaaagtgtgccccacccccaccaccagtgatgagactactgcagcatccgtccatctgctcagaccctacagaagagccaactgccctaactgcaggacagtccacatcagaaacacaggaaggaggaaagaaggcagctctgggcgcagtgcccatcagtgggaaagctgggaggccagtgatgcctccacctcaagtgcctctgcccacatcttccatctcgccagccaaaatggccaatggcacagcaggtactaaagtggctctgagaaaaaccaaacaggccgctgagaaaatctcagcagacaaaatcagcaaagaggccctgctggaatgtgctgacctactgtccagtgcactcacggaacctgtgcccaacagccagctggtagacactggacaccagctgcttgactactgctcaggctatgtggactgcatccctcaaactcgcaacaaatttgccttccgagaggctgtgagcaaactggaactcagcctgcaggagctacaggtttcttcagcagctgctggtgtgcccgggacaaaccctgtccttaataacttattgtcatgtgtacaggaaatcagtgatgtggtgcagaggtagccactgttagcctggtgggaaaatgcacacatttctgaggggagagggaaaaggacttgttttcctgtgttcttgttttcagaaaatgaaagactcatacttgagtgtgtttatgtgaagtacctcagatccctgagttctcacgtttacagtttcatctcaaaaataagaagcaaaccacataagtataggagaggtaaattaagtgggggcaaggcagtagtggacagggttggaaactgcactggaaaatagggaacatgtgtatgtcataaggaaggcaatgcagcccatccctacctggaatgctgggaagtgctaggcagggctgctctcagcaagactgcagcagctgcacccagacctggggctctggtaggtactaatggtgattatgctccaatttacctaatgaatttggtgggacagcagaaaagaaagctgggaatgtaccaagagaaatttttgttcagggctgttggaagtagctgttagccttgcttccacaaggccattgctgctgtaataagaactgcaaatcagagtgctacaacataaaactgggaaatatggccctatctgaatgcctctgtcctattttccgctggtgtatcagttagtgcaggaagtaaagaatgctggaaagttgaatcagaaattgaaaaccttctaaaatcttacacagattagcagaagtcacttctcccagtctggtatattatttcataatggaccaggatcggcttcctgcctgttggtggctatctgtaaaccataagtacaggggtctccctagtggttcttctctgtcttttgctgggcaggctgtcttcctttattcctggtagcattcagagcattaaccagtgttgattttgaaaatagtagtccctacaggttctcacaaaggaatgaatcctgttctgatacagttcccctgcatactgacatactggccaaggacttgagcagctgtgtatttttctttatcaactaaaataccagggagatggtcttttcttgaaacccagtggcctgtatgtgactgagaggaaaagctggcttggtcctaatggctgtttctctgtacctttcccttcccttaccaccttaagcccaatccaggtagagaatagggagaggcattctcctctctatggatttgaagtgaatcacccccacattattctcacatgcttttcttctctcacatattcctccctactcccccacccaatcattgtgcttatttgtacagatcttattgggaatattctttatttattttgtcatttcacttctattttaagaatgcataattgaaggagtagtcattttcagggagcaccaggtagaccctgggaacctaatgacttaatccttaaatatgttttgcccttgaaaaataggccttttccttccttccttagttataattgtggaagctaattaggatggcatggaagtgaatctaatgagttaggtattattaatgttcttggtatcgggtctaattccagttactgcttcattctctttttaaagctttatgaatacttcccccatcctccccaaggagagctcaatacacacatatttttattttattctctcaaaggaatattagcttaggaagataggaattcaacattgagcactgagttttcttctggctctgtcattgatacactgtcaaaccacagcctcatctcttaatctatttaattaaggtaacagtacatgttctcaagggtgttgcaagtaagtgtgcagctatcccttggagagcctctctggaaagctcttttagtgcagtgttgttatgctgaattgttttccattatcttatttgctgagtagaaaatattaatgaaattaagaattgttgagattatatgaattgggctagaatactaaggggaaaactatgttttgaatagagtttggcatttttgaccaagaacaaaattgagttttcattggaaagaaaggaaaccttgattcttaccattgctgctccaaaggaggcccaggttaagaggattagaggagacacgcggtgctgggcattcctggcaggtgttgggtgatccccgcagtatgtcacctgcagttgcagcacaggcagctagtgattgggttcatctcctcctagtggttggaagagaactcagatgtaaaaaccagcggtccttctcccaccttctttcctgccattcttgctcatcatacatgtccgtaaacttgaagaactcgttttagcagctagccttttaaggtcgaggatgggaaagctaaaactgtagaatattattatgctgctttttaggtttatccctgttgttgtgggatgcaagttaagggattgtaattgtttttcagggtttttttgttttttgttttttaagcaagggctctattttcccttgagagttctggaactaagccttggagaaacactactgagtgtatttaggctccctggttttcttgcccaacaacaatctgaagggtagggggtgggggctgtgtcttactcaggggcagcacctagctgtcttgcctacagtgggtgcacgatatataaatggaattgatttttgtcaacactgtcaagagtggcattgactattggagcataccccgtccacatgatgcttgaactatgtaacttcaggggttgagggctcaaggttcaggttaaagaggcactgtcaacttactatacaagcataatttaggtttttcctttttctacttgaaaaggaccagcttaaacacaaacccttatgtaaattaaaaggtttgaatccaaagcagagagaactgcttctggaaaagtgtagtttaattttaactattctaaaagcaatgagcaaaggcccttgtccaaggcgttgacagttttctaaagtggttatgctgtatatctggatgcatgcctttgggctgccactgcttgattcctttcatgtacagataatattacttcagtttagatttcccactttaaaatgcagtgatttgtgttgaatacatcttgattgtgctttacctaaagtattttcttaaaaggctttgtgtaaaatttaaatgtatatattttcctgtagacttccatcatgattttcagagattagccttaaaaaatttggccctaagaaattcattcagtgtttttctagatgacctctgtacatagaggtcattatagtggagaccctttaccagcagcattttaagatttaaattagatagaaagtttcttaggattcaactgaaaattggctagtaaaatatgtcccaggtaataaagcatgctgactttgctaaggcactgcccatttttatttaactaaagtcatggagattttgagtttaaaggatgcagtatagatagtggtttagtgtttaggctctaatgccagtctaaaaggcaagtcatttaaccttgggagcctcagtttcctcactgtaaaacagggataataatagtaactacctcagggttgttgtaaggattaaatgagatgatatttgtaagatacttagctcaagtgcctggcacacaatgagcacactctataaatgttctactactactattattaacacctagtctagggatgcacagcagaatcccctagggttaaaaaacaaaacaaaacaaacaaaaaaaactgacggaatagccccactccagatcagaattcccagtgggctggggtctcggccagtgtattctccagtaatctcgccaggtgtttgaaacacccagtgctatctgaaaactatcagtaccccaaccctttggtttatagattaagaaactagcagaagatggttaaattacttgcctattgtctcagaacggttaattagtggcggagccaaggctagaattcaagtctcttgactttatggttgtggggtctttccaccatacctgctgccatgtgagacactgcaaaaaagtggctcagaccgacaatcagcctgtgtggtgctgcacactttctaaagcacatgctcctgacactttgaccttaaggggcttgaatgtggagtaatgggaacacaagccaagcaagcactcagtagaattcagtcatttaaaaaattcaatggggtcattcttttggacagacctcagcaacacagcaatgtgcactttgtagtaaagaaataccaacttgagtttttaaaaaacctagttagtcctacattcccttttctttaaaaaaactttattgttcacattattttaatgactatgagataatgtatatgacagcactttgagaaaatatcaactgtaatataactataaggttgtagtattgtctgtttaaaagataagacagttgattcaatgtggatggaccctgtggggtacctgaaaatgtagatacgtaagaatcacctctgtcatttatcacatttagaaatatgaaactgcttaacaggtatgagcaggtatagcaagtgtttgctaaagttgtagttcagagctgaattacttcaggaaactagggaccaactttttggtttaattccgatctttaaaaagtaagaatgtgtactcactccagaacacagaagctcttccaaggaccttgactcaagaaggatgaggtcctcttactcttctccatttatccactatatgcttggccatttatcctaaatgtggtgggaacagacttgttatctgttgatgttgacagtgtcttttttaacctatgtcctgcatagttttgttaggtttacagggggaggtggatggccataaaaccagtgcactttgggaattacttttctaggatttcctaccagttataaatgacattgacatttgtcatcttttttttctttttctaaaaagaatagctgaatttaattcacctattataaaatactcaaaagtaaattgccttggtggccacttctgaattatagctacatttcattatgaccccttctgctcccttccattttgctactgatgtcattcttgttatcaggctgtgcccctaccaggagttcatattgggttgacagggttatctatatttttgttcttgatttttgagtttcatcatcttgcattaaattgttccacctggatttggggttcatctctgtgccctaaggatctgctatgaccaatcctctttttgtaggtgggtctctggcttaagtattgataggcttcagcggtttgtgtctctgtcttagcttgtatcaagccagtagtagctcacttcctttgtaaattcctgcttcagtctgggatccgtaggagtatgtgagaacttctgaaacgtctccaactcttaacagtcaagatatctatatcatttggatagagttctggttttccaactactagacttaaagaaattctggccgggtgcggtggctcacgcctgtaatcccagcactttggggggctgaggcgggtggatcacgaggtcaggagattgagaccatcctggctaacacggtgaaaccccacctctactaaaaatacaaaaacttagctgggcgtggtggcgggcgcctgtagtcccagctactggggaggctgaggcaggagaatggcgtgaacccaggaggcggagcttgcagtgagcccagatcgcgccactgcactccagcctgggtgacagtgagactccgtctcaaaaaaaaaaaaaaaaaaaaaaaaaaaaaaaaaaagaaattctaatgcaaagcttgctttttttttcttttttccagcaagccagtagtaatagttattgttacttgctctgttcagcacaactgtagttcacttgaacttcactgtcattccctacgctcctctcttactgagaagcatgggtgggattcagggctgtgggacaagctacagcctactctggagcactcacccccatgactcagtccagcctgtctcttgggaagtttattgcaatgtgcagacggatgaatttctgcttttcatgccacctctctgaggtatgtattctatcttgagtatgtacaagatgataccttttggctgggcacagtggctcgtgcctgtaatcccagcactttgggagaccaagatgggcggatcacttgaggtcaggagtttgagaccagcctggccaacatggtgaaaccccgtctctactaaaaatataaaaattagccgggcgtagtacatgcctgtaatcccagctactcccgaggctgaggcagaattgcttgaacccaggaggcggaggttgcagtgagctgagatcgcgccgctgcactccagcctaagtgacagagtgagacacgttaagaagaaaaaaaaaaaaaaggataccttcatttctgactcaatatcctagatccaaaggacaggaaattagggaaggcttcaccctgtgggatcaagataagaagatcccatacttcttcccaggtaaggaggcctgtggcaggtcatgattcaaagctgacttggaatggcagaaactgctgagaggccacccttggagatttgtgccttcaaagatgggtttcatgagtctcagagaggaaaagacttgtcagctgggttgattttgcatgattattgaactagagctggtagacacgagcttctcagatggcagtggccagatcctccatctgtgagaatccgccacttgaagtggtttcctgagagtgttcacttggcagttgctgcgtttctcaagcccacctggcgaggtctcgccggacccttccctccaagtgcacttacttcttcatccccatgtacatctctaactttgaaattgtttacctctcctacaaaaatcttaccttttgacctgagcagagtagcaaagccctgttcactctgagggagcagctggcgtgttgaaggggaaaggccaggcacagcactgtcctcagaccacaccatatttggagcagaattgtgatacatgtcatctgtgtctattctggaaggttctttgttcatcactgtactcgcatcagcaaattttcagggtcctacctgtcactccaggctactgagctgaaccctcagaagctgaggtctccgagcatgctaagtaaccttttagaaaagctggaggcaaactgtcgaatgctagcaggctttatgaaaggaaacataaggagtttgtgtagtcagaacttgcttaaatttgcttcggaattaggcaccataaactttagttggagaatgggacttaaattttcacatatatgtatacttaattttcagcaattatgacacaataaaaagaatatgcaaatttattgttgtttcagaaggttttgcaggactgggaacgctttagtgtcatcaacagtaaacctcagatactgttctgcacagttcagaagtaccataccaggtattgtgagtggcaagaacgccaggggacagagatgcttctggtagatgagggccagagaaaccagctctcctccattttgacagcaatttctcactgtggccatttggcctccattatgttttgagaggaatttcttgagatcttgagaaatcaccatgattaggccaattgtcaatcagtattcagaaactagaaaggaacaatgagatacttgtttatggttctttagggcatatgtttgaaaaccctctcatctcagatctgtatagctggtgtgtgtttgtgtccataaatacacgtgcattgctgtcgtgcccattaagaaagggggagtaagtaaaagaggaatcgctcagatctttccttggatgaacagcagtggcgtggttggtgtgttgactgtgaacaggctgacttagctgttgatgtatactcagaacctccatctcctcccagaccctgcacttttccttctctgcagtctgattctctaatgactgtcactggacaaaccccagttttatgctcgcttagtaaaaataagtttaaacatttcatggtggttgacagaactttgtccccaaacatgcggattcaattctttaaaactcgttgaacgtttataccaaaggtcccgccccgcaggtgtgtatgtggtgcacagagggtgaggtttggagcatcgggcactgtgtgcattgctaaggggacatagtgagacaatgtgggatttaactaaaaacacatcaattgtgtgtcacattaccagtgttgtcaggtatttgttcttaattgttattgtaatatattttcagttgtttttctaatttaattctctccgtctgttgtctgactgtgaactgctaacagtgttaaacttgatgtaaataaatgaggcccttgaaagggactgctttctctgtcttctcacaaggtttgccaagttgtgttctgttttaaataaaggttgcaatattttattggcaaagt

SEQ ID NO: 266332 - protein, 276 aa, Artificial Sequence
  derived and/or modified sequence
MSSYQKELEKYRDIDEDEILRTLSPEELEQLDCELQEMDPENMLLPAGLRQRDQTKKSPTGPLDREALLQYLEQQALEVKERDDLVPFTGEKKGVVQPDKYKPVPDEPPNPTNIEEILKRVRSNDKELEEVNLNNIQDIPIPMLSELCEAMKANTYVRSFSLVATRSGDPIANAVADMLRENRSLQSLNIESNFISSTGLMAVLKAVRENATLTELRVDNQRQWPGDAVEMEMATVLEQCPSIVRFGYHFTQQGPRARAAQAMTRNNELRRQQKKR

SEQ ID NO: 266333 - DNA, 831 bp, Artificial Sequence
  derived and/or modified sequence
atgagcagctaccagaaggagctggagaagtacagagacatcgacgaggacgagatcctgagaaccctgagccccgaggagctggagcagctggactgcgagctgcaggagatggaccccgagaacatgctgctgcccgccggcctgagacagagagaccagaccaagaagagccccaccggccccctggacagagaggccctgctgcagtacctggagcagcaggccctggaggtgaaggagagagacgacctggtgcccttcaccggcgagaagaagggcgtggtgcagcccgacaagtacaagcccgtgcccgacgagccccccaaccccaccaacatcgaggagatcctgaagagagtgagaagcaacgacaaggagctggaggaggtgaacctgaacaacatccaggacatccccatccccatgctgagcgagctgtgcgaggccatgaaggccaacacctacgtgagaagcttcagcctggtggccaccagaagcggcgaccccatcgccaacgccgtggccgacatgctgagagagaacagaagcctgcagagcctgaacatcgagagcaacttcatcagcagcaccggcctgatggccgtgctgaaggccgtgagagagaacgccaccctgaccgagctgagagtggacaaccagagacagtggcccggcgacgccgtggagatggagatggccaccgtgctggagcagtgccccagcatcgtgagattcggctaccacttcacccagcagggccccagagccagagccgcccaggccatgaccagaaacaacgagctgagaagacagcagaagaagagatag

SEQ ID NO: 266334 - DNA, 831 bp, Artificial Sequence
  derived and/or modified sequence
atgtctagctaccagaaggagctcgaaaagtacagagatatagatgaagatgagatcctgcggacattgtctccagaggagcttgaacagctagattgcgagttacaggagatggatccagaaaatatgctgttgcctgcagggttgagacagcgtgatcagaccaagaagtctcccaccggcccccttgaccgagaggcactccttcagtatctggagcagcaggctctggaagttaaggaacgggacgaccttgtgcctttcacgggcgaaaaaaaaggggtcgtgcagccagacaaatacaagcccgttcctgatgagccacctaacccaaccaatattgaggagattctgaagcgggtcaggtctaacgacaaagagctggaagaggtgaatttaaataatatccaggatatccccatacccatgttgagtgagctatgtgaggccatgaaggccaacacctacgtgcgatcgttctccctggtagccaccagatccggcgaccctatcgccaatgcggtggcagatatgctaagagagaaccggtcgctgcagtccctgaatatagagtccaactttataagttccactggtctcatggctgtcctcaaggcggttcgggagaacgccactctcaccgagcttcgagttgataaccaaaggcagtggcccggcgatgctgttgaaatggagatggctacggtgctggagcagtgtccatcaatcgtaagattcggatatcactttacacagcaggggccacgagcccgtgcagctcaggcgatgacacgcaataacgagctccggagacagcagaaaaagaggtag

SEQ ID NO: 266335 - DNA, 831 bp, Artificial Sequence
  derived and/or modified sequence
atgagcagctaccagaaggagctggagaagtacagagacattgatgaagatgagatcctgcggaccctgagccctgaggagctggagcagctggactgtgagctgcaggagatggaccctgagaacatgctgctgcctgctggcctgcggcagagggaccagaccaagaagagccccaccggccccctggaccgggaggccctgctgcagtacctggagcagcaggccctggaggtgaaggagagagatgacctggtgcccttcaccggggagaagaagggcgtggtgcagcctgacaagtacaagcctgtgcctgatgagccccccaaccccaccaacatcgaggagatcctgaagagggtgcgcagcaatgacaaggagctggaggaggtgaacctgaacaacatccaggacatccccatccccatgctgtctgagctgtgtgaggccatgaaggccaacacctacgtgcgctccttcagcctggtggccaccaggtctggggaccccatcgccaatgctgtggccgacatgctgagagaaaatagaagcctgcagagcctgaacatcgagagcaacttcatcagcagcacaggcctgatggctgtgctgaaggctgtgagagaaaatgccaccctgacagagctgcgggtggacaaccagaggcagtggccaggagatgctgtggagatggagatggccaccgtgctggagcagtgccccagcatcgtgcgcttcggctaccacttcacccagcagggcccccgggcccgggccgcccaggccatgaccagaaataatgagctgcggcggcagcagaagaagaggtag

SEQ ID NO: 266336 - DNA, 831 bp, Artificial Sequence
  derived and/or modified sequence
atgagcagctaccagaaggagctggagaagtaccgggacatcgacgaggacgagatcctgagaactctgtctccagaagaactcgagcagttggattgcgaactgcaggagatggatcccgagaatatgctgctaccggccggactgcggcagcgtgatcagaccaaaaagtcgcccactggccccctggaccgcgaggctctcctgcaatacctggaacaacaagctctcgaggttaaagaacgtgacgatcttgtacctttcacaggagagaaaaaaggggtggtgcaacctgacaagtataaacctgtgccggacgaacccccaaatcctacaaatatcgaggaaattttaaaaagggtgaggtctaatgataaagaactcgaggaagttaatcttaataacatacaagacatccctattcctatgttgtctgagttgtgtgaagctatgaaggccaatacatatgttagaagctttagcctcgtggccaccaggtcaggcgacccaatcgccaacgctgtcgctgatatgctccgcgaaaacaggagcctccagtcccttaatatcgagtcaaactttatcagcagcaccgggctgatggcggtgttgaaagcagtgagggagaacgccactttgaccgagcttagagtggataaccagcggcagtggccaggagacgcagttgagatggaaatggccactgtcctggagcagtgtccaagcattgtgagatttggctaccactttacccagcagggccctagggccagagccgcccaggccatgactcgaaacaatgagttacgacggcagcagaagaagcgatag

SEQ ID NO: 266337 - DNA, 831 bp, Artificial Sequence
  derived and/or modified sequence
atgtcttcctatcagaaggaattagagaaatatagggatatcgatgaagacgaaatccttcgcacgctgagtcctgaggaactcgaacagctggattgcgagttgcaagaaatggacccagaaaatatgctgctgccagcaggcctccgacagagggatcagacaaagaagagtcccacgggccctttggaccgggaggcacttcttcaatatctggagcagcaggcacttgaagtaaaagagagggatgatctggtaccctttaccggggaaaagaagggcgtagtccaaccagataaatataaaccggtcccggatgaaccacctaaccccaccaacatcgaagagatacttaaacgagtgcgcagcaacgacaaggagttagaggaagtgaatttgaacaacattcaagacattcctatacccatgctgtcagagctctgtgaagccatgaaagcaaacacgtatgtccgcagcttttcactggttgctactcgctccggcgatccgattgcgaacgctgttgccgacatgcttcgcgaaaatcggtcactgcagtcactgaacatcgagagcaattttatcagctcaaccggtctgatggccgttctgaaggcagttcgtgaaaatgccacccttaccgaattgcgcgtcgataatcagcgacagtggcccggagatgccgtagagatggagatggctaccgtgcttgaacagtgcccatcaatagttagattcggatatcatttcacacagcagggtccaagagccagagcagcccaggccatgactcgcaacaacgaactccgccgtcaacaaaagaaacgttag

SEQ ID NO: 266338 - DNA, 1024 bp, Artificial Sequence
  derived and/or modified sequence
agaacagacagacctactgacacaggggaggtgagaagggaggtgaccaccaggactggctctgtgagtaccacacagtggggagggggtgggggccaccatgtcatcatatcagaaggaactggagaaatacagagacatagatgaagatgagatcctaaggaccttgagccccgaggagctagagcagctggactgcgaactacaggagatggatcctgagaacatgctcctgccagctggactaagacaacgtgaccagacaaagaagagcccaacggggccactggaccgagaggcccttttgcagtacttggagcaacaggcactagaagtcaaagagcgtgatgacttggtgcccttcacaggcgagaagaagggtgtggtacagcctgacaagtataagccagtgccggatgaacccccaaatcccacaaacattgaggagatactaaagagggtccgaagcaatgacaaggagctggaggaggtgaacttgaataatatacaggacatcccaatacccatgctaagtgagctgtgtgaggcaatgaaggcaaatacctatgtgcggagcttcagtctggtagccacgaggagtggtgaccccattgccaatgcagtggctgacatgttgcgtgagaatcgtagcctccagagcctaaacatcgaatccaacttcattagcagcacaggactcatggctgtgctgaaggcagttcgggaaaatgccacactcactgagctccgtgtagacaatcagcgccagtggcctggtgatgcagtggagatggagatggccaccgtgctagagcagtgtccctctattgtccgctttggctaccactttacacagcaggggccacgagctcgggcagcccaggccatgacccgaaacaatgaactacgtcgccagcaaaagaagagataacactgcatttccctttaccaactagcgctgggagcactggacacttaaatcctcatctgtcctcctttcctgtaaataaaagcccttctatcc

SEQ ID NO: 266339 - protein, 235 aa, Artificial Sequence
  derived and/or modified sequence
MVRGQLYKHFDLERKNAKQAEARLDQRLQRLKVICLYHVKLLTWEQRQLQKELQRLQQETMKKKFSSYLGNGFQKRPEDVLVFSPQGRQKHRAPQAKKMRALATRMAQDTCKSKSQVPPSHDAGLKDPMKSKKQPLSQNNRTACFIKEQPQAQEKDSVNPSKDVDPSKGISVPCQNQEVSTNTIEQGPISSAQPLAFNGETILYSERNTRNLLPPTLSSMKQSNRGRQAISDRTD

SEQ ID NO: 266340 - DNA, 895 bp, Artificial Sequence
  derived and/or modified sequence
ccccatggagttctacccctgctcctctggtcaccctcctgatggatccccatggtgccaggcaggaatggcctgctaggagatgcagtgagcccccaggacctctccactgcctcctccacccctgtatttcacttggctctccaaattgactcaactccagaccataaagaagatggagaggcacatggtcaggggacaattgtataagcattttgatttggagaggaagaatgccaagcaggctgaagccagactggaccaaagactgcagagactaaaggttatttgcctctaccatgtgaaattgctgacctgggagcagaggcagctccaaaaagaactgcagaggttgcagcaagaaaccatgaagaaaaagttctcctcttatttggggaatggatttcagaagagaccagaagatgttctcgtgttctcaccacagggaaggcagaagcacagagccccacaggctaagaaaatgagagcattggcaacccgtatggcccaagacacatgcaaaagcaagtcccaggtgcctccttcacatgatgctggcctcaaagaccccatgaagagcaaaaagcagccactctctcaaaataacagaactgcctgcttcataaaagagcaaccacaagcccaagagaaagattctgtgaatccatctaaggacgtagaccccagcaagggcatctctgttccatgccaaaatcaagaggtttccaccaacaccatagaacaaggtcctatttcatcagcccagcctctggccttcaatggggagacaatactttatagtgaaaggaacacaagaaatctgcttcctccaacactttcttccatgaagcaaagcaacagaggaaggcaggccataagtgacagaactgattga

SEQ ID NO: 266341 - protein, 785 aa, Artificial Sequence
  derived and/or modified sequence
MGKKYKNIVLLKGLEVINDYHFRMVKSLLSNDLKLNLKMREEYDKIQIADLMEEKFRGDAGLGKLIKIFEDIPTLEDLAETLKKEKLKVKGPALSRKRKKEVDATSPAPSTSSTVKTEGAEATPGAQKRKKSTKEKAGPKGSKVSEEQTQPPSPAGAGMSTAMGRSPSPKTSLSAPPNSSSTENPKTVAKCQVTPRRNVLQKRPVIVKVLSTTKPFEYETPEMEKKIMFHATVATQTQFFHVKVLNTSLKEKFNGKKIIIISDYLEYDSLLEVNEESTVSEAGPNQTFEVPNKIINRAKETLKIDILHKQASGNIVYGVFMLHKKTVNQKTTIYEIQDDRGKMDVVGTGQCHNIPCEEGDKLQLFCFRLRKKNQMSKLISEMHSFIQIKKKTNPRNNDPKSMKLPQEQRQLPYPSEASTTFPESHLRTPQMPPTTPSSSFFTKKSEDTISKMNDFMRMQILKEGSHFPGPFMTSIGPAESHPHTPQMPPSTPSSSFLTTKSEDTISKMNDFMRMQILKEGSHFPGPFMTSIGPAESHPHTPQMPPSTPSSSFLTTLKPRLKTEPEEVSIEDSAQSDLKEVMVLNATESFVYEPKEQKKMFHATVATENEVFRVKVFNIDLKEKFTPKKIIAIANYVCRNGFLEVYPFTLVADVNADRNMEIPKGLIRSASVTPKINQLCSQTKGSFVNGVFEVHKKNVRGEFTYYEIQDNTGKMEVVVHGRLTTINCEEGDKLKLTCFELAPKSGNTGELRSVIHSHIKVIKTRKNKKDILNPDSSMETSPDFFF

SEQ ID NO: 266342 - protein, 127 aa, Artificial Sequence
  derived and/or modified sequence
MGKKYKNIVLLKGLEVINDYHFRMVKSLLSNDLKLNLKMREEYDKIQIADLMEEKFRGDAGLGKLIKIFEDIPTLEDLAETLKKEKLKVKGPALSRKRKKEVDATSPAPSTSSTVKTEGAEATPGAQ

SEQ ID NO: 266343 - DNA, 2358 bp, Artificial Sequence
  derived and/or modified sequence
atggggaagaagtataagaacattgtactgttgaagggactggaagtcatcaacgattatcatttccggatggtgaagtccctgctctccaacgatcttaagctgaatctcaagatgcgcgaggaatacgacaaaatacagatcgccgacttgatggaagaaaaattccgtggcgatgcggggctgggtaagcttatcaagatatttgaagatatcccgaccctcgaagatctcgcagagactcttaaaaaagagaagctgaaagtcaaagggcccgctctcagtagaaagagaaagaaagaggtggatgctacgtcacccgcaccaagcactagttccactgtgaaaacagaaggagctgaggccacaccaggagcacaaaaaagaaagaaatccactaaggaaaaagccggacctaaagggagtaaagtgtcagaggaacagacccagccccccagtcccgccggggcagggatgagcactgccatgggccgctcgcccagcccaaaaaccagcctgagcgctccccccaatagcagctcgacagagaatcctaagacagtggcaaagtgccaggttactccccggaggaacgttctccagaagcgcccagtgattgtgaaggtgctgtccacgaccaaaccatttgaatatgaaacaccggagatggaaaaaaaaatcatgttccacgccactgtcgccactcagactcagtttttccacgtgaaggtgctcaacacaagtctgaaggagaagttcaatggtaagaagataataataataagcgattatttggagtatgacagcctcctggaggtgaacgaagaaagtacagtttccgaggctgggccaaaccagacatttgaagtgcccaacaagattataaatagggctaaggagacacttaaaattgatattctacacaaacaagcgtcagggaatattgtgtatggagtattcatgctccataagaaaacggttaatcagaaaactactatttatgaaattcaggacgacaggggcaagatggatgtagtcggtactggacaatgccacaatataccgtgcgaggagggcgataagttgcagcttttctgcttcagactaaggaagaaaaatcagatgagcaagctcatcagtgaaatgcattcttttatacaaataaaaaaaaaaaccaatccaagaaacaacgatccaaagtctatgaagctccctcaggaacagaggcagctcccctacccctcggaggcgagtaccacatttcctgaaagccacctgaggactccacaaatgccacccaccacgccttctagctccttttttaccaagaagagtgaggacacaatttctaagatgaatgatttcatgcggatgcaaatcctgaaggaggggagtcatttcccaggaccatttatgaccagcattgggcccgcggaaagtcatccacacactccccagatgccaccctccactccttcctcgtctttcctgaccacaaaaagcgaggatacaatttctaaaatgaatgatttcatgcgcatgcaaatcttgaaagagggttcacactttcccgggcctttcatgacctccattggcccagcagagtcccatcctcatactccccagatgccaccctcaacacccagttcttctttccttacgactctgaaaccccgcttgaagacggaaccggaggaggtgagcatcgaggattctgcgcagagcgacctcaaggaagtgatggtcctgaacgcaacagaaagctttgtctatgaacctaaagagcagaagaagatgtttcacgccacagttgctacagagaatgaagtgttccgggtgaaggtgtttaatattgacctgaaagagaagtttacacctaaaaaaatcatcgccatcgcaaactatgtgtgtaggaatgggttccttgaagtgtatccatttaccttggtcgcggacgtgaacgcggaccggaacatggaaatccccaaaggtctcatcaggtctgcgtccgtgactcctaagattaaccagttgtgcagccagactaagggatccttcgtcaacggagtgtttgaggtacataaaaagaacgtgaggggcgaattcacctactacgaaatccaggacaacactggaaaaatggaagtggttgtgcatggtcgcctcaccacaataaactgtgaggagggcgacaagttaaaattgacttgctttgagttggccccaaaatctgggaatacaggtgagcttcggtccgtgatacattcccacattaaggtgatcaagacacgcaaaaataagaaggatatattaaatcccgactctagtatggagacttctcccgacttttttttttag

SEQ ID NO: 266344 - DNA, 2900 bp, Artificial Sequence
  derived and/or modified sequence
attgtttcctactccattttctctggggcaatagcagaataggagcaagccagcactagtcagctaactaagtgactcaaccaaggccttttttccttgttatctttgcagatacttcattttcttagcgtttctggagattacaacatcctgcggttccgtttctgggaactttactgatttatctcccccctcacacaaataagcattgattcctgcatttctgaagatctcaagatctggactactgttgaaaaaatttccagtgaggctcacttatgtctgtaaagatgggaaaaaaatacaagaacattgttctactaaaaggattagaggtcatcaatgattatcattttagaatggttaagtccttactgagcaacgatttaaaacttaatttaaaaatgagagaagagtatgacaaaattcagattgctgacttgatggaagaaaagttccgaggtgatgctggtttgggcaaactaataaaaattttcgaagatataccaacgcttgaagacctggctgaaactcttaaaaaagaaaagttaaaagtaaaaggaccagccctatcaagaaagaggaagaaggaagtggatgctacttcacctgcaccctccacaagcagcactgtcaaaactgaaggagcagaggcaactcctggagctcagaaaagaaaaaaatcaaccaaagaaaaggctggacccaaagggagtaaggtgtccgaggaacagactcagcctccctctcctgcaggagccggcatgtccacagccatgggccgttccccatctcccaagacctcattgtcagctccacccaacagttcttcaactgagaacccgaaaacagtggccaaatgtcaggtaactcccagaagaaatgttctccaaaaacgcccagtgatagtgaaggtactgagtacaacaaagccatttgaatatgagaccccagaaatggagaaaaaaataatgtttcatgctacagtggctacacagacacagttcttccatgtgaaggttttaaacaccagcttgaaggagaaattcaatggaaagaaaatcatcatcatatcagattatttggaatatgatagtctcctagaggtcaatgaagaatctactgtatctgaagctggtcctaaccaaacgtttgaggttccaaataaaatcatcaacagagcaaaggaaactctgaagattgatattcttcacaaacaagcttcaggaaatattgtatatggggtatttatgctacataagaaaacagtaaatcagaagaccacaatctacgaaattcaggatgatagaggaaaaatggatgtagtggggacaggacaatgtcacaatatcccctgtgaagaaggagataagctccaacttttctgctttcgacttagaaaaaagaaccagatgtcaaaactgatttcagaaatgcatagttttatccagataaagaaaaaaacaaacccgagaaacaatgaccccaagagcatgaagctaccccaggaacagcgtcagcttccatatccttcagaggccagcacaaccttccctgagagccatcttcggactcctcagatgccaccaacaactccatccagcagtttcttcaccaagaaaagtgaagacacaatctccaaaatgaatgacttcatgaggatgcagatactgaaggaagggagtcattttccaggaccgttcatgaccagcataggcccagctgagagccatccccacactcctcagatgcctccatcaacaccaagcagcagtttcttaaccacgaaaagtgaagacacaatctccaaaatgaatgacttcatgaggatgcagatactgaaggaagggagtcattttccaggaccgttcatgaccagcataggcccagctgagagccatccccacactcctcagatgcctccatcaacaccaagcagcagtttcttaaccacgttgaaaccaagactgaagactgaacctgaagaagtttccatagaagacagtgcccagagtgacctcaaagaagtgatggtgctgaacgcaacagaatcatttgtatatgagcccaaagagcagaagaaaatgtttcatgccacagtggcaactgagaatgaagtcttccgagtgaaggtttttaatattgacctaaaggagaagttcaccccaaagaagatcattgccatagcaaattatgtttgccgcaatgggttcctggaggtatatcctttcacacttgtggctgatgtgaatgctgaccgaaacatggagatcccaaaaggattgattagaagtgccagcgtaactcctaaaatcaatcagctttgctcacaaactaaaggaagttttgtgaatggggtgtttgaggtacataagaaaaatgtaaggggtgaattcacttattatgaaatacaagataatacagggaagatggaagtggtggtgcatggacgactgaccacaatcaactgtgaggaaggagataaactgaaactcacctgctttgaattggcaccgaaaagtgggaataccggggagttgagatctgtaattcatagtcacatcaaggtcatcaagaccaggaaaaacaagaaagacatactcaatcctgattcaagtatggaaacttcaccagactttttcttctaaaatctggatgtcattgacgataatgtttatggagataaggtctaagtgcctaaaaaaatgtacatatacctggttgaaatacaacactatacatacacaccaccatatatactagctgttaatcctatggaatggggtattgggagtgcttttttaatttttcatagtttttttttaataaaatggcatattttgcatctacaacttctataatttgaaaaaataaataaacattatcttttttgtgaaagg

SEQ ID NO: 266345 - DNA, 2358 bp, Artificial Sequence
  derived and/or modified sequence
atgggcaagaagtacaagaacatcgtgctgctgaagggcctggaggtgatcaatgactaccacttcaggatggtgaagagcctgctgagcaatgacctgaagctgaacctgaagatgagggaggagtatgacaagatccagattgctgacctgatggaggagaagttcagaggagatgctggcctgggcaagctgatcaagatctttgaggacatccccaccctggaggacctggccgagaccctgaagaaggagaagctgaaggtgaagggccctgccctgagcaggaagaggaagaaggaggtggatgccaccagccctgcccccagcaccagcagcacagtgaagacagaaggagctgaggccacccctggggcccagaagaggaagaagagcaccaaggagaaggccggccccaagggcagcaaggtgtctgaggagcagacccagccccccagccctgctggagctggcatgagcacagccatgggccgcagccccagccccaagaccagcctgagcgccccacccaacagcagcagcacagagaaccccaagacagtggccaagtgccaggtgacccccaggagaaatgtgctgcagaagaggcctgtgattgtgaaggtgctgagcaccaccaagccctttgaatatgagaccccagagatggagaagaagatcatgttccacgccaccgtggccacccagacccagttcttccacgtgaaggtgctgaacaccagcctgaaggagaagttcaacgggaagaagatcatcatcatcagtgactacctggagtatgacagcctgctggaggtgaatgaggagagcacagtgtctgaggccggccccaaccagacctttgaggtgcccaacaagatcatcaacagagccaaggagaccctgaagattgacatcctgcacaagcaggccagcggcaacatcgtgtatggagtcttcatgctgcacaagaagacagtgaaccagaagaccaccatctatgagatccaggatgaccggggcaagatggatgtggtgggcaccggccagtgccacaacatcccctgtgaggagggggacaagctgcagctgttctgcttccggctgaggaagaagaaccagatgagcaagctgatcagcgagatgcacagcttcatccagatcaagaagaagaccaaccccagaaataatgaccccaagtccatgaagctgccccaggagcagaggcagctgccctaccccagcgaggccagcaccaccttccctgagagccacctgcggaccccccagatgccacccaccacccccagcagcagcttcttcaccaagaagtctgaggacaccatcagcaagatgaatgacttcatgaggatgcagatcctgaaggagggcagccacttccctggccccttcatgaccagcatcggccctgctgagagccacccccacaccccccagatgccacccagcacccccagcagcagcttcctgaccaccaagtctgaggacaccatcagcaagatgaatgacttcatgaggatgcagatcctgaaggagggcagccacttccctggccccttcatgaccagcatcggccctgctgagagccacccccacaccccccagatgccacccagcacccccagcagcagcttcctgaccaccctgaagccccggctgaagacagagcctgaggaggtgtccattgaggacagcgcccagagcgacctgaaggaggtgatggtgctgaatgccacagagagctttgtgtatgagcccaaggagcagaagaagatgtttcatgccaccgtggccacagaaaatgaggtgttccgggtgaaggtgttcaacatcgacctgaaggagaagttcacccccaagaagatcatcgccatcgccaactacgtgtgcagaaatggcttcctggaggtgtaccccttcaccctggtggctgatgtgaatgctgacaggaacatggagatccccaagggcctcatccgcagcgcctctgtgacccccaagatcaaccagctgtgcagccagaccaagggcagctttgtgaatggagtgtttgaggtgcacaagaagaatgtgcggggggagttcacctactatgagatccaggacaacacaggcaagatggaggtggtggtgcacggccgcctgaccaccatcaactgtgaggagggggacaagctgaagctgacctgctttgagctggcccccaagagcggcaacacaggagagctgcggagcgtcatccacagccacatcaaggtgatcaagaccaggaagaacaagaaggacatcctgaacccagacagctccatggagaccagcccagacttcttcttctag

SEQ ID NO: 266346 - DNA, 2358 bp, Artificial Sequence
  derived and/or modified sequence
atgggcaagaagtacaagaacatcgtgctgctgaagggcctggaggtaataaatgattatcatttccgcatggtcaagagccttctctccaatgatctgaagttaaatctgaagatgagagaagagtatgataagatccagatcgctgacctgatggaagagaaattcagaggcgacgctggtcttggaaagctgattaaaatctttgaggacatacctacgttggaggacctggccgagacactaaagaaggagaaactgaaagttaaggggccagctctgtcaagaaaaagaaaaaaagaagtggacgctacctcccccgcaccatcaacaagcagtaccgtgaagaccgagggtgctgaagccacccccggcgcccaaaaacgcaagaagtctacaaaagagaaggctggcccaaaggggtccaaggtgtctgaggagcagactcagccaccgagtcccgccggtgcggggatgtcaacagccatggggagatccccctcgcccaaaacatctctcagcgcaccccctaattcttcaagcaccgaaaaccccaagacagtagccaaatgccaggtgacccccagacgaaatgtgctgcaaaaacggccagtcattgtgaaggtactgtccactaccaaaccgttcgagtacgagacccctgaaatggagaagaaaatcatgttccatgcaactgtggctactcagacacaattcttccacgtcaaagtgttaaacacctccttgaaggagaagtttaacgggaaaaagatcattatcattagcgactatctagaatacgacagcctgctggaagtgaatgaggaaagtaccgtgtctgaagcaggccctaatcaaacatttgaggtgcccaacaaaataattaacagagcgaaagagaccctgaagattgatattcttcataaacaggcatctggaaatattgtctatggggttttcatgctgcacaaaaagactgtgaatcagaagaccaccatttacgagatccaggacgaccgagggaaaatggacgtggtcgggaccgggcagtgccataatatcccttgcgaggaaggagataagctccagctcttttgttttaggctacgtaagaagaaccagatgtcaaagctgatctcggagatgcatagtttcatccagatcaagaagaagacgaaccctaggaataacgaccccaagtctatgaaactcccccaggaacagaggcagttgccctacccttccgaagctagcacgacattccccgagtctcatttgcgcactcctcagatgccgcctacaacccctagttcttcatttttcacaaagaaaagtgaagatacgatttctaagatgaatgattttatgcgtatgcagattttaaaggagggctctcatttccctgggccgttcatgactagtattggacccgcggagtcccatccacacactcctcagatgcccccttcaaccccctccagttccttcctgaccaccaaatccgaggacaccatctcaaagatgaacgatttcatgcgcatgcaaattctaaaggagggatctcacttcccgggtccattcatgacatcgataggtcccgcagaatcccatccacacaccccgcagatgccacccagtaccccaagtagctctttcctgacaacactgaagccaagattgaagacagaaccagaagaggtttccattgaagacagcgcccagagcgatctgaaggaagtcatggtcctgaatgccactgagagtttcgtttacgaacccaaagaacagaagaagatgttccacgctaccgtcgctaccgaaaacgaagtgtttagggtcaaagtgttcaatatcgaccttaaagaaaagttcacaccgaagaagatcatcgctatagctaattatgtgtgtcgcaacgggtttctagaagtctatccctttaccctggtagcagacgtgaatgccgaccgcaacatggagatccctaaggggctgatccgcagcgcaagcgttactcccaaaataaaccagctctgcagtcagaccaaaggaagcttcgtcaacggcgtgttcgaagtgcacaagaagaacgtgcggggcgagttcacttactatgagatccaggacaacactggcaaaatggaggtcgtcgtacacggtcgtctgactacgatcaattgcgaagagggcgataagcttaaacttacttgcttcgaactggctcccaaaagcggcaacaccggagaactccgttccgtaatccactcccacattaaggtaatcaagacccgaaaaaacaagaaggatattttgaaccccgattcctctatggagacctctcccgacttttttttctag

SEQ ID NO: 266347 - DNA, 2358 bp, Artificial Sequence
  derived and/or modified sequence
atggggaaaaaatacaagaatattgttctcctcaaaggcctagaggtgattaacgactaccatttcagaatggtgaagtccctcctgtctaacgacttgaaactgaatctgaagatgagggaagagtatgataagatacaaatcgctgatctgatggaagaaaagttccgcggagatgctggcttaggaaagctcatcaagatttttgaagatatcccaacactggaggacctggctgagaccctcaaaaaagagaaattaaaggtcaaaggcccagctctctctcggaagagaaagaaagaagttgacgccactagccccgcaccctccacctccagcactgtgaagacggaaggggcagaagctacgccaggggcacagaagagaaaaaagtccactaaagaaaaggcgggtcccaagggaagcaaagtttctgaagagcagactcagcccccatcacccgctggtgccggaatgagcaccgccatgggcagatctccgtcccccaaaacctccctttctgccccaccaaattcatcatcgaccgagaatcctaaaaccgtggctaagtgccaggtcactcctcggcgtaatgtattgcagaaaaggcccgtgatcgtcaaggtgttatctaccacaaaaccctttgagtacgaaactcccgagatggagaagaaaatcatgttccacgcaacagtggcgacccagactcagttttttcacgtaaaagttctgaatacatcgctcaaggaaaagttcaacggcaaaaagattatcattatctcagattacctggagtacgattccctccttgaagttaatgaggagagcacagtctctgaggccggacctaatcagacttttgaggttccaaacaaaattattaaccgcgctaaggaaaccttgaaaattgatatcctccacaagcaagcctctggcaatattgtgtacggcgtgtttatgttgcacaaaaagaccgtaaatcaaaaaacaaccatatacgagatccaagacgacagaggtaagatggatgtagtcgggaccgggcaatgccacaacattccctgtgaggagggcgacaagttgcagttgttctgtttcagacttagaaagaaaaaccagatgtccaagctcatctccgagatgcactcttttatccagatcaagaagaagacaaatccaagaaataatgatcctaagagcatgaagcttccacaggagcaacgccagctgccctacccatctgaggcttccactaccttcccagagagccatttgcggacccctcaaatgccccctactacccccagttcttcctttttcaccaaaaaatccgaggacacaatttcgaaaatgaatgacttcatgagaatgcaaatcctaaaagaggggtctcatttccccggacccttcatgacaagcatcgggccagctgaatcgcacccccatactcctcagatgcccccatcgaccccctcaagctcatttctgacgaccaagagcgaagacaccatctccaaaatgaacgatttcatgcggatgcaaatcctaaaggaaggcagccactttccgggtcctttcatgactagcattggacctgcagagtctcatccacatactcctcaaatgcctcccagcacaccatcctccagtttcctgaccaccctgaaaccgagactcaagactgaaccggaagaggtgtcaattgaggactcggctcaatcggatcttaaagaggtgatggtgctgaatgccactgagagcttcgtgtacgaacccaaagagcagaagaagatgtttcacgctacggtggccacagagaacgaggtgtttcgggttaaggtcttcaacatcgatctcaaagagaagttcacacctaaaaaaatcatcgccattgcaaactatgtctgccggaacggctttctggaggtttacccctttacgctggtggcagacgtcaacgctgaccgcaacatggaaattcctaagggccttatcagatctgcctccgtgactcctaagatcaatcagctgtgtagccaaactaagggaagtttcgtgaatggcgtcttcgaagtgcacaaaaagaacgtgagaggtgagttcacttattacgagattcaagataacaccgggaagatggaggtggtagtacatggtcgactcacaacaataaactgcgaagagggggacaagctcaagcttacatgcttcgaactcgctcccaagtctggcaatacaggagagctgcgttctgtcattcacagccatataaaagttattaagacacgaaagaacaaaaaggatattttaaatcctgattcatccatggaaactagccctgactttttcttctag

SEQ ID NO: 266348 - DNA, 2358 bp, Artificial Sequence
  derived and/or modified sequence
atgggcaagaagtacaagaacatcgtgctgctgaagggcctggaggtgatcaacgactaccacttcagaatggtgaagagcctgctgagcaacgacctgaagctgaacctgaagatgagagaggagtacgacaagatccagatcgccgacctgatggaggagaagttcagaggcgacgccggcctgggcaagctgatcaagatcttcgaggacatccccaccctggaggacctggccgagaccctgaagaaggagaagctgaaggtgaagggccccgccctgagcagaaagagaaagaaggaggtggacgccaccagccccgcccccagcaccagcagcaccgtgaagaccgagggcgccgaggccacccccggcgcccagaagagaaagaagagcaccaaggagaaggccggccccaagggcagcaaggtgagcgaggagcagacccagccccccagccccgccggcgccggcatgagcaccgccatgggcagaagccccagccccaagaccagcctgagcgccccccccaacagcagcagcaccgagaaccccaagaccgtggccaagtgccaggtgacccccagaagaaacgtgctgcagaagagacccgtgatcgtgaaggtgctgagcaccaccaagcccttcgagtacgagacccccgagatggagaagaagatcatgttccacgccaccgtggccacccagacccagttcttccacgtgaaggtgctgaacaccagcctgaaggagaagttcaacggcaagaagatcatcatcatcagcgactacctggagtacgacagcctgctggaggtgaacgaggagagcaccgtgagcgaggccggccccaaccagaccttcgaggtgcccaacaagatcatcaacagagccaaggagaccctgaagatcgacatcctgcacaagcaggccagcggcaacatcgtgtacggcgtgttcatgctgcacaagaagaccgtgaaccagaagaccaccatctacgagatccaggacgacagaggcaagatggacgtggtgggcaccggccagtgccacaacatcccctgcgaggagggcgacaagctgcagctgttctgcttcagactgagaaagaagaaccagatgagcaagctgatcagcgagatgcacagcttcatccagatcaagaagaagaccaaccccagaaacaacgaccccaagagcatgaagctgccccaggagcagagacagctgccctaccccagcgaggccagcaccaccttccccgagagccacctgagaaccccccagatgccccccaccacccccagcagcagcttcttcaccaagaagagcgaggacaccatcagcaagatgaacgacttcatgagaatgcagatcctgaaggagggcagccacttccccggccccttcatgaccagcatcggccccgccgagagccacccccacaccccccagatgccccccagcacccccagcagcagcttcctgaccaccaagagcgaggacaccatcagcaagatgaacgacttcatgagaatgcagatcctgaaggagggcagccacttccccggccccttcatgaccagcatcggccccgccgagagccacccccacaccccccagatgccccccagcacccccagcagcagcttcctgaccaccctgaagcccagactgaagaccgagcccgaggaggtgagcatcgaggacagcgcccagagcgacctgaaggaggtgatggtgctgaacgccaccgagagcttcgtgtacgagcccaaggagcagaagaagatgttccacgccaccgtggccaccgagaacgaggtgttcagagtgaaggtgttcaacatcgacctgaaggagaagttcacccccaagaagatcatcgccatcgccaactacgtgtgcagaaacggcttcctggaggtgtaccccttcaccctggtggccgacgtgaacgccgacagaaacatggagatccccaagggcctgatcagaagcgccagcgtgacccccaagatcaaccagctgtgcagccagaccaagggcagcttcgtgaacggcgtgttcgaggtgcacaagaagaacgtgagaggcgagttcacctactacgagatccaggacaacaccggcaagatggaggtggtggtgcacggcagactgaccaccatcaactgcgaggagggcgacaagctgaagctgacctgcttcgagctggcccccaagagcggcaacaccggcgagctgagaagcgtgatccacagccacatcaaggtgatcaagaccagaaagaacaagaaggacatcctgaaccccgacagcagcatggagaccagccccgacttcttcttctag

SEQ ID NO: 266349 - protein, 434 aa, Artificial Sequence
  derived and/or modified sequence
MLLWTAVLLFVPCVGKTVWLYLQAWPNPVFEGDALTLRCQGWKNTPLSQVKFYRDGKFLHFSKENQTLSMGAATVQSRGQYSCSGQVMYIPQTFTQTSETAMVQVQELFPPPVLSAIPSPEPREGSLVTLRCQTKLHPLRSALRLLFSFHKDGHTLQDRGPHPELCIPGAKEGDSGLYWCEVAPEGGQVQKQSPQLEVRVQAPVSRPVLTLHHGPADPAVGDMVQLLCEAQRGSPPILYSFYLDEKIVGNHSAPCGGTTSLLFPVKSEQDAGNYSCEAENSVSRERSEPKKLSLKGSQVLFTPASNWLVPWLPASLLGLMVIAAALLVYVRSWRKAGPLPSQIPPTAPGGEQCPLYANVHHQKGKDEGVVYSVVHRTSKRSEARSAEFTVGRKDSSIICAEVRCLQPSEVSSTEVNMRSRTLQEPLSDCEEVLC

SEQ ID NO: 266350 - protein, 397 aa, Artificial Sequence
  derived and/or modified sequence
MLLWTAVLLFVPCVGKTVWLYLQAWPNPVFEGDALTLRCQGWKNTPLSQVKFYRDGKFLHFSKENQTLSMGAATVQSRGQYSCSGQVMYIPQTFTQTSETAMVQVQELFPPPVLSAIPSPEPREGSLVTLRCQTKLHPLRSALRLLFSFHKDGHTLQDRGPHPELCIPGAKEGDSGLYWCEVAPEGGQVQKQSPQLEVRVQAPVSRPVLTLHHGPADPAVGDMVQLLCEAQRGSPPILYSFYLDEKIVGNHSAPCGGTTSLLFPVKSEQDAGNYSCEAENSVSRERSEPKKLSLKGSQVLFTPASNWLVPWLPASLLGLMVIAAALLVYVRSWRKAGPLPSQIPPTAPGGEQCPLYANVHHQKGKDEGVVYSVVHRTSKRSEGQFYHLCGGEMPAAQ

SEQ ID NO: 266351 - DNA, 1194 bp, Artificial Sequence
  derived and/or modified sequence
atgctgctgtggaccgccgtgctgctgttcgtgccctgcgtgggcaagaccgtgtggctgtacctgcaggcctggcccaaccccgtgttcgagggcgacgccctgaccctgagatgccagggctggaagaacacccccctgagccaggtgaagttctacagagacggcaagttcctgcacttcagcaaggagaaccagaccctgagcatgggcgccgccaccgtgcagagcagaggccagtacagctgcagcggccaggtgatgtacatcccccagaccttcacccagaccagcgagaccgccatggtgcaggtgcaggagctgttccccccccccgtgctgagcgccatccccagccccgagcccagagagggcagcctggtgaccctgagatgccagaccaagctgcaccccctgagaagcgccctgagactgctgttcagcttccacaaggacggccacaccctgcaggacagaggcccccaccccgagctgtgcatccccggcgccaaggagggcgacagcggcctgtactggtgcgaggtggcccccgagggcggccaggtgcagaagcagagcccccagctggaggtgagagtgcaggcccccgtgagcagacccgtgctgaccctgcaccacggccccgccgaccccgccgtgggcgacatggtgcagctgctgtgcgaggcccagagaggcagcccccccatcctgtacagcttctacctggacgagaagatcgtgggcaaccacagcgccccctgcggcggcaccaccagcctgctgttccccgtgaagagcgagcaggacgccggcaactacagctgcgaggccgagaacagcgtgagcagagagagaagcgagcccaagaagctgagcctgaagggcagccaggtgctgttcacccccgccagcaactggctggtgccctggctgcccgccagcctgctgggcctgatggtgatcgccgccgccctgctggtgtacgtgagaagctggagaaaggccggccccctgcccagccagatcccccccaccgcccccggcggcgagcagtgccccctgtacgccaacgtgcaccaccagaagggcaaggacgagggcgtggtgtacagcgtggtgcacagaaccagcaagagaagcgagggccagttctaccacctgtgcggcggcgagatgcccgccgcccagtag

SEQ ID NO: 266352 - DNA, 1422 bp, Artificial Sequence
  derived and/or modified sequence
caggccccatgctgctctggacggctgtgctgctctttgttccctgtgttgggaaaactgtctggctgtacctccaagcctggccaaaccctgtgtttgaaggagatgccctgactctgcgatgtcagggatggaagaatacaccactgtctcaggtgaagttctacagagatggaaaattccttcatttctctaaggaaaaccagactctgtccatgggagcagcaacagtgcagagccgtggccagtacagctgctctgggcaggtgatgtatattccacagacattcacacaaacttcagagactgccatggttcaagtccaagagctgtttccacctcctgtgctgagtgccatcccctctcctgagccccgagagggtagcctggtgaccctgagatgtcagacaaagctgcaccccctgaggtcagccttgaggctccttttctccttccacaaggacggccacaccttgcaggacaggggccctcacccagaactctgcatcccgggagccaaggagggagactctgggctttactggtgtgaggtggcccctgagggtggccaggtccagaagcagagcccccagctggaggtcagagtgcaggctcctgtatcccgtcctgtgctcactctgcaccacgggcctgctgaccctgctgtgggggacatggtgcagctcctctgtgaggcacagaggggctcccctccgatcctgtattccttctaccttgatgagaagattgtggggaaccactcagctccctgtggtggaaccacctccctcctcttcccagtgaagtcagaacaggatgctgggaactactcctgcgaggctgagaacagtgtctccagagagaggagtgagcccaagaagctgtctctgaagggttctcaagtcttgttcactcccgccagcaactggctggttccttggcttcctgcgagcctgcttggcctgatggttattgctgctgcacttctggtttatgtgagatcctggagaaaagctgggccccttccatcccagataccacccacagctccaggtggagagcagtgcccactatatgccaacgtgcatcaccagaaagggaaagatgaaggtgttgtctactctgtggtgcatagaacctcaaagaggagtgaaggacagttctatcatctgtgcggaggtgagatgcctgcagcccagtgaggtttcatccacggaggtgaatatgagaagcaggactctccaagaaccccttagcgactgtgaggaggttctctgctagtgatggtgttctcctatcaacacacgcccacccccagtctccagtgctcctcaggaagacagtggggtcctcaactctttctgtgggtccttcagttcccaagcccagcatcacagagccccctgagcccttgtcctggtc

SEQ ID NO: 266353 - DNA, 1194 bp, Artificial Sequence
  derived and/or modified sequence
atgctgctgtggaccgccgtgttgctcttcgtcccctgtgtgggaaagaccgtgtggttgtatctccaggcttggccaaatcccgtattcgagggcgacgcccttactctgcgctgccagggatggaagaacactcccttgtcccaggtgaagttttaccgggacggaaagtttctgcacttctccaaggagaaccagacattgtcaatgggggcagccaccgtccagagtcgcggacagtattcatgctctgggcaagttatgtatatcccgcagacttttacccaaactagcgagacagccatggtgcaagtgcaggaactctttcctccgccagttctttcagccattccctcccccgagccaagggaaggatctctcgtcaccctcagatgccaaacaaagctccacccactgagaagcgccctgcgcctcctgttttctttccataaggatggccatacgctccaagatcggggccctcacccggagctctgtattcccggcgctaaagagggggacagcggcttgtattggtgcgaagtagctcctgaaggagggcaggttcagaaacaaagtcctcagttagaagtgagagttcaggcccccgtcagccgccccgttctaaccttacatcacggccccgccgacccagccgttggagacatggtccaactgctatgtgaagcccagcgtggcagcccaccaatcctatactctttttaccttgatgaaaaaatagtgggcaatcactcagcaccgtgcggaggcacaacatcactgctgtttccagtgaagagcgagcaggatgctggaaactattcttgtgaggccgagaattctgtttccagggaacgcagtgagcccaagaagttgagcctgaaaggttctcaggtcctgttcacccctgcgagtaattggctggtgccttggcttcctgcttctttgctgggtctgatggtcatcgccgcagctctcctggtgtacgtgcgtagttggaggaaggccgggccactgccttctcagattcctcccactgcccctggaggagagcagtgtccgctgtatgcaaatgtgcatcaccagaagggcaaggatgaaggcgtagtgtactctgttgtacacaggacttcgaagcgaagcgaaggccagttttatcatttatgtgggggcgaaatgcccgccgcccagtag

SEQ ID NO: 266354 - DNA, 1194 bp, Artificial Sequence
  derived and/or modified sequence
atgctgctgtggacagctgtgctgctgtttgtgccctgtgtgggcaagacagtgtggctgtacctgcaggcctggcccaaccctgtgtttgaaggagatgccctgaccctgcgctgccagggctggaagaacacccccctgagccaggtgaagttctacagagatggcaagttcctgcacttcagcaaggagaaccagaccctgtccatgggcgccgccaccgtgcagagccggggccagtacagctgcagcggccaggtgatgtacatcccccagaccttcacccagaccagcgagacagccatggtgcaggtgcaggagctgttccccccacctgtgctgagcgccatccccagccctgagccccgggagggcagcctggtgaccctgcgctgccagaccaagctgcaccccctgcggagcgccctgcggctgctcttctccttccacaaggatggccacaccctgcaggaccggggcccccaccctgagctgtgcatccctggggccaaggagggggacagcggcctgtactggtgtgaggtggcccctgagggcggccaggtgcagaagcagagcccccagctggaggtgcgggtgcaggcccctgtgtccaggcctgtgctgaccctgcaccacggccctgctgaccctgctgtgggggacatggtgcagctgctgtgtgaggcccagaggggcagcccccccatcctgtacagcttctacctggatgagaagatcgtgggcaaccacagcgccccctgtggcggcaccaccagcctgctcttccctgtgaagtctgagcaggatgctggcaactacagctgtgaggctgaaaattctgtgtcccgggagaggtctgagcccaagaagctgagcctgaagggcagccaggtgctcttcaccccagccagcaactggctggtgccctggctgcctgccagcctgctgggcctgatggtgattgctgctgccctgctggtgtatgtgcgctcctggaggaaggccggccccctgcccagccagatccccccaacagcccctggaggagagcagtgccccctgtatgccaacgtgcaccaccagaagggcaaggatgagggcgtggtgtacagcgtggtgcacaggaccagcaagaggtctgagggccagttctaccacctgtgtggcggggagatgcctgctgcccagtag

SEQ ID NO: 266355 - DNA, 1194 bp, Artificial Sequence
  derived and/or modified sequence
atgctgctgtggaccgccgtgctgctgttcgtgccctgcgtgggcaaaactgtttggttatacctccaagcctggccaaacccagtttttgagggagacgcactcacactccgctgtcagggatggaagaacacacctttatcacaggtgaaattctaccgagatggtaaatttctgcacttctctaaagaaaatcagacactctccatgggagcggccacagtgcagagccgggggcaatattcatgtagcggacaggtgatgtacattcctcaaactttcacccagacctctgagaccgcaatggttcaggtgcaggaactattccccccgcctgtgctgagcgctatcccaagcccggagccccgtgagggcagcctggtgacactcagatgtcaaactaagttgcatcctctcaggagtgctctgcggctgctgttcagtttccacaaggatggtcacacgcttcaggaccgcggccctcacccagagctatgcattcccggtgctaaggaaggtgactccggtttatactggtgtgaggttgctcctgagggaggtcaagtgcaaaaacagtctccccagctcgaggttagggtgcaggctccagtatcccgccccgtgttgactcttcatcacggacctgctgaccccgccgtgggtgatatggttcagctcctctgcgaagctcaacggggcagcccacctattctgtacagcttctatttagatgagaagatcgttggtaatcactcggctccctgcggtgggacgactagtctgctctttcccgtaaagagtgagcaggatgccggcaattatagttgcgaggcagaaaacagtgtctcaagggaacgtagcgagcctaagaaactaagccttaaggggagccaggtgctctttaccccagcctcgaattggctggtgccgtggctccccgcctctctgttgggcctcatggttattgccgctgcattactagtttacgtgaggtcctggaggaaggcaggcccactgccctcacagatacctcctaccgcccctggcggggaacaatgtcctctgtacgcaaacgtgcatcaccagaagggcaaggatgaaggagtggtgtactctgtggtgcataggacatccaagcgcagtgagggacagttttaccacctgtgtgggggcgagatgcccgccgcccaatag

SEQ ID NO: 266356 - DNA, 1194 bp, Artificial Sequence
  derived and/or modified sequence
atgctgttgtggaccgccgttttgctctttgtgccctgcgtcggaaaaactgtttggctgtacctgcaagcctggcccaatcccgtgtttgaaggtgacgccctgactttgcggtgtcagggatggaagaatacgcctctgtctcaggtgaagttttatagagatggcaaatttcttcacttcagcaaggagaatcagactctatcaatgggcgcagcaaccgtccagtcgcgtggccaatacagctgctctggtcaggtgatgtacatcccgcagacctttacacagaccagcgagacagccatggtacaggtgcaggagttgttcccacctccagttctgtctgcaatcccttcaccggaacctagggaaggctcactcgtgactttaagatgccagacaaagctgcatcctctgcggtcagcactgcggctgcttttttcctttcacaaggacggacacaccctgcaggatcggggaccccacccggagctttgtattcctggcgctaaagaaggggactccggcctttactggtgcgaggtggcacctgaagggggacaagtgcagaagcaatccccccagctcgaggtcagggtgcaagcccctgtgagcagacctgtactgaccttacatcacggacctgctgaccccgcagtgggagatatggtgcagttgctgtgcgaggcacagcgcggttcgccgccaatcctctatagcttctacctggatgaaaagatcgtcggtaaccactcggctccatgtggaggcacaacctcactgctttttcctgtgaaatcagaacaggatgccggtaattactcatgcgaagcagagaactctgtgtcaagagaacgaagcgagccgaaaaaactgtctctaaagggaagtcaggtgcttttcactcctgcatcaaattggctggtgccgtggttgcccgcaagtcttctggggttgatggtcatcgccgctgcccttctggtgtatgtgaggtcatggcggaaagccggaccgctgccctctcagatacccccaactgccccaggcggagagcaatgcccattatatgctaacgtccaccaccagaagggaaaggacgagggagtggtgtacagcgtcgttcataggacctccaagcgcagcgagggacagttctaccacctttgtgggggtgagatgcctgccgcacagtag

SEQ ID NO: 266357 - protein, 521 aa, Artificial Sequence
  derived and/or modified sequence
MGRKKIQIQRITDERNRQVTFTKRKFGLMKKAYELSVLCDCEIALIIFNHSNKLFQYASTDMDKVLLKYTEYNEPHESRTNADIIETLRKKGFNGCDSPEPDGEDSLEQSPLLEDKYRRASEELDGLFRRYGSTVPAPNFAMPVTVPVSNQSSLQFSNPSGSLVTPSLVTSSLTDPRLLSPQQPALQRNSVSPGLPQRPASAGAMLGGDLNSANGACPSPVGNGYVSARASPGLLPVANGNSLNKVIPAKSPPPPTHSTQLGAPSRKPDLRVITSQAGKGLMHHLTEDHLDLNNAQRLGVSQSTHSLTTPVVSVATPSLLSQGLPFSSMPTAYNTDYQLTSAELSSLPAFSSPGGLSLGNVTAWQQPQQPQQPQQPQPPQQQPPQPQQPQPQQPQQPQQPPQQQSHLVPVSLSNLIPGSPLPHVGAALTVTTHPHISIKSEPVSPSRERSPAPPPPAVFPAARPEPGDGLSSPAGGSYETGDRDDGRGDFGPTLGLLRPAPEPEAEGSAVKRMRLDTWTLK

SEQ ID NO: 266358 - DNA, 5888 bp, Artificial Sequence
  derived and/or modified sequence
atatcaacaacagccgaggcggctcaggcgctcggccccggttccccgcttgcctgccgcccgcctgctggcccccgcgcccacgacgggggcccaggcctcacggcgccgcccagggcccgcgcggacgccggcctcatttattattctccccgcccggagctgcggcttcccggtgttgaagatcccccggaccaggggcgagggctacccgctctttgccgtgacaacaccgttcccccagccgggctggaggctgtgcagaaggtatcctgcagaccatgaactgagcactgttcccagaccgttcatgagcacagtgtaaggtgtgccgagacccaccacccagcgagcccctcccctccgtagcactgaggacccccggagaagatggggaggaaaaagattcagatccagcgaatcaccgacgagcggaaccgacaggtgactttcaccaagcggaagtttggcctgatgaagaaggcgtatgagctgagcgtgctatgtgactgcgagatcgcactcatcatcttcaaccactccaacaagctgttccagtacgccagcaccgacatggacaaggtgctgctcaagtacacggagtacaatgagccacacgagagccgcaccaacgccgacatcatcgagaccctgaggaagaagggcttcaatggctgcgacagccccgagcccgacggggaggactcgctggaacagagccccctgctggaggacaagtaccgacgcgccagcgaggagctcgacgggctcttccggcgctatgggtcaactgtcccggcccccaactttgccatgcctgtcacggtgcccgtgtccaatcagagctcactgcagttcagcaatcccagcggctccctggtcaccccttccctggtgacatcatccctcacggacccgcggctcctgtccccccagcagccagcactacagaggaacagtgtgtctcctggcctgccccagcggccagctagtgcgggggccatgctggggggtgacctgaacagtgctaacggagcctgccccagccctgttgggaatggctacgtcagtgctcgggcttcccctggcctcctccctgtggccaatggcaacagcctaaacaaggtcatccctgccaagtctccgcccccacctacccacagcacccagcttggagcccccagccgcaagcccgacctgcgagtcatcacttcccaggcaggaaaggggttaatgcatcacttgactgaggaccatttagatctgaacaatgcccagcgccttggggtctcccagtctactcattcgctcaccaccccagtggtttctgtggcaacgccgagtttactcagccagggcctccccttctcttccatgcccactgcctacaacacagattaccagttgaccagtgcagagctctcctccttaccagcctttagttcacctggggggctgtcgctaggcaatgtcactgcctggcaacagccacagcagccccagcagccgcagcagccacagcctccacagcagcagccaccgcagccacagcagccacagccacagcagcctcagcagccgcaacagccacctcagcaacagtcccacctggtccctgtatctctcagcaacctcatcccgggcagccccctgccccacgtgggtgctgccctcacagtcaccacccacccccacatcagcatcaagtcagaaccggtgtccccaagccgtgagcgcagccctgcgcctccccctccagctgtgttcccagctgcccgccctgagcctggcgatggtctcagcagcccagccgggggatcctatgagacgggagaccgggatgacggacggggggacttcgggcccacactgggcctgctgcgcccagccccagagcctgaggctgagggctcagctgtgaagaggatgcggcttgatacctggacattaaagtgacgattcccactcccctcctctcagcctccctgatgaagagttgacaatctcaccgcccgcccttccctgccccgggctcctcccgctcgacccccacttcctttcttgtgcttcgtgtcctgttgacggttacatttgtgtataattattatattattattattattattatattttttttaatttggattctcgctttggagagggggatgctctcatcccctctttctgtaccccccaccattttcactggctggggggctctctttttcgcgggaaggggggacactttgcacgttgtacacatatgctgcaggaagggggtggggggcccaataaggcctttgggaaaggacaggtgccgagccctgcatgtggagccctcccaccccacccccagatagagggaaataaccaaaaaactaccaaacaacagaaacccacactctagactgaaaccccaaagtgggcttgatgggtgggtttgtgtttcaaggggaaagtgaggcagaggttctgaaaagggtctctgtttttgtgttcatgtagccataggcacatggagcagaatacttaagcctggcccccaaatgcccctgcacacacacgtgccacacctgcgctgattcttgtgtgtgctgcacccccaaggtgtgtgggtgctggctgagctttgggccgggaaggcagcctgggaatctgaggctggagacaggggtttgaggtgggggcctctctggaagcacatttggagggaaagacaagagagccatgaggagagggctgaggagggcagaagggctaggcagggggcaaattgagcccctcccttccccagtttttctctaagatatacagtgcaatagctccccacccctcagttgacgccagccctgtaaagctggccacagtgtgcagggagaatggggagagggtcttcagtgaggtggctggggcgagagtcggcctggacttccctggggtgctccaggccagagctctttcattggggcgagtgtggtgaggggacgtccttggtcttgcacgcacactacctgggggagtcaacactgggatggtctgtggggtgggagggcctacggatgggtccgtagaggtcccacctccctcattcctccttggcccctctccctagcttctcctgttagctccttctgctcctgaccccacctccttgctcttggcgcccctattgtctctggctacctccttgtcccaccacctccaggctgcatcccaccttccctcttggctactgtaattgtaaatagcgacctttggaaaacgttagcggtgtaacagtccaggaaactgtttttttttgttgttgttgtattgatatgaaatgagattctatttttgtcaaagtatattgtaataataatgactcaaacggcccgtactgtacagacgagattcttctgctgttgttcttgctcccctcccctcctctgagtccgcccctccctgctgcctcctcagtggggcagtgggcaaggggcccaggggcagccgaagcacggggtcctgagacctcaggcaggattggagatcaaaccagagggggcaggcccccagcctgctctctaggatcaccccccgccctaaggggcctggcctggggtgacgtggccaggcagactgtctgccccactccttcacacaagcccagctcctctgcccaaggggtgcggcgcccccttggggtttcctcccagttggagagtagagttaagacaaggcccagttttgtgttagtcgaccgtctttgcccacctctatgacccagcctcttgcagtattcccatacttgatgcagggaaggaaccagaagcagaggggcctctacgcaggtacacacgtgtacctgagtgtgttcatgagggcatctggtgtttatgtgtctgagtgtagctttgtatttatgtgtgtgtgtgtgtgtatgtctgattgcacgggtgtacttttgtatttatgtgtgtgtgtggttgcacgggtgtgcctctgtgtgtctctgaccctggctgggtgtgtgtgcaaatctgtgtgactggagctctaggggcatctctgtgtctgagtgtgcctggtgtgtgtttacaaagggagagttggctgctccagctccacagccctgggaccccaactcctgtcttccctgctcctttccctgtgttcaccctcagctctgacacattgaactgcagttggggggattggcagttagccctctgtgcttctccctgcagccctacctctgccaaggtctctccctccagggacctctgcttccacccacatatgtccacttagtcacccacacttgacacagttcctggagtaccctcttcccccaaccccagacctgctttcagagcaaaactcaagtccctcttcctccgtgaagcttctccctcagctgagcagtgatcacttactcactcttaaccccaatccgctgactgggtggggacagcacgtccagccttcccacctctcctgcaggcttctagacggagtttcaaaaactgatgagcctcgatccagggcttgaaagaagccagggtgtaatcttgttcatgcatgcgtccccagagcctcgcccagtgcctggcacatagtaggcactcaataaatgctgaatgggtgaatagttgaatgataggtgctcaataaatgaatgaatggccttcccttctcaggctattcccaacattagtctgcccacctttctaggctgggcttggccaccattaaacacggggtgggggtgagggcccctgcaattcacggtgcaatattcaccagttttgccctctgcctcataaaggcaaacctggcttttgattaccatgtgtggatgtttcagtgtcctttcttctctgtccctggggatggggtggtctgtgaatatgtgacatttctgcagttcagtatccgaaggtttctcttgggggtaggggctcctgggcggccagatgaatgggtccctgggaacccagacctcagatgaggacttaatgtcttcttcctctcaagccaaattcgcctccacccactccctctgaagaactgggcatttgccaaagtaaccactggagtcatctaatggccctccccctccccaggtttcccacagctttcagggacagtgggcaagaggacacccccccccaccacctcagtggaacacaccattctccccccctcaacagcacactcagtgcagcaagactgacccctgaccccctcccagccctccctaccttggacaggaaggaagtaatgcaccttctcttgctgattatttatttgtttggagagacagaaatgtaaaagtgtatctagaaatatctatatctctatatatttttaactgactctttggaatcccctggggtggggtgaggggtaagtttaggctttcgcggaggggaggagacatggagcctgggaactccttgttctcccctctgctgcctctccccaccccttaaagcagttggtagaaggaatggtatttgtatggggggagggaggctggaatggagaatctggattctctcctcttccccattctccagagggagggaggtggtgaggaagaggaagggaggggcaggatgggccatggaggtgccccacccccacacctgacaatcacccacactcctggggctcttcctgggtcctggggcagggcgagtccaagtgtgaggctgttgatttgttttcaatatttcttttcgtgctgtatggtgatgctttcttagtattctacacaataagaaaagacaaagtcctcgagattcttatgagttttgtttgaaaactctttcactatatttgttgtaaagaggtttactattaaaagaaaaagaatacacgtttctgataaaaaaaaaaaaaaa

SEQ ID NO: 266359 - DNA, 1566 bp, Artificial Sequence
  derived and/or modified sequence
atgggcagaaagaaaattcagattcaacgcatcacagacgaacgaaatcgccaggtgactttcactaaacgcaaattcggtctgatgaaaaaggcatacgaactgtccgttctctgcgattgcgaaatcgccctgatcatctttaaccacagcaataagctctttcaatacgcttccactgacatggacaaggtgcttctgaaatatacggagtataacgagccccatgagagccgtaccaacgcggacatcattgagacacttaggaaaaaaggcttcaacggctgtgacagccccgaacctgatggggaggattcattagagcagagcccactgctcgaagataagtatcgtcgcgcgagcgaagagttagacggcttgttcaggaggtatggttctacagtccctgctcctaacttcgctatgcccgtaacggtacctgtgagcaatcagtccagccttcagttctccaatccttccggtagcctggttactccctctcttgttacttcatcactgacggaccctagactcctctccccacaacaacctgcactccagcgtaacagcgtgagcccggggctgccacaaaggcccgctagtgccggggcaatgctcggaggtgatctgaacagcgcaaatggagcgtgcccaagccctgtaggaaatgggtacgttagcgcccgagcaagccctggactcttgcccgtggcaaatgggaacagcttgaataaagtcatacccgctaaatctcctccgcccccaacgcattccacccaattaggcgcccctagccgaaagcctgaccttcgggttatcaccagccaggcgggaaagggtttaatgcaccatctgacagaagatcacctggacctgaacaatgcgcaaaggctgggtgtgagtcagagcacccacagcttgactaccccagtcgtcagcgtcgccacaccctctttactgagtcaagggctgcccttctccagcatgccgacagcctacaacacggattaccagcttacctcagccgagctgtcttcactaccagctttctcgtctcctgggggcctatccctagggaacgtgactgcatggcagcaaccacagcagccccagcagccccagcagccgcagccccctcagcagcagccccctcagcctcagcaaccacagcctcagcagccacaacagccccagcagcccccacagcagcagtctcacctggtcccagtaagcctgagtaatctaatcccggggtcccctctgcctcatgtcggtgccgccctgaccgtcacaactcatccacatattagcatcaagtctgagcccgtctctccttcaagagagaggtctcctgccccacctccacctgctgtgttccccgctgctcgacccgaaccaggcgacggactctcctcacccgctggcgggtcttacgaaaccggagaccgcgatgatggtcggggcgattttggaccaacactaggcttgctgaggcctgcccctgagcctgaggccgagggcagcgccgtcaaacggatgcgactggatacgtggacattgaagtag

SEQ ID NO: 266360 - DNA, 1566 bp, Artificial Sequence
  derived and/or modified sequence
atgggcaggaagaagatccagatccagaggatcacagatgaaagaaaccggcaggtgaccttcaccaagaggaagtttggcctgatgaagaaggcctatgagctgtctgtgctgtgtgactgtgaaattgccctgatcatcttcaaccacagcaacaagctgttccagtatgccagcacagacatggacaaggtgctgctgaagtacacagagtacaatgagccccatgagagcaggaccaatgctgacatcatcgagaccctgaggaagaagggcttcaacggctgtgacagccctgagccagatggagaggacagcctggagcagagccccctgctggaggacaagtaccgccgggccagcgaggagctggatggcctcttcagaagatatggcagcacagtgcctgcccccaactttgccatgcctgtgacagtgcctgtgagcaaccagagcagcctgcagttcagcaaccccagcggcagcctggtgacccccagcctggtgaccagcagcctgacagacccccggctgctgagcccccagcagcctgccctgcagaggaacagcgtgtccccaggcctgccccagaggcctgccagcgctggggccatgctgggcggggacctgaacagcgccaacggggcctgccccagccctgtgggcaatggctacgtgtctgcccgggccagccctggcctgctgcctgtggccaatggaaacagcctgaacaaggtgatcccagccaagagccccccaccacccacccacagcacccagctgggcgcccccagcaggaagccagacctgcgggtcatcaccagccaggccggcaagggcctgatgcaccacctgacagaggaccacctggacctgaacaatgcccagaggctgggcgtgtcccagagcacccacagcctgaccacccctgtggtgtctgtggccacccccagcctgctgagccagggcctgcccttcagctccatgcccacagcctacaacacagactaccagctgaccagcgctgagctgagcagcctgcctgccttcagcagccctgggggcctgagcctgggcaatgtgacagcctggcagcagccccagcagccccagcagccccagcagccccagcccccccagcagcagcccccccagccccagcagccccagccccagcagccccagcagccccagcagcccccccagcagcagagccacctggtgcctgtgtccctgagcaacctgatccctggcagccccctgccccacgtgggcgccgccctgactgtgaccacccacccccacatcagcatcaagtctgagcctgtgagccccagccgggagaggagccctgcccctcctcctcctgctgtgtttcctgctgcccggcctgagcctggagatggcctgagcagccctgctgggggcagctatgagaccggggacagagatgatggccgcggggactttggccccaccctgggcctgctgcggcctgcccctgagcctgaggccgagggcagcgctgtgaagaggatgaggctggacacctggaccctgaagtag

SEQ ID NO: 266361 - DNA, 5965 bp, Artificial Sequence
  derived and/or modified sequence
ctcaagctaggctgagctgtgcctacgtcggcctcgactcccgggggctggaggagttacctttggagcccgaaaggaggaaggaagcaaaatatcaacaacagccgaggcggctcaggcgctcggccccggttccccgcttgcctgccgcccgcctgctggcccccgcgcccacgacgggggcccaggcctcacggcgccgcccagggcccgcgcggacgccggcctcatttattattctccccgcccggagctgcggcttcccggtgttgaagatcccccggaccaggggcgagggctacccgctctttgccgtgacaacaccgttcccccagccgggctggaggctgtgcagaaggtatcctgcagaccatgaactgagcactgttcccagaccgttcatgagcacagtgtaaggtgtgccgagacccaccacccagcgagcccctcccctccgtagcactgaggacccccggagaagatggggaggaaaaagattcagatccagcgaatcaccgacgagcggaaccgacaggtgactttcaccaagcggaagtttggcctgatgaagaaggcgtatgagctgagcgtgctatgtgactgcgagatcgcactcatcatcttcaaccactccaacaagctgttccagtacgccagcaccgacatggacaaggtgctgctcaagtacacggagtacaatgagccacacgagagccgcaccaacgccgacatcatcgagaccctgaggaagaagggcttcaacggctgcgacagccccgagcccgacggggaggactcgctggaacagagccccctgctggaggacaagtaccgacgcgccagcgaggagctcgacgggctcttccggcgctatgggtcaactgtcccggcccccaactttgccatgcctgtcacggtgcccgtgtccaatcagagctcactgcagttcagcaatcccagcggctccctggtcaccccttccctggtgacatcatccctcacggacccgcggctcctgtccccccagcagccagcactacagaggaacagtgtgtctcctggcctgccccagcggccagctagtgcgggggccatgctggggggtgacctgaacagtgctaacggagcctgccccagccctgttgggaatggctacgtcagtgctcgggcttcccctggcctcctccctgtggccaatggcaacagcctaaacaaggtcatccctgccaagtctccacccccacctacccacagcacccagcttggagcccccagccgcaagcccgacctgcgagtcatcacttcccaggcaggaaaggggttaatgcatcacttgactgaggaccatttagatctgaacaatgcccagcgccttggggtctcccagtctactcattcgctcaccaccccagtggtttctgtggcaacgccgagtttactcagccagggcctccccttctcttccatgcccactgcctacaacacagattaccagttgaccagtgcagagctctcctccttaccagcctttagttcacctggggggctgtcgctaggcaatgtcactgcctggcaacagccacagcagccccagcagccgcagcagccacagcctccacagcagcagccaccgcagccacagcagccacagccacagcagcctcagcagccgcaacagccacctcagcaacagtcccacctggtccctgtatctctcagcaacctcatcccgggcagccccctgccccacgtgggtgctgccctcacagtcaccacccacccccacatcagcatcaagtcagaaccggtgtccccaagccgtgagcgcagccctgcgcctccccctccagctgtgttcccagctgcccgccctgagcctggcgatggtctcagcagcccagccgggggatcctatgagacgggagaccgggatgacggacggggggacttcgggcccacactgggcctgctgcgcccagccccagagcctgaggctgagggctcagctgtgaagaggatgcggcttgatacctggacattaaagtgacgattcccactcccctcctctcagcctccctgatgaagagttgacaatctcaccgcccgcccttccctgccccgggctcctcccgctcgacccccacttcctttcttgtgcttcgtgtcctgttgacggttacatttgtgtataattattatattattattattattattatattttttttaatttggattctcgctttggagagggggatgctctcatcccctctttctgtaccccccaccattttcactggctggggggctctctttttcgcgggaaggggggacactttgcacgttgtacacatatgctgcaggaagggggtggggggcccaataaggcctttgggaaaggacaggtgccgagccctgcatgtggagccctcccaccccacccccagatagagggaaataaccaaaaaactaccaaacaacagaaacccacactctagactgaaaccccaaagtgggcttgatgggtgggtttgtgtttcaaggggaaagtgaggcagaggttctgaaaagggtctctgtttttgtgttcatgtagccataggcacatggagcagaatacttaagcctggcccccaaatgcccctgcacacacacgtgccacacctgcgctgattcttgtgtgtgctgcacccccaaggtgtgtgggtgctggctgagctttgggccgggaaggcagcctgggaatctgaggctggagacaggggtttgaggtgggggcctctctggaagcacatttggagggaaagacaagagagccatgaggagagggctgaggagggcagaagggctaggcagggggcaaattgagcccctcccttccccagtttttctctaagatatacagtgcaatagctccccacccctcagttgacgccagccctgtaaagctggccacagtgtgcagggagaatggggagagggtcttcagtgaggtggctggggcgagagtcggcctggacttccctggggtgctccaggccagagctctttcattggggcgagtgtggtgaggggacgtccttggtcttgcacgcacactacctgggggagtcaacactgggatggtctgtggggtgggagggcctacggatgggtccgtagaggtcccacctccctcattcctccttggcccctctccctagcttctcctgttagctccttctgctcctgaccccacctccttgctcttggcgcccctattgtctctggctacctccttgtcccaccacctccaggctgcatcccaccttccctcttggctactgtaattgtaaatagcgacctttggaaaacgttagcggtgtaacagtccaggaaactgtttttttttgttgttgttgtattgatatgaaatgagattctatttttgtcaaagtatattgtaataataatgactcaaacggcccgtactgtacagacgagattcttctgctgttgttcttgctcccctcccctcctctgagtccgcccctccctgctgcctcctcagtggggcagtgggcaaggggcccaggggcagccgaagcacggggtcctgagacctcaggcaggattggagatcaaaccagagggggcaggcccccagcctgctctctaggatcaccccccgccctaaggggcctggcctggggtgacgtggccaggcagactgtctgccccactccttcacacaagcccagctcctctgcccaaggggtgcggcgcccccttggggtttcctcccagttggagagtagagttaagacaaggcccagttttgtgttagccgaccgtctttgcccacctctatgacccagcctcttgcagtattcccatacttgatgcagggaaggaaccagaagcagaggggcctctacgcaggtacacacgtgtacctgagtgtgttcatgagggcatctggtgtttatgtgtctgagtgtagctttgtatttatgtgtgtgtgtgtgtgtatgtctgattgcacgggtgtacttttgtatttatgtgtgtgtgtggttgcacgggtgtgcctctgtgtgtctctgaccctggctgggtgtgtgtgcaaatctgtgtgactggagctctaggggcatctctgtgtctgagtgtgcctggtgtgtgtttacaaagggagagttggctgctccagctccacagccctgggaccccaactcctgtcttccctgctcctttccctgtgttcaccctcagctctgacacattgaactgcagttggggggattggcagttagccctctgtgcttctccctgcagccctacctctgccaaggtctctccctccagggacctctgcttccacccacatatgtccacttagtcacccacacttgacacagttcctggagtaccctcttcccccaaccccagacctgctttcagagcaaaactcaagtccctcttcctccgtgaagcttctccctcagctgagcagtgatcacttactcactcttaaccccaatccgctgactgggtggggacagcacgtccagccttcccacctctcctgcaggcttctagacggagtttcaaaaactgatgagcctcgatccagggcttgaaagaagccagggtgtaatcttgttcatgcatgcgtccccagagcctcgcccagtgcctggcacatagtaggcactcaataaatgctgaatgggtgaatagttgaatgataggtgctcaataaatgaatgaatggccttcccttctcaggctattcccaccattagtctgcccacctttctaggctgggcttggccaccattaaacacggggtgggggtgagggcccctgcaattcacggtgcaatattcaccagttttgccctctgcctcataaaggcaaacctggcttttgattaccatgtgtggatgtttcagtgtcctttcttctctgtccctggggatggggtggtctgtgaatatgtgacatttctgcagttcagtatccgaaggtttctcttgggggtaggggctcctgggcggccagatgaatgggtccctgggaacccagacctcagatgaggacttaatgtcttcttcctctcaagccaaattcgcctccacccactccctctgaagaactgggcatttgccaaagtaaccactggagtcatctaatggccctccccctccccaggtttcccacagctttcagggacagtgggcaagaggacacccccccccaccacctcagtggaacacaccattctccccccctcaacagcacactcagtgcagcaagactgacccctgaccccctcccagccctccctaccttggacaggaaggaagtaatgcaccttctcttgctgattatttatttgtttggagagacagaaatgtaaaagtgtatctagaaatatctatatctctatatatttttaactgactctttggaatcccctggggtggggtgaggggtaagtttaggctttcgcggaggggaggagacatggagcctgggaactccttgttctcccctctgctgcctctccccaccccttaaagcagttggtagaaggaatggtatttgtatggggggagggaggctggaatggagaatctggattctctcctcttccccattctccagagggagggaggtggtgaggaagaggaagggaggggcaggatgggccatggaggtgccccacccccacacctgacaatcacccacactcctggggctcttcctgggtcctggggcagggcgagtccaagtgtgaggctgttgatttgttttcaatatttcttttcgtgctgtatggtgatgctttcttagtattctacacaataagaaaagacaaagtcctcgagattcttatgagttttgtttgaaaactctttcactatatttgttgtaaagaggtttactattaaaagaaaaagaatacacgtttctgata

SEQ ID NO: 266362 - DNA, 1566 bp, Artificial Sequence
  derived and/or modified sequence
atgggccggaagaagatccagatccagcggatcaccgacgagcggaaccggcaggtaaccttcaccaagagaaagttcggcttgatgaaaaaggcatacgagctcagcgtcctttgtgattgtgagatagcactgattatattcaaccacagcaataaattattccagtacgcatcaacggacatggacaaggtgctgttgaaatataccgagtacaacgaaccacacgagtctcgtacgaatgcagatatcatcgagacactgcggaaaaagggctttaatggctgcgattccccagaacctgatggagaggattcgctcgaacagtcaccactgctggaggacaaatacagaagggcaagtgaagaactcgacggtctatttaggaggtacggctcaaccgtgccggcaccgaacttcgcaatgcccgtgaccgtgccggtatcaaaccagagttctttgcaattttcaaacccatctgggagcctcgtgaccccttctctggtcaccagttctctcacagacccaagactgctgagccctcagcagccggctctccaacggaactccgtctcccctggtctgcctcagagacccgcctccgccggagcaatgttagggggtgatctgaactctgccaatggtgcatgcccatcccccgtcggcaatgggtatgtgagcgcgagagccagtcccgggttgctcccagtcgccaacggaaatagtctcaacaaggtcatccctgccaagagcccgcctcctcccacacattccacgcagttgggcgcaccctcaaggaaacctgatctacgcgtgatcacctcacaggcggggaaagggctcatgcatcatctcaccgaggatcacctggacctcaacaatgcccagcgcctgggtgtgagccagtcaacccatagtctgaccacacctgtggttagcgtagccacaccctccctattgtcgcaggggctgcctttctcctctatgccaaccgcttataacacagattatcagctgactagcgccgagctgtccagtcttcctgcattttcatcgcccggcggcctgtcactgggtaacgtaactgcttggcagcaaccacaacagccccagcagccccagcagccacagcctcctcagcaacagccgccccagccccaacaaccccagccgcagcagccacagcagcctcagcagccgccccagcaacagtcccatttggttccagtgagcttgagcaatttgattcccgggagcccactgccccacgtgggcgccgctctaaccgtcaccactcacccccatatcagcattaagtctgagcctgtgagcccatctcgcgagagatctcctgcacctccacccccggccgtctttccggctgcccgacctgaaccaggtgatggcctgtcaagccctgctggaggctcttacgagaccggtgatcgcgacgatggcagaggcgacttcgggcctactctcggactgctgagacctgcgcccgaaccggaagccgagggaagcgccgtaaaacgcatgcgcctggacacttggactctgaagtag

SEQ ID NO: 266363 - DNA, 1566 bp, Artificial Sequence
  derived and/or modified sequence
atgggaagaaaaaagattcagatccagagaataacggacgagcgtaatcgacaggtgactttcacaaagcgaaaatttggcctgatgaaaaaggcatacgagttgtccgtgctgtgcgactgtgagattgcactcatcattttcaatcacagtaacaagctgttccagtatgccagcaccgatatggataaggtgctcttgaagtataccgaatataatgaaccacacgagtccaggacaaacgcagacatcattgagaccttacggaagaaaggatttaacggctgtgacagtcctgagcccgacggggaggattcactcgaacaatcccctctgctagaggataagtacaggagggcgtcggaggaactggacggactatttagaagatatggtagtaccgtgccggcaccaaatttcgccatgccagtgactgtgcctgtgagcaaccaatcttctttacaattctcgaatccctccgggtccctggtcacacccagccttgtgacctcaagccttaccgaccctcggctcctgagcccgcagcaacctgcactgcaacggaactccgtcagccccggactgccccaaaggcctgcgagcgccggagccatgctgggcggagacctgaactccgccaatggagcttgtccatccccagtggggaacgggtacgtgagcgccagagcaagtcccggtttgttgccagtcgccaacggaaactcactgaataaggtgattccggctaaaagccctcctccacccacacactccacacagttaggagcaccaagtagaaaacccgacctgcgtgtgatcaccagccaagcgggtaaaggcttaatgcaccatttgacggaagatcatctcgacttgaacaacgcgcagcggctcggcgtcagccagagcacccactccttgacaactcctgttgtcagtgtcgcaaccccatcactccttagccagggactgccattttcctccatgcccactgcctataacactgattatcaacttactagcgcagaactctcctctcttcccgctttctccagccccggaggcctaagcttaggaaatgttactgcttggcagcagccccagcagccacagcagccccaacaaccacagccaccccagcagcagccccctcagccgcaacagccgcagccccagcagccacagcagccccaacagcccccacagcagcagtcccatctggtgcccgtgagcctttcaaacctgatccccggttcccctttaccacatgtgggggctgccctcacagtgactacgcacccacatatctctatcaaatctgagccagtgtctcccagtcgcgagcggagtcccgctcctcccccaccagctgtcttcccggctgccagacccgaacccggtgacggtctgagtagccctgccggtggtagctacgaaacaggcgacagggacgatggcagaggggatttcggtcctacacttggcctgttaagacccgcacccgagccggaggccgaggggtcagcagtcaagcgcatgagactggatacatggaccctcaagtag

SEQ ID NO: 266364 - DNA, 1566 bp, Artificial Sequence
  derived and/or modified sequence
atgggcagaaagaagatccagatccagagaatcaccgacgagagaaacagacaggtgaccttcaccaagagaaagttcggcctgatgaagaaggcctacgagctgagcgtgctgtgcgactgcgagatcgccctgatcatcttcaaccacagcaacaagctgttccagtacgccagcaccgacatggacaaggtgctgctgaagtacaccgagtacaacgagccccacgagagcagaaccaacgccgacatcatcgagaccctgagaaagaagggcttcaacggctgcgacagccccgagcccgacggcgaggacagcctggagcagagccccctgctggaggacaagtacagaagagccagcgaggagctggacggcctgttcagaagatacggcagcaccgtgcccgcccccaacttcgccatgcccgtgaccgtgcccgtgagcaaccagagcagcctgcagttcagcaaccccagcggcagcctggtgacccccagcctggtgaccagcagcctgaccgaccccagactgctgagcccccagcagcccgccctgcagagaaacagcgtgagccccggcctgccccagagacccgccagcgccggcgccatgctgggcggcgacctgaacagcgccaacggcgcctgccccagccccgtgggcaacggctacgtgagcgccagagccagccccggcctgctgcccgtggccaacggcaacagcctgaacaaggtgatccccgccaagagcccccccccccccacccacagcacccagctgggcgcccccagcagaaagcccgacctgagagtgatcaccagccaggccggcaagggcctgatgcaccacctgaccgaggaccacctggacctgaacaacgcccagagactgggcgtgagccagagcacccacagcctgaccacccccgtggtgagcgtggccacccccagcctgctgagccagggcctgcccttcagcagcatgcccaccgcctacaacaccgactaccagctgaccagcgccgagctgagcagcctgcccgccttcagcagccccggcggcctgagcctgggcaacgtgaccgcctggcagcagccccagcagccccagcagccccagcagccccagcccccccagcagcagcccccccagccccagcagccccagccccagcagccccagcagccccagcagcccccccagcagcagagccacctggtgcccgtgagcctgagcaacctgatccccggcagccccctgccccacgtgggcgccgccctgaccgtgaccacccacccccacatcagcatcaagagcgagcccgtgagccccagcagagagagaagccccgccccccccccccccgccgtgttccccgccgccagacccgagcccggcgacggcctgagcagccccgccggcggcagctacgagaccggcgacagagacgacggcagaggcgacttcggccccaccctgggcctgctgagacccgcccccgagcccgaggccgagggcagcgccgtgaagagaatgagactggacacctggaccctgaagtag

SEQ ID NO: 266365 - protein, 143 aa, Artificial Sequence
  derived and/or modified sequence
MPGNIVFVLKKGNDNWATVMFNGQKGLVPCNYLEPVELRIHPQQQPQEESSPQSDIPAPPSSKAPGRPQLSPGQKQKEEPKEVKLSVPMPYTLKVHYKYTVVMKTQPGLPYSQVRDMVSKKLELRLEHTKLSYRPRDSNELVP

SEQ ID NO: 266366 - protein, 56 aa, Artificial Sequence
  derived and/or modified sequence
MPYTLKVHYKYTVVMKTQPGLPYSQVRDMVSKKLELRLEHTKLSYRPRDSNELVPL

SEQ ID NO: 266367 - protein, 231 aa, Artificial Sequence
  derived and/or modified sequence
MELSGEMVRKCDPHIGLLHRGTEKLIEYKTYLQALPYFDRLDYVSMMCNEQAYSLAVEKLLNIRPPPRAQWIRVLFGEITRLLNHIMAVTTHALDLGAMTPFFWLFEEREKMFEFYERVSGARMHAAYIRPGGVHQDLPLGLMDDIYQFSKNFSLRLDELEELLTNNRIWRNRTIDIGVVTAEEALNYGFSGVMLRGSGIQWDLRKTQPYDVYDQVEFDVPVGSRGDCYDR

SEQ ID NO: 266368 - DNA, 696 bp, Artificial Sequence
  derived and/or modified sequence
atggaactctctggcgaaatggtgcgtaaatgtgaccctcacattggtctgcttcacaggggtaccgagaaacttattgagtacaagacctacctgcaggcccttccatactttgacagactagattacgtctctatgatgtgtaacgaacaagcttactctttagccgtggagaaactgctcaacataagacctccacccagagctcagtggataagggttttgttcggcgagattactcgtctgctcaatcacattatggccgtcacaacccatgctctggatttgggtgctatgactcctttcttctggctgttcgaagagcgagaaaaaatgtttgaattctacgagagagttagcggcgcccgcatgcatgctgcatacatcagacccggaggggtccaccaggatctccccctggggctgatggatgatatttatcagttcagcaagaatttctccctacgcctcgacgaactcgaagagttactgactaacaaccggatctggagaaaccgtactattgacatcggggtcgtgaccgctgaagaggcactgaattacgggttctccggcgtgatgttaaggggaagcggtattcaatgggacctgcgcaaaacccaaccatatgatgtgtacgatcaggttgagtttgatgtccccgtcggttccagaggggactgctacgatcggtag

SEQ ID NO: 266369 - DNA, 162 bp, Artificial Sequence
  derived and/or modified sequence
atgttcgagttctacgagcgggtgagtggggctcggatgcatgccgcttacatacgccccggaggggtgcaccaagacctgcctctgggcctcatggacgatatctaccagttcagcaagaatttcagtctgaggttagacgagctggaggaggtttcttag

SEQ ID NO: 266370 - DNA, 696 bp, Artificial Sequence
  derived and/or modified sequence
atggagctgagcggggagatggtgaggaaatgtgacccccacatcggcctgctgcaccggggcacagagaagctgattgagtacaagacctacctgcaggccctgccctactttgaccggctggactatgtgtccatgatgtgcaatgagcaggcctacagcctggccgtggagaagctgctgaacatccggcccccaccccgggcccagtggatccgggtgctgtttggagagatcacccggctgctgaaccacatcatggctgtgaccacccacgccctggacctgggcgccatgacccccttcttctggctgtttgaggagcgggagaagatgtttgagttctatgaaagagtgtctggggccaggatgcacgccgcctacatccggcctggaggagtgcaccaggacctgcccctgggcctgatggatgacatctaccagttcagcaagaacttcagcctgcggctggatgagctggaggagctgctgaccaacaaccgcatctggaggaacagaaccattgatattggagtggtgacagctgaggaggccctgaactacggcttctctggagtgatgctgcggggcagcggcatccagtgggacctgaggaagacccagccctatgatgtgtatgaccaggtggagtttgatgtgcctgtgggcagcagaggagactgctatgacagatag

SEQ ID NO: 266371 - DNA, 162 bp, Artificial Sequence
  derived and/or modified sequence
atgtttgagttctatgagcgggtgtctggggccaggatgcatgctgcctacatccggcctgggggcgtgcaccaggacctgcccctgggcctgatggatgacatctaccagttcagcaagaacttcagcctgcggctggatgagctggaggaggtgtcctag

SEQ ID NO: 266372 - DNA, 696 bp, Artificial Sequence
  derived and/or modified sequence
atggagctgagcggcgagatggtgcggaagtgcgacccccacatcggtttgctccatagaggaacagagaaacttatagaatataagacttatcttcaggccctaccatattttgatcgactggattatgtgtcaatgatgtgtaacgagcaggcgtactctcttgccgtggagaaactcttaaacatcagaccaccgccgagggctcagtggatccgggtgctgttcggcgaaatcacccggctcttgaaccacataatggccgtgacaacccacgccttagacctcggggccatgacaccctttttttggttattcgaagagagagagaagatgttcgaattttatgagcgcgtgtcaggcgctcgaatgcacgccgcctatattcgacctggtggagtccaccaggaccttcctttagggctaatggatgatatttatcagttttctaaaaatttttccttgcgcctcgacgagttagaggagctgctcaccaataacaggatatggagaaatcgtacaatagacattggcgtcgtgactgctgaggaggcgttaaattacggattttcaggtgtaatgttaagggggagcggaatccagtgggacctgagaaagacccagccatacgacgtttatgaccaagtcgaattcgacgtgcccgtgggttccagaggggactgttatgaccggtag

SEQ ID NO: 266373 - DNA, 162 bp, Artificial Sequence
  derived and/or modified sequence
atgttcgagttctacgagcgggtgagcggcgcccggatgcacgccgcatacatccggccaggaggcgtgcaccaggacctgcccctcgggttgatggacgatatatatcaattctcaaaaaacttctctctgaggctcgatgaattggaagaggttagttag

SEQ ID NO: 266374 - DNA, 696 bp, Artificial Sequence
  derived and/or modified sequence
atggaactgtccggcgagatggtgcgcaaatgcgacccccatatcgggctgctgcatagaggaaccgagaagcttattgagtataagacctacctgcaggccctgccctattttgatcgcctggactacgtgagcatgatgtgtaacgaacaggcatacagcttggcggtggagaagttactgaacatcaggcccccaccacgagcacagtggattcgcgtgctctttggcgagataactcgtcttctgaaccatattatggcggtgacaacacacgcccttgacctaggcgcaatgacaccgttcttctggctcttcgaagagagggagaagatgtttgaattttacgagcgtgtgagtggcgcacgaatgcacgctgcctacatcagaccgggaggggtccatcaggaccttccattgggtttgatggacgatatataccagttttcaaagaacttttctctacggctcgatgaactcgaagaactgttgactaacaatcggatatggaggaacagaaccattgatatcggagtggtcacagccgaagaggcgcttaattacggtttctcgggagttatgctccggggttccggcatccagtgggacctgaggaagacccagccatacgacgtatacgatcaagtggagttcgatgtaccagttggttctagaggggattgctacgatcgctag

SEQ ID NO: 266375 - DNA, 162 bp, Artificial Sequence
  derived and/or modified sequence
atgtttgaattttacgagagggtgtctggtgctcggatgcatgcggcatatataaggcctggaggggtccaccaagacctgccactcgggctgatggacgatatctaccagttcagtaagaactttagtctccgcttggatgagctggaagaggtgagctag

SEQ ID NO: 266376 - DNA, 696 bp, Artificial Sequence
  derived and/or modified sequence
atggagctgagcggcgagatggtgagaaagtgcgacccccacatcggcctgctgcacagaggcaccgagaagctgatcgagtacaagacctacctgcaggccctgccctacttcgacagactggactacgtgagcatgatgtgcaacgagcaggcctacagcctggccgtggagaagctgctgaacatcagacccccccccagagcccagtggatcagagtgctgttcggcgagatcaccagactgctgaaccacatcatggccgtgaccacccacgccctggacctgggcgccatgacccccttcttctggctgttcgaggagagagagaagatgttcgagttctacgagagagtgagcggcgccagaatgcacgccgcctacatcagacccggcggcgtgcaccaggacctgcccctgggcctgatggacgacatctaccagttcagcaagaacttcagcctgagactggacgagctggaggagctgctgaccaacaacagaatctggagaaacagaaccatcgacatcggcgtggtgaccgccgaggaggccctgaactacggcttcagcggcgtgatgctgagaggcagcggcatccagtgggacctgagaaagacccagccctacgacgtgtacgaccaggtggagttcgacgtgcccgtgggcagcagaggcgactgctacgacagatag

SEQ ID NO: 266377 - DNA, 162 bp, Artificial Sequence
  derived and/or modified sequence
atgttcgagttctacgagagagtgagcggcgccagaatgcacgccgcctacatcagacccggcggcgtgcaccaggacctgcccctgggcctgatggacgacatctaccagttcagcaagaacttcagcctgagactggacgagctggaggaggtgagctag

SEQ ID NO: 266378 - protein, 327 aa, Artificial Sequence
  derived and/or modified sequence
MLGFITRPPHRFLSLLCPGLRIPQLSVLCAQPRPRAMAISSSSCELPLVAVCQVTSTPDKQQNFKTCAELVREAARLGACLAFLPEAFDFIARDPAETLHLSEPLGGKLLEEYTQLARECGLWLSLGGFHERGQDWEQTQKIYNCHVLLNSKGAVVATYRKTHLCDVEIPGQGPMCESNSTMPGPSLESPVSTPAGKIGLAVCYDMRFPELSLALAQAGAEILTYPSAFGSITGPAHWEVLLRARAIETQCYVVAAAQCGRHHEKRASYGHSMVVDPWGTVVARCSEGPGLCLARIDLNYLRQLRRHLPVFQHRRPDLYGNLGHPLS

SEQ ID NO: 266379 - DNA, 1362 bp, Artificial Sequence
  derived and/or modified sequence
gcccactcgctgcggcgcttctggctccagaccgccctccggatcggaccctgcgaatggttttggctatatcttcatgctgggcttcatcaccaggcctcctcacagattcctgtcccttctgtgtcctggactccggatacctcaactctcagtactttgtgctcagcccaggcccagagccatggctatctcctcttcctcctgcgaactgcccctggtggctgtgtgccaggtaacatcgacgccagacaagcaacagaactttaaaacatgtgctgagctggttcgagaggctgccagactgggtgcctgcctggctttcctgcctgaggcatttgacttcattgcacgggaccctgcagagacgctacacctgtctgaaccactgggtgggaaacttttggaagaatacacccagcttgccagggaatgtggactctggctgtccttgggtggtttccatgagcgtggccaagactgggagcagactcagaaaatctacaattgtcacgtgctgctgaacagcaaaggggcagtagtggccacttacaggaagacacatctgtgtgacgtagagattccagggcaggggcctatgtgtgaaagcaactctaccatgcctgggcccagtcttgagtcacctgtcagcacaccagcaggcaagattggtctagctgtctgctatgacatgcggttccctgaactctctctggcattggctcaagctggagcagagatacttacctatccttcagcttttggatccattacaggcccagcccactgggaggtgttgctgcgggcccgtgctatcgaaacccagtgctatgtagtggcagcagcacagtgtggacgccaccatgagaagagagcaagttatggccacagcatggtggtagacccctggggaacagtggtggcccgctgctctgaggggccaggcctctgccttgcccgaatagacctcaactatctgcgacagttgcgccgacacctgcctgtgttccagcaccgcaggcctgacctctatggcaatctgggtcacccactgtcttaagacttgacttctgtgagtttagacctgcccctcccacccccaccctgccactatgagctagtgctcatgtgacttggaggcaggatccaggcacagctcccctcacttggagaaccttgactctcttgatggaacacagatgggctgcttgggaaagaaactttcacctgagcttcacctgaggtcagactgcagtttcagaaaggtggaattttatatagtcattgtttatttcatggaaactgaagttctgctgagggctgagcagcactggcattgaaaaatataataatcataaagtc

SEQ ID NO: 266380 - DNA, 1518 bp, Artificial Sequence
  derived and/or modified sequence
cttctggctccagaccgccctccggatcggaccctgcgaatggttttggctatatcttcatgtaggacctactccctatcccgtcggccgcggtgaatcccacctgcggctgggcttcatcaccaggcctcctcacagattcctgtcccttctgtgtcctggactccggatacctcaactctcagtactttgtgctcagcccaggcccagagccatggctatctcctcttcctcctgcgaactgcccctggtggctgtgtgccaggtaacatcgacgccagacaagcaacagaactttaaaacatgtgctgagctggttcgagaggctgccagactgggtgcctgcctggctttcctgcctgaggcatttgacttcattgcacgggaccctgcagagacgctacacctgtctgaaccactgggtgggaaacttttggaagaatacacccagcttgccagggaatgtggactctggctgtccttgggtggtttccatgagcgtggccaagactgggagcagactcagaaaatctacaattgtcacgtgctgctgaacagcaaaggggcagtagtggccacttacaggaagacacatctgtgtgacgtagagattccagggcaggggcctatgtgtgaaagcaactctaccatgcctgggcccagtcttgagtcacctgtcagcacaccagcaggcaagattggtctagctgtctgctatgacatgcggttccctgaactctctctggcattggctcaagctggagcagagatacttacctatccttcagcttttggatccattacaggcccagcccactgggaggtgttgctgcgggcccgtgctatcgaaacccagtgctatgtagtggcagcagcacagtgtggacgccaccatgagaagagagcaagttatggccacagcatggtggtagacccctggggaacagtggtggcccgctgctctgaggggccaggcctctgccttgcccgaatagacctcaactatctgcgacagttgcgccgacacctgcctgtgttccagcaccgcaggcctgacctctatggcaatctgggtcacccactgtcttaagacttgacttctgtgagtttagacctgcccctcccacccccaccctgccactatgagctagtgctcatgtgacttggaggcaggatccaggcacagctcccctcacttggagaaccttgactctcttgatggaacacagatgggctgcttgggaaagaaactttcacctgagcttcacctgaggtcagactgcagtttcagaaaggtggaattttatatagtcattgtttatttcatggaaactgaagttctgctgagggctgagcagcactggcattgaaaaatataataatcataaagtctgtgtctggacatcgcctttgggaactagaaggggagttggtattgtaccagctggactaagctccagttctagacctcctggctcattcaacatgcctccctacctaaataaaagtgcaacactc

SEQ ID NO: 266381 - protein, 540 aa, Artificial Sequence
  derived and/or modified sequence
KMQLEKELASELWRVRWEDVEPSSLERHLRSAGSRLTLSGRGSNYGSLLTTEGQFQVFAKTAYYKMRDVQNEHLTRFVGACTDPPNICILTEYCPRGSLQDILENESITLDWMFRYSLTNDIVKGMLFLHNGAICSHGNLKSSNCVVDGRFVLKITDYGLESFRDLDPEQGHTVYAKKLWTAPELLRMASPPVRGSQAGDVYSFGIILQEIALRSGVFHVEGLDLSPKEIIERVTRGEQPPFRPSLALQSHLEELGLLMQRCWAEDPQERPPFQQIRLTLRKFNRENSSNILDNLLSRMEQYANNLEELVEERTQAYLEEKRKAEALLYQILPHSVAEQLKRGETVQAEAFDSVTIYFSDIVGFTALSAESTPMQVVTLLNDLYTCFDAVIDNFDVYKVETIGDAYMVVSGLPVRNGRLHACEVARMALALLDAVRSFRIRHRPQEQLRLRIGIHTGPVCAGVVGLKMPRYCLFGDTVNTASRMESNGEALKIHLSSETKAVLEEFGGFELELRGDVEMKGKGKVRTYWLLGERGSSTRG

SEQ ID NO: 266382 - DNA, 768 bp, Artificial Sequence
  derived and/or modified sequence
atggaacagtacgccaacaatttagaggaactggttgaagagcgaacccaggcgtaccttgaggagaagcggaaggcggaggcgttgctataccagatcctacctcacagtgtggcagagcaactcaaaagaggcgaaactgtgcaagcagaagccttcgactccgtgaccatctatttcagtgatatcgtgggcttcactgccttgagcgcggagtctacgccaatgcaggtggtgactctgttaaatgatctctacacctgcttcgatgccgtgatcgataactttgacgtctacaaggttgaaaccataggcgatgcatatatggtagtcagtggcttgccagtccgtaatggccggcttcatgcctgcgaagttgctcgaatggctctcgccttacttgatgcagtccgttctttcaggatccgtcatcggcctcaggagcaacttcggctccgtatcggtatacacaccggacccgtgtgcgctggagttgtaggcctcaaaatgccacgctactgccttttcggggatacggtcaacacagcgtcccgcatggagagcaacggtgaggcactgaaaattcacttgtcctcagagaccaaggcggttctggaagagttcggcggatttgagctagagctgcggggagacgtggaaatgaaagttgaaggggaggcatccgcccttcccactttctgggggccaagaggctcttatcccagccaagccgctaacgctacacctattccgaaagccctgatatag

SEQ ID NO: 266383 - DNA, 1623 bp, Artificial Sequence
  derived and/or modified sequence
aaaatgcagcttgaaaaggagctcgcatctgagttgtggagggttcggtgggaagacgtggaaccaagctctttagaaaggcatctaagatcagccggcagtcgccttaccctctcaggaaggggttccaattatgggtccctgttaacaactgagggccagtttcaggtattcgctaagacggcatactataagatgcgggatgttcagaacgaacacttaaccaggtttgtgggggcctgtaccgacccacctaacatctgtattctgaccgaatactgtcctaggggctctttacaggatattctcgagaacgagtccattactctcgactggatgttcagatatagcctgactaacgacattgtcaaaggtatgctgttccttcataatggagcaatctgtagtcatggaaacttgaagagctccaactgcgtcgttgatggcagattcgttctgaaaattactgattacggacttgagtccttccgtgatctggaccctgaacagggccacacggtgtatgcaaagaagttgtggacggcccccgagcttctgagaatggcatcaccccccgtgagaggaagtcaggctggcgatgtctactcattcggaatcattctccaggagatcgcactgcgctctggcgtctttcacgtggaggggctcgacctgagtcccaaagagattattgaacgagttactcggggggagcagcctccttttcggccctctctcgcacttcagtcgcatttagaagagctaggactgttgatgcagcgatgttgggccgaggatccccaggagcgtcccccgtttcaacaaataaggctgacactacggaagtttaatcgcgaaaactccagtaacatcctggacaacttactgtctaggatggaacaatatgctaataacctggaagagctcgtggaagaaagaacacaggcatacctcgaagaaaagagaaaggccgaagctcttctgtatcagatcttgccccacagcgtggcggaacaattaaagaggggagagactgtccaggctgaagcattcgactcagtaactatctacttctcggacatcgtgggctttacagccctatcagccgagagtacccctatgcaagtggttacactcttgaacgatctgtacacctgtttcgatgcagtcatcgacaactttgatgtgtataaagtggaaacgatcggtgacgcttatatggtggtttccgggcttcccgttagaaacggcaggcttcacgcttgtgaggtggcacggatggctcttgccctgctcgacgccgtgcgcagcttcagaattagacatagaccacaggaacagctgcgtctgcgcatcgggattcacacagggcctgtttgcgcaggagtcgttggacttaagatgcctcggtactgcctatttggcgacaccgtgaataccgcttcacggatggagagcaatggcgaggcattgaaaatacacttgagttctgaaacgaaggccgtgctcgaggaattcggcggcttcgagttggagctgagaggcgacgtggaaatgaagggcaagggcaaagtcaggacgtactggctacttggcgagcgcggcagcagtacccgcggttag

SEQ ID NO: 266384 - DNA, 768 bp, Artificial Sequence
  derived and/or modified sequence
atggagcagtatgccaacaacctggaggagctggtggaggagaggacccaggcctacctggaggagaagaggaaggccgaggccctgctgtaccagatcctgccccacagcgtggccgagcagctgaagagaggagaaacagtgcaggccgaggcctttgattctgtgaccatctacttcagtgacatcgtgggcttcaccgccctgtctgctgagagcacccccatgcaggtggtgaccctgctgaatgacctgtacacctgctttgatgctgtgattgacaactttgatgtgtacaaggtggagaccatcggagatgcctacatggtggtgtctggcctgcctgtgagaaatggccgcctgcacgcctgtgaggtggccaggatggccctggccctgctggatgctgtgcgctccttccgcatccgccaccggccccaggagcagctgcggctgcgcatcggcatccacacaggccctgtgtgtgccggcgtggtgggcctgaagatgccccgctactgcctgtttggagacacagtgaacacagccagcaggatggagagcaatggagaggccctgaagatccacctgagcagcgagaccaaggctgtgctggaggagtttggaggctttgagctggagctgcggggagatgtggagatgaaggtggagggggaggccagcgccctgcccaccttctggggcccccggggcagctaccccagccaggccgccaatgccacccccatccccaaggccctgatctag

SEQ ID NO: 266385 - DNA, 1623 bp, Artificial Sequence
  derived and/or modified sequence
aagatgcagctggagaaggagctggccagcgagctgtggagggtgcgctgggaggatgtggagcccagcagcctggagcggcacctgcggtctgctggcagccggctgaccctgagcggccggggcagcaactacggcagcctgctgaccacagagggccagttccaggtgtttgccaagacagcctactacaagatgagagatgtgcagaatgagcacctgaccaggtttgtgggcgcctgcacagacccccccaacatctgcatcctgacagagtactgcccccggggcagcctgcaggacatcctggagaatgaaagcatcaccctggactggatgttccgctacagcctgaccaatgacatcgtgaagggcatgctgttcctgcacaatggagccatctgcagccacggcaacctgaagagcagcaactgtgtggtggatggccgctttgtgctgaagatcacagattatggcctggagagcttccgggacctggaccctgagcagggccacacagtgtatgccaagaagctgtggacagcccctgagctgctgaggatggccagcccccctgtgcggggcagccaggccggagatgtgtacagctttggcatcatcctgcaggagatcgccctgcggtctggagtcttccacgtggagggcctggacctgagccccaaggagatcatcgagcgggtgaccagaggagagcagccccccttccggcccagcctggccctgcagagccacctggaggagctgggcctgctgatgcagcgctgctgggccgaggacccccaggagaggcctcccttccagcagatccggctgaccctgaggaagttcaaccgggagaacagcagcaacatcctggacaacctgctgagcaggatggagcagtatgccaacaacctggaggagctggtggaggagaggacccaggcctacctggaggagaagaggaaggccgaggccctgctgtaccagatcctgccccacagcgtggccgagcagctgaagagaggagaaacagtgcaggccgaggcctttgattctgtgaccatctacttcagtgacatcgtgggcttcaccgccctgtctgctgagagcacccccatgcaggtggtgaccctgctgaatgacctgtacacctgctttgatgctgtgattgacaactttgatgtgtacaaggtggagaccatcggagatgcctacatggtggtgtctggcctgcctgtgagaaatggccgcctgcacgcctgtgaggtggccaggatggccctggccctgctggatgctgtgcgctccttccgcatccgccaccggccccaggagcagctgcggctgcgcatcggcatccacacaggccctgtgtgtgccggcgtggtgggcctgaagatgccccgctactgcctgtttggagacacagtgaacacagccagcaggatggagagcaatggagaggccctgaagatccacctgagcagcgagaccaaggctgtgctggaggagtttggaggctttgagctggagctgcggggagatgtggagatgaagggcaagggcaaggtgaggacctactggctgctgggggagcggggcagcagcacccggggctag

SEQ ID NO: 266386 - DNA, 1449 bp, Artificial Sequence
  derived and/or modified sequence
ctgctgtcccgcatggagcagtacgcgaacaatctggaggaactggtggaggagcggacccaggcatacctggaggagaagcgcaaggctgaggccctgctctaccagatcctgcctcactcagtggctgagcagctgaagcgtggggagacggtgcaggccgaagcctttgacagtgttaccatctacttcagtgacattgtgggtttcacagcgctgtcggcggagagcacacccatgcaggtggtgaccctgctcaatgacctgtacacttgctttgatgctgtcatagacaactttgatgtgtacaaggtggagacaattggcgatgcctacatggtggtgtcagggctccctgtgcggaacgggcggctacacgcctgcgaggtagcccgcatggccctggcactgctggatgctgtgcgctccttccgaatccgccaccggccccaggagcagctgcgcttgcgcattggcatccacacaggacctgtgtgtgctggagtggtgggactgaagatgccccgttactgtctctttggggatacagtcaacacagcctcaagaatggagtctaatggggaagccctgaagatccacttgtcttctgagaccaaggctgtcctggaggagtttggtggtttcgagctggagcttcgaggggatgtagaaatgaaggtagagggagaagcctctgccctccccaccttttggggtcctagagggagttacccttctcaagcagccaatgccactcccatccctaaggctctcatctgactggggaaagggcatgtgccactccccagcccatcctcttttttccctccagggcaaaggcaaggttcggacctactggctccttggggagagggggagtagcacccgaggctgacctgcctcctctcctatccctccacacctccctaccctgtgccagaagcaacagaggtgccaggcctcagcctcacccacagcagccccatcgccaaaggatggaagtaatttgaatagctcaggtgtgctgaccccagtgaagacaccagataggacctctgagaggggactggcatggggggatctcagagcttacaggctgagccaagcccacggccatgcacagggacactcacacaggcacacgcacctgctctccacctggactcaggccgggctgggctgtggattcctgatcccctcccctccccatgctctcctccctcagccttgctaccctgtgacttactgggaggagaaagagtcacctgaaggggaacatgaaaagagactaggtgaagagagggcaggggagcccacatctggggctggcccacaatacctgctcccccgaccccctccacccagcagtagacacagtgcacaggggagaagaggggtggcgcagaagggttgggggcctgtatgccttgcttctaccatgagcagaga

SEQ ID NO: 266387 - DNA, 1699 bp, Artificial Sequence
  derived and/or modified sequence
caggaagatgcagctggagaaggaactggcctcggagctgtggcgggtgcgctgggaggacgttgagcccagtagccttgagaggcacctgcggagtgcaggcagccggctgaccctgagcgggagaggctccaattacggctccctgctaaccacagagggccagttccaagtctttgccaagacagcatattataagatgcgggatgtgcagaatgaacacctgaccaggtttgtgggagcctgcaccgacccccccaatatctgcatcctcacagagtactgtccccgtgggagcctgcaggacattctggagaatgagagcatcaccctggactggatgttccggtactcactcaccaatgacatcgtcaagggcatgctgtttctacacaatggggctatctgttcccatgggaacctcaagtcatccaactgcgtggtagatgggcgctttgtgctcaagatcaccgactatgggctggagagcttcagggacctggacccagagcaaggacacaccgtttatgccaaaaagctgtggacggcccctgagctcctgcgaatggcttcaccccctgtgcggggctcccaggctggtgacgtatacagctttgggatcatccttcaggagattgccctgaggagtggggtcttccacgtggaaggtttggacctgagccccaaagagatcatcgagcgggtgactcggggtgagcagccccccttccggccctccctggccctgcagagtcacctggaggagttggggctgctcatgcagcggtgctgggctgaggacccacaggagaggccaccattccagcagatccgcctgacgttgcgcaaatttaacagggagaacagcagcaacatcctggacaacctgctgtcccgcatggagcagtacgcgaacaatctggaggaactggtggaggagcggacccaggcatacctggaggagaagcgcaaggctgaggccctgctctaccagatcctgcctcactcagtggctgagcagctgaagcgtggggagacggtgcaggccgaagcctttgacagtgttaccatctacttcagtgacattgtgggtttcacagcgctgtcggcggagagcacacccatgcaggtggtgaccctgctcaatgacctgtacacttgctttgatgctgtcatagacaactttgatgtgtacaaggtggagacaattggcgatgcctacatggtggtgtcagggctccctgtgcggaacgggcggctacacgcctgcgaggtagcccgcatggccctggcactgctggatgctgtgcgctccttccgaatccgccaccggccccaggagcagctgcgcttgcgcattggcatccacacaggacctgtgtgtgctggagtggtgggactgaagatgccccgttactgtctctttggggatacagtcaacacagcctcaagaatggagtctaatggggaagccctgaagatccacttgtcttctgagaccaaggctgtcctggaggagtttggtggtttcgagctggagcttcgaggggatgtagaaatgaagggcaaaggcaaggttcggacctactggctccttggggagagggggagtagcacccgaggctgacctgcctcctctcctatccctccacacctccctaccctgtgccagaagcaacagaggtgccaggcctcagcc

SEQ ID NO: 266388 - DNA, 768 bp, Artificial Sequence
  derived and/or modified sequence
atggagcagtacgccaacaacctggaggagctggtggaggagcggacccaggcctacctggaagagaagcgtaaggccgaagccctgctgtaccagattctgcctcattccgtcgctgagcagctcaagcggggagagaccgtgcaggctgaagcctttgacagtgtgactatctattttagtgatatcgttggattcaccgccctctctgccgagagcacacctatgcaggtggtcacacttttgaacgacctgtacacttgtttcgacgcagtcatcgataatttcgacgtctacaaagtggaaactataggtgatgcctatatggtggtgtctggacttcccgttagaaatggccgcctacacgcctgcgaggtcgctaggatggcgctggctttattagacgccgtcagatctttccgtatccgtcacaggccccaggaacagctccggttgaggataggtattcacaccggaccagtctgtgccggtgtggtcgggctgaaaatgccgcggtactgtctatttggcgacactgtcaacaccgcttctcgtatggagagcaatggggaagctctgaagatccacttaagctcagaaactaaagctgttctggaggaattcggaggattcgaactggagcttcgcggtgatgtggaaatgaaagtggagggagaggcttctgccctcccaactttttggggcccacgaggttcctatccatcccaggcagccaacgctacaccaattccgaaggctctgatctag

SEQ ID NO: 266389 - DNA, 1623 bp, Artificial Sequence
  derived and/or modified sequence
aagatgcagctggagaaggagctggccagcgagctgtggcgggtgcggtgggaagacgtggagccaagctctcttgaaaggcacttaaggtcagctggaagccgtcttacactgagtggacgtggaagcaattatggaagtctacttacgaccgagggacagttccaggtattcgctaagaccgcctactataagatgcgggacgttcagaatgaacacctgacaaggtttgtcggggcgtgtaccgatccccccaatatctgcattctcacggagtattgcccaaggggatccctgcaggacattctcgagaacgagagcatcactctcgattggatgtttaggtactcactaacgaacgatatcgtgaaagggatgctgttcctgcacaacggcgccatctgtagtcatggaaacttaaagagctctaattgtgtggtggacggcagatttgtgctcaagattacagattatggcctcgagagtttcagggatcttgacccggagcaaggccacaccgtctacgccaagaaactgtggacggctccagaactcttacggatggcttcgcccccagtgcgaggatctcaggccggcgacgtgtactcgttcggaatcatcctgcaggagatcgcccttaggtcaggcgtgttccacgtagaaggcctggacctgtcacccaaggaaataatagagagagtgacgcgaggcgagcaaccccccttccgcccctctcttgccttgcagagtcaccttgaagagttgggcctgctgatgcagcgctgttgggcggaagacccccaagagcggccaccatttcagcaaatcaggcttactctccggaaattcaaccgagagaactcctcgaacatcctggacaatctgctgtctcgcatggaacagtacgcaaacaatctggaggagctcgtagaggaacgcacacaagcttacctggaggaaaagaggaaggctgaagccctactgtaccagatccttccacactcagtggccgaacaactcaagcgcggtgagactgtccaagccgaagcctttgactctgtgactatatacttcagcgatatcgtcggtttcacagcgctttcagcagaaagtacacccatgcaggtggtgactctgctgaacgacctgtatacttgtttcgatgccgtcatcgacaacttcgatgtgtataaggtcgaaacaatcggcgatgcatacatggtggtttccggacttcctgtgcggaatggccgactgcacgcctgtgaagtggcccgaatggccctggcactccttgatgctgtgcggtccttccgaatccgccatagaccacaggagcagctgcggctccggattggcatccacactggaccggtatgcgctggggtcgtgggccttaagatgccacgctactgtctgttcggggatacagtcaatacagccagtaggatggaatccaatggagaagcacttaaaattcacttatccagcgaaacaaaggccgtactcgaagaatttggtggatttgagctagagttaagaggtgatgttgaaatgaagggcaaaggcaaggtccgcacttactggctcctgggagaacggggtagctcaacccggggttag

SEQ ID NO: 266390 - DNA, 768 bp, Artificial Sequence
  derived and/or modified sequence
atggagcagtatgcaaataacctagaagagttagtcgaagagcggacacaggcataccttgaggagaagcgtaaggccgaagccttgctctaccaaatcctccctcactccgtggccgagcagcttaagcgaggggagaccgttcaggccgaagcattcgatagcgtaaccatctacttttcagatatcgtgggttttaccgccttgtcagctgagtcaacgccaatgcaagtcgttacattactgaacgacctgtatacttgctttgacgccgtgatcgacaatttcgatgtgtacaaggtggagacgatcggagacgcttatatggtggtaagtggcctgccagtacgcaatgggcgattacatgcatgcgaggtagccaggatggccttggctctgctggacgcagttagatccttcagaataaggcatcggcctcaagaacagctgcggctgcgcatcggtatccacacagggccagtatgcgccggagtggtggggctgaagatgcctcgatactgtctgttcggtgacaccgttaataccgcctctaggatggagtccaacggagaagccctgaaaattcatttaagttctgagaccaaggctgttcttgaggagttcggagggttcgaactcgaactgaggggagacgttgaaatgaaggtggagggcgaggcctctgccctacctactttttggggaccccgaggatcatacccgtcccaggcggcaaatgctacccctattccgaaagccctgatttag

SEQ ID NO: 266391 - DNA, 1623 bp, Artificial Sequence
  derived and/or modified sequence
aaaatgcagctggagaaggaactcgcctccgaattgtggagagttagatgggaggacgtagaaccttcaagtctggagcggcatctccgatctgcaggctcacggttgacactgtcgggacggggtagcaattacggctccttgctgactactgaggggcaatttcaggtttttgcaaagacagcctactacaagatgagagatgtccagaacgaacacctaacacgatttgtgggcgcttgcactgatccaccaaatatttgtatcctcaccgaatactgtccaagaggctctctgcaggacatcctggagaatgagagtatcactctggattggatgtttagatactctttaactaatgatattgtgaaggggatgctgttcttgcacaacggggcaatatgcagccacggaaacctcaaatcatccaattgcgtggttgatggccgtttcgtgttaaaaattactgattatggattggaatcctttcgggatttggacccagaacagggtcacacagtgtacgccaagaaactgtggacagcccctgaactgctacggatggccagcccaccagtgcgtggcagccaagctggagacgtgtactctttcggtatcattctgcaggagattgctctccggtcgggcgtcttccatgtggaagggctggacttgtcacccaaagagattatcgagagagtgactcgtggtgagcagccgccttttaggccatcacttgctctgcaatcgcacttagaagagctggggcttctaatgcagcggtgttgggcagaagaccctcaagagagacccccattccagcagattcggctgacgctcaggaagtttaaccgggaaaacagcagtaacattttggataaccttttatcaagaatggagcagtatgctaacaacttggaggagcttgttgaagagagaacacaggcatacctggaagaaaaaaggaaggccgaggcccttttatatcaaatcctgccgcacagcgttgcggagcagctcaagagaggcgaaacggttcaggcagaggcttttgacagtgtgacaatctacttcagcgacattgtgggcttcacagcactgtccgcagagagcacccctatgcaggtcgtgaccctgcttaatgacctttacacttgtttcgatgcagtgattgataatttcgatgtgtataaggtggaaactattggagatgcgtacatggtggtgtctgggctgcctgtccgaaatggacgtctacacgcgtgtgaagttgccagaatggcgctggcgcttctggatgctgtacggagcttcagaattaggcacagaccacaggagcagctacgtctccgaataggtatccacacaggacccgtatgtgccggagtggtcggcttgaaaatgccccgttattgcttgttcggcgataccgtcaacaccgcttcacgaatggagagcaacggcgaggctctgaagatacacctctcgagcgagactaaagcagttctcgaggagttcgggggattcgagctggaattgaggggggacgtggagatgaagggaaaggggaaggtgagaacatactggctgctgggggaaagggggtcatcgaccaggggttag

SEQ ID NO: 266392 - DNA, 768 bp, Artificial Sequence
  derived and/or modified sequence
atggagcagtacgccaacaacctggaggagctggtggaggagagaacccaggcctacctggaggagaagagaaaggccgaggccctgctgtaccagatcctgccccacagcgtggccgagcagctgaagagaggcgagaccgtgcaggccgaggccttcgacagcgtgaccatctacttcagcgacatcgtgggcttcaccgccctgagcgccgagagcacccccatgcaggtggtgaccctgctgaacgacctgtacacctgcttcgacgccgtgatcgacaacttcgacgtgtacaaggtggagaccatcggcgacgcctacatggtggtgagcggcctgcccgtgagaaacggcagactgcacgcctgcgaggtggccagaatggccctggccctgctggacgccgtgagaagcttcagaatcagacacagaccccaggagcagctgagactgagaatcggcatccacaccggccccgtgtgcgccggcgtggtgggcctgaagatgcccagatactgcctgttcggcgacaccgtgaacaccgccagcagaatggagagcaacggcgaggccctgaagatccacctgagcagcgagaccaaggccgtgctggaggagttcggcggcttcgagctggagctgagaggcgacgtggagatgaaggtggagggcgaggccagcgccctgcccaccttctggggccccagaggcagctaccccagccaggccgccaacgccacccccatccccaaggccctgatctag

SEQ ID NO: 266393 - DNA, 1623 bp, Artificial Sequence
  derived and/or modified sequence
aagatgcagctggagaaggagctggccagcgagctgtggagagtgagatgggaggacgtggagcccagcagcctggagagacacctgagaagcgccggcagcagactgaccctgagcggcagaggcagcaactacggcagcctgctgaccaccgagggccagttccaggtgttcgccaagaccgcctactacaagatgagagacgtgcagaacgagcacctgaccagattcgtgggcgcctgcaccgacccccccaacatctgcatcctgaccgagtactgccccagaggcagcctgcaggacatcctggagaacgagagcatcaccctggactggatgttcagatacagcctgaccaacgacatcgtgaagggcatgctgttcctgcacaacggcgccatctgcagccacggcaacctgaagagcagcaactgcgtggtggacggcagattcgtgctgaagatcaccgactacggcctggagagcttcagagacctggaccccgagcagggccacaccgtgtacgccaagaagctgtggaccgcccccgagctgctgagaatggccagcccccccgtgagaggcagccaggccggcgacgtgtacagcttcggcatcatcctgcaggagatcgccctgagaagcggcgtgttccacgtggagggcctggacctgagccccaaggagatcatcgagagagtgaccagaggcgagcagccccccttcagacccagcctggccctgcagagccacctggaggagctgggcctgctgatgcagagatgctgggccgaggacccccaggagagaccccccttccagcagatcagactgaccctgagaaagttcaacagagagaacagcagcaacatcctggacaacctgctgagcagaatggagcagtacgccaacaacctggaggagctggtggaggagagaacccaggcctacctggaggagaagagaaaggccgaggccctgctgtaccagatcctgccccacagcgtggccgagcagctgaagagaggcgagaccgtgcaggccgaggccttcgacagcgtgaccatctacttcagcgacatcgtgggcttcaccgccctgagcgccgagagcacccccatgcaggtggtgaccctgctgaacgacctgtacacctgcttcgacgccgtgatcgacaacttcgacgtgtacaaggtggagaccatcggcgacgcctacatggtggtgagcggcctgcccgtgagaaacggcagactgcacgcctgcgaggtggccagaatggccctggccctgctggacgccgtgagaagcttcagaatcagacacagaccccaggagcagctgagactgagaatcggcatccacaccggccccgtgtgcgccggcgtggtgggcctgaagatgcccagatactgcctgttcggcgacaccgtgaacaccgccagcagaatggagagcaacggcgaggccctgaagatccacctgagcagcgagaccaaggccgtgctggaggagttcggcggcttcgagctggagctgagaggcgacgtggagatgaagggcaagggcaaggtgagaacctactggctgctgggcgagagaggcagcagcaccagaggctag

SEQ ID NO: 266394 - DNA, 1818 bp, Artificial Sequence
  derived and/or modified sequence
aagacacataggcagagatctaagaatgaattagagttctccagataaaggggatgtaaggggcagaggggagcagactggccgaagaacatttttgttaaaatccttttttttttgttttgaagaaatatgacttttgtcctaaaattccacagcagagcttccagggctatggtagggattaaggtattctacaacagatgaacaagtcttttagggacagcctgaattgaaggaggccaggagtcggaactgcccctcattgttctttttggtgactaggatacaaagttctgttcggcacagagtactctcctctgcttctacctccgggaaccccgttaccccccagcccacacaccaccaccccagttttgggtggggagaaggcaaagttttgagtatccgaggagcccaggaggaggaacccacagacccccagctgatgcggctggacaacatgctgttagcggaaggcgtggcggggcctgagaagggcggagggtcggcggcagcggcggcagcggcggcggcttctggaggggcaggttcagacaactcagtggagcattcagattacagagccaaactctcacagatcagacaaatctaccatacggagctggagaaatacgagcaggcctgcaacgagttcaccacccacgtgatgaatctcctgcgagagcaaagccggaccaggcccatctccccaaaggagattgagcggatggtcagcatcatccaccgcaagttcagctccatccagatgcagctcaagcagagcacgtgcgaggcggtgatgatcctgcgttcccgatttctggatgcgcggcggaagagacggaatttcaacaagcaagcgacagaaatcctgaatgaatatttctattcccatctcagcaacccttaccccagtgaggaagccaaagaggagttagccaagaagtgtggcatcacagtctcccaggtatcaaactggtttggaaataagcgaatccggtacaagaagaacataggtaaatttcaagaggaagccaatatttatgctgccaaaacagctgtcactgctaccaatgtgtcagcccatggaagccaagctaactcgccctcaactcccaactcggctggttcttccagttcttttaacatgtcaaactctggagatttgttcatgagcgtgcagtcactcaatggggattcttaccaaggggcccaggttggagccaacgtgcaatcacaggtggatacccttcgccatgttatcagccagacaggaggatacagtgatggactcgcagccagtcagatgtacagtccgcagggcatcagtgctaatggaggttggcaggatgctactaccccttcatcagtgacctcccctacagaaggccctggcagtgttcactctgatacctccaactgatctcccagcaatcgcatcccggctgaccctgtgccccagttggggcaggggcaggagggagggtttctctcccaacgctgaagcggtcagactggaggtcgaagcaatcagcaaacacaataagagtctccttctcttctcttctttgggatgctatttcagccaatctggacacttctttatactctcttcccttttttttctgggtagaagccacccttccctgcctccagctgtcagcctggttttcgtcatcttccctgcccctgtgcctctgtcctagactcccggggtccccgccctctctcatatcactgaaggatattttcaacaattagaggaatttaaagaggaaaaaaattacaaagaaaataataaaagtgtttgtacgtttt

SEQ ID NO: 266395 - protein, 170 aa, Artificial Sequence
  derived and/or modified sequence
MDEQPRLMHSHAGVGMAGHPGLSQHLQDGAGGTEGEGGRKQDIGDILQQIMTITDQSLDEAQARKHALNCHRMKPALFNVLCEIKEKTVLSIRGAQEEEPTDPQLMRLDNMLLAEGVAGPEKGGGSAAAAAAAAASGGAGSDNSVEHSDYRAKLSQIRQIYHTELEKYEQ

SEQ ID NO: 266396 - protein, 430 aa, Artificial Sequence
  derived and/or modified sequence
MDEQPRLMHSHAGVGMAGHPGLSQHLQDGAGGTEGEGGRKQDIGDILQQIMTITDQSLDEAQARKHALNCHRMKPALFNVLCEIKEKTVLSIRGAQEEEPTDPQLMRLDNMLLAEGVAGPEKGGGSAAAAAAAAASGGAGSDNSVEHSDYRAKLSQIRQIYHTELEKYEQACNEFTTHVMNLLREQSRTRPISPKEIERMVSIIHRKFSSIQMQLKQSTCEAVMILRSRFLDARRKRRNFNKQATEILNEYFYSHLSNPYPSEEAKEELAKKCGITVSQVSNWFGNKRIRYKKNIGKFQEEANIYAAKTAVTATNVSAHGSQANSPSTPNSAGSSSSFNMSNSGDLFMSVQSLNGDSYQGAQVGANVQSQVDTLRHVISQTGGYSDGLAASQMYSPQGISANGGWQDATTPSSVTSPTEGPGSVHSDTSN

SEQ ID NO: 266397 - DNA, 6683 bp, Artificial Sequence
  derived and/or modified sequence
cttccccaccagcccttatccccaccctcaccccgcaaccccttcacgccccctccccctccccctcctcatcctcccaccatcctctaaagaggcaaagggattttttttttcttttggtcttcttttttcccccttccctgtttatcctgaaaaggatttgaagacaagcttgaaggataaaaagccttggtgcttcccaggagccgagccgaggagcagaagaggaagagccgggggctgccgtagcctttggagatggacgagcagcccaggctgatgcattcccatgctggggtcgggatggccggacaccccggcctgtcccagcacttgcaggatggggccggagggaccgagggggagggcgggaggaagcaggacattggagacattttacagcaaattatgaccatcacagaccagagtttggatgaggcgcaggccagaaaacatgctttaaactgccacagaatgaagcctgccttgtttaatgtgttgtgtgaaatcaaagaaaaaacagttttgagtatccgaggagcccaggaggaggaacccacagacccccagctgatgcggctggacaacatgctgttagcggaaggcgtggcggggcctgagaagggcggagggtcggcggcagcggcggcagcggcggcggcttctggaggggcaggttcagacaactcagtggagcattcagattacagagccaaactctcacagatcagacaaatctaccatacggagctggagaaatacgagcaggcctgcaacgagttcaccacccacgtgatgaatctcctgcgagagcaaagccggaccaggcccatctccccaaaggagattgagcggatggtcagcatcatccaccgcaagttcagctccatccagatgcagctcaagcagagcacgtgcgaggcggtgatgatcctgcgttcccgatttctggatgcgcggcggaagagacggaatttcaacaagcaagcgacagaaatcctgaatgaatatttctattcccatctcagcaacccttaccccagtgaggaagccaaagaggagttagccaagaagtgtggcatcacagtctcccaggtatcaaactggtttggaaataagcgaatccggtacaagaagaacataggtaaatttcaagaggaagccaatatttatgctgccaaaacagctgtcactgctaccaatgtgtcagcccatggaagccaagctaactcgccctcaactcccaactcggctggttcttccagttcttttaacatgtcaaactctggagatttgttcatgagcgtgcagtcactcaatggggattcttaccaaggggcccaggttggagccaacgtgcaatcacaggtggatacccttcgccatgttatcagccagacaggaggatacagtgatggactcgcagccagtcagatgtacagtccgcagggcatcagtgctaatggaggttggcaggatgctactaccccttcatcagtgacctcccctacagaaggccctggcagtgttcactctgatacctccaactgatctcccagcaatcgcatcccggctgaccctgtgccccagttggggcaggggcaggagggagggtttctctcccaacgctgaagcggtcagactggaggtcgaagcaatcagcaaacacaataagagtctccttctcttctcttctttgggatgctatttcagccaatctggacacttctttatactctcttcccttttttttctgggtagaagccacccttccctgcctccagctgtcagcctggttttcgtcatcttccctgcccctgtgcctctgtcctagactcccggggtccccgccctctctcatatcactgaaggatattttcaacaattagaggaatttaaagaggaaaaaaattacaaagaaaataataaaagtgtttgtacgttttcatgctggtggtttgaggagccaaatttacctcactcgaatccctcactccctatgttaacaggcaatccttctctgtttctcttattactctcactacctcttagcaggaatactccacattgccctattcattccaggcctccctgcttcctcttgctcttcctccctggggacagtactgattggaacactttcctcctcttccttcctagccccagctattcactggggactgtcatagctgggattctaaaggtgccacatttttcagtttcatctccactaggttggttcccgggcaggaagtcaggcagcagggaaggacacgggaacagcaggtggagaattcctacagtctttcttaccctgctagcaatagctctcagtttcagaggcacagtctttggagaccattcagcactgagaaagcaatatttagaacctattgcaaaactgggcctgagttaggcatggtgatgaatgcatcagcaaggaatagaaagttcttatcgtgaaacccttcaacctcaactatgccttcatagacacacacgttcatgcacatgtaggcacatgtaccatctcacatcttcactttcccgagatgccatatacaattacctacattaataactgtagcactatgccttttgagcccgagagagggaattagtgactctaagtgaaggtcactgacacagagaagcagtatgtgtctggggcttccaggacctgcaggcccactagcgtgcacttaccagaatggcatacacaggacctgatcatgaggaagaccaggtttccagtgtaaactactcttgttcccaccacctctggagcactcagggagccccatacagtacttacaatgtctttaatggacttgattctgtttaattttttgttttatattaggcacactgtattaattttccaaaatgttataccacactatgttcttggtcctgacctattgctctggaggaaagagttgtataagaacgtggctcatgtgaacttttgctagcttcatttgaggacctgagaatcatggggaaagggaaggtaatgttttcattgaaatcatcacagtgatttttattccctgggaacacagcgtgtactaaaaatacatgagaaaatagcatgtatatgaaagctattctcaaaagtcacctgagctcaccatcttcatagccaaccctaccagttataaagatggcagctctatcacttgattaagtgggaggtggtcaaatattttggtgcctcattttcttcatctgtgagatgggaactgttatgcctggcttactaagagtcttgtgagagactgagaagttgattttgttcatatccaatctgtaaatgcgaagtcaggggaagtaatgtccctgaaataaacgggttcatgccatctagggacaataaatggttttcttgttgtaacttctggttaatatcagtaccttgatgtcatcaccgtgatgacaaagagaagagttattgttgatcttcttggttttggtctgtctcttttcttaggataaagaaaaacttccaaactagaaaaacaggccctggttcccttagtttgcacttgaacccaatatgttgccttgtacatacttggtccctgtcacattgactgcttgggaggcttccagggagaagtatgagaccctgaggggtgagaatgggcagctagcaagaacatggaaattctgcttggcactacagtcataaatagaaaacactgtgtgtgctcaggggagcaggggatgccactgaagaaactcaagggaatgtgtatttgaaggaaatgcaaaaactaagtatttagcaaaatgaaattatgccttgatgactaaaaggcactagaaaggttgtgtctactaacttcagccctaatcagaacagatgcctagaaggagcatttttgtgacaacttcatagtgattagaatcagtggagaactccatcttagtggcaggaatataatgaaactacccacgcaagaacatggttgaatcacatttgcttgacttagggcaaagtacgaaagagagacaaaagggttctcttggaaacaagaagagtgactccagatgtggcctgaataattgccatgttaagttaatgcaaaagatcagaacagggctacatttgcacaggcagtttctctccgggccgtagttttcactgatgatcacctttcacagcattttccccaaccagcatttcacttagtcttctctatacccagcacctcccccggcacccccggcaagcccactatcacttccgacttccaacgtggcatccgtgagatctgtccacattaggcgaagcaggagaacactgagagcagcaggatgggtttggaaagagcatgcctctggaaacacagcttcctgggaattcacatgaggccagtcctacagagagcaagatgcaccccaggatttcttcattttctaatagatgtgggagtgctccattttccccgacagcgaatttcccctgagaaacgatactagaccctgggtttgcccaccttgtaactcttccttatctcctccttttcatccctaatccatcctccctctggcatggaattgacgcccgtgcagtacatttgccaagtggcaccttctttcaatttatgttttattttgctatggtggtgattctttatttgctggttgtcttttctcacacatctttctctctgtctctctctttcctgctctttgtttttctgcccagaaaaacctgacttcgataccaaaaaagatgaaactacagaaactcaaatttaaaaaaaactttaaaagaaacaaaaaaatactcaacgattctttcagctttattaacattttccattgtttcttgcgacttgtgtctcgttctttgtagtattgatgatgaacatttgataatgaatgttcttgtatattcagataaagaaaaaaaaaaccaaaaaagcggtctgaatttaatagtgtttataataaaaattttaaaaatgaccctcatagcacgcaaaacaggatggggaatttcccctcttctttctgtgacaatgcgcatcattcctgcattagtttttaacaccagactacctacattcatcatttccctcatttttcttttattttcttgcatttgtgaattagttcaagaatgctagaaaagtgtcgagttgtgcacatccatttcttgtttcacaatgtttaaaagtgacagtaattcattttgtaaactaaaaaaaaaaaaaaaaaggttggaatagtgagcataataggtacaacctaacacattattatgtttattaactttgagacccagaaataaattcttttcttttcttgattcttgctcttaaaaatacaaaaaaaaaaatgttttgttttgtgttatttttggtttgtttattggggggctttttttaattgtcaggattatgatcttgctgtttttcttcaatatgtatacaaggtgatgtgaaaagatgacttgggcagaggagtaagaacaagtaggcttgttcttctactttgcttcagaattcagttaatgccaaaagcgaagatcaagcccatgttgatgtctcgttgctcacctgcatttccagagagtgtgacactcatgcagtccctgagaaaaataaaatcagggacatacttctccttttagccttttaaaaattcaaaaacgtttagtccaagggaactttttatgctatcaggaaaggtttttgctgtttttgattctgattatcacagccaagtactttgttttatttctccctaattaataactacattccatgaggcctcttccaaccaaagaggccttttcttccaggagagtcccgcaggagatgctggtatgatgggcaccattggttaagtaaactacatgcaggaagaagtccttggggccagtctgccagctgagtcctggttttggatgaagagttaatgagatattgggccaggctcaatgctgtagttttaatgctaagaggttacgtttacttcacagagtacacctcttagtaacctctgacttaggcagctgcttaaagcaaattgcaaaactggcttgatttggaatgtttttattagaggaaaaaagaaagccatattatctggaaaaaaattcattttaaataccatcattcaacaaattatgttcagaaagtggtcagaacttaagcaagaaaagtaaagaaagaatgcagaattgtggagcaatgctttaggaaatatttctacctgaacacttgtactcttgaagtcacaacaaaataatgatgagcttttcacatcacctttatggtttcaatccctagctcaaagcttcctggaatcttttattttttgtaaacttttttttcttttgttaaaataaataaaacattcaatgtttttctccttttctctcttattacttctttcctttggcattttcaatttgaaatgctttcctttggttgttggttttattctccccctacccctccccttttcttattattcagaatataaacctgcaaagctctgctctgttttggttttgaaagtttaagcttttctgcttctgtgagagcacaggcttctgtcccttttgattccaactgaacttttgtgttctctaatgatactaacacggtgtaggttttacagtctcctaatttgtactggtaatgcatattccaaataaatag

SEQ ID NO: 266398 - DNA, 1293 bp, Artificial Sequence
  derived and/or modified sequence
atggatgagcagcctcgcctgatgcactcgcatgcaggggttgggatggctggacaccctggactcagtcagcacctgcaggatggtgctgggggtacagagggcgagggaggacgaaagcaggacatcggagatatactgcagcagatcatgaccattaccgaccagtctctggatgaagcacaagctcgaaaacacgccctcaactgtcatcgtatgaaacccgcgttgttcaacgtgctctgtgagattaaggagaagaccgtcctgagcattcggggagcccaagaggaagagccgactgacccacaacttatgcgactggacaacatgctcctggcggaaggagtggccggacctgagaagggggggggctctgcagccgctgcagctgctgctgctgccagcgggggagctggctccgacaactccgtggagcactctgactaccgggctaaactcagccaaatccgacagatttatcataccgaattagagaagtacgagcaagcgtgtaacgagtttactacccatgtcatgaacttgttgagggagcagagccgaaccagaccgatcagtccaaaggagatcgagagaatggtgagtattatccatcgaaaattctcctctatccagatgcagctcaaacagagtacttgtgaggctgtgatgatattgaggagccgctttttggacgccaggcgcaagcgcaggaattttaataagcaggccactgagattttgaatgagtatttttattcgcatctgtcaaacccatatccaagcgaagaagccaaggaggaacttgccaagaaatgtgggatcacagtgtctcaggtttctaattggtttggcaataagaggatacggtacaaaaagaatattggaaagttccaggaagaggccaatatctacgcagctaagacggcggtcaccgcaacaaacgtatccgcacacggctcgcaggctaattcaccatctaccccaaacagcgcagggagctctagtagttttaatatgtctaatagcggggacctgtttatgagcgtgcagtctctgaatggagacagttatcagggcgcccaagttggggccaacgtccagagccaggtggatacccttcggcacgtcatcagtcagacaggaggctattctgacggcttggccgccagccaaatgtattctcctcagggaatctcagcaaatgggggatggcaggatgccactacaccctcttctgtaacctcacccacggagggccccggttcggtccacagcgacaccagcaattag

SEQ ID NO: 266399 - DNA, 1293 bp, Artificial Sequence
  derived and/or modified sequence
atggatgagcagccccggctgatgcacagccacgccggcgtgggcatggccggccaccctggcctgagccagcacctgcaggatggagctgggggcacagaaggagagggcggcaggaagcaggacattggagacatcctgcagcagatcatgaccatcacagaccagagcctggatgaggcccaggccaggaagcacgccctgaactgccacaggatgaagccagccctcttcaacgtgctgtgtgagatcaaggagaagacagtgctgagcatccggggggcccaggaggaggagcccacagacccccagctgatgaggctggacaacatgctgctggccgagggcgtggccggccctgagaagggcggcggcagcgctgctgctgctgctgctgctgctgccagcggcggggccggcagtgacaacagcgtggagcacagcgactaccgggccaagctgagccagatccggcagatctaccacacagagctggagaagtatgagcaggcctgcaatgagttcaccacccacgtgatgaacctgctgcgggagcagagcaggacccggcccatcagccccaaggagattgaaagaatggtgtccatcatccacaggaagttcagcagcatccagatgcagctgaagcagagcacctgtgaggccgtgatgatcctgcggagccgcttcctggatgcccggaggaagagaagaaacttcaacaagcaggccacagagatcctgaatgagtacttctacagccacctgagcaacccctaccccagcgaggaggccaaggaggagctggccaagaagtgtggcatcaccgtgtcccaggtgagcaactggtttggaaacaagaggatccgctacaagaagaacatcggcaagttccaggaggaggccaacatctatgctgccaagacagctgtgacagccaccaacgtgtctgcccacggcagccaggccaacagccccagcacccccaacagcgctggcagcagcagcagcttcaacatgagcaacagcggggacctcttcatgtctgtgcagagcctgaatggagacagctaccagggcgcccaggtgggcgccaacgtgcagagccaggtggacaccctgcggcacgtgatcagccagacaggaggctacagtgatggcctggccgccagccagatgtacagcccccagggcatcagcgccaacggcggctggcaggatgccaccacccccagctctgtgaccagccccacagagggccctggctctgtgcacagcgacaccagcaactag

SEQ ID NO: 266400 - DNA, 1293 bp, Artificial Sequence
  derived and/or modified sequence
atggacgagcagccccggctgatgcacagccacgccggcgtgggcatggcgggtcacccgggcctgtcccagcatctccaagacggagccggcggcaccgagggcgagggcggaaggaagcaggatatcggcgatatcctccagcagataatgactataaccgaccagagtctcgacgaggctcaggctcgaaagcatgcgttaaactgtcatcggatgaaacctgcattatttaatgtactgtgtgaaatcaaggagaaaaccgtgctttccattcggggggctcaagaggaggaaccaacagatccacagctgatgaggttagataacatgctgttggccgaaggcgtcgcgggaccggagaaaggaggaggatccgccgccgctgcggctgcagccgctgcaagcggtggcgcgggaagcgataactccgtcgaacacagtgattaccgagccaagctgtcacagatcaggcagatctatcataccgaactcgagaagtacgaacaagcctgtaatgaattcacaacgcacgttatgaatctcctccgtgagcagtcgcggacccgacccatatccccaaaggagatcgaaagaatggtttcaataattcatcgcaagttttcctcaattcagatgcagctgaagcagtccacctgtgaggccgtcatgattctacggtctaggtttttggatgcccgccgcaaaaggcggaacttcaacaagcaggccacagagatcctgaacgaatacttttactctcacctgtctaacccctatcctagtgaagaggcgaaggaagagcttgcaaagaaatgtggtatcacagtgagtcaggtcagtaactggttcggcaacaaaagaattcgatacaaaaaaaacatcggcaagttccaagaggaggccaatatttacgctgccaaaacagccgtcactgcaactaatgtgagcgcacacggttcgcaggccaactctccctctactcctaattcagcgggtagctcttcatcatttaatatgtccaattccggagacctgtttatgtcggtgcagtcccttaatggagacagctaccagggcgctcaggtgggagccaacgttcagtctcaagttgatactctgcggcacgtaatttctcagacgggcgggtattctgacggccttgccgccagccaaatgtattcgccccaggggatttccgcgaacggaggctggcaggatgctacgactccctcttccgtcactagcccaaccgaggggcccggatctgttcattctgacacatccaattag

SEQ ID NO: 266401 - DNA, 6635 bp, Artificial Sequence
  derived and/or modified sequence
atcctcccaccatcctctaaagaggcaaagggattttttttttcttttggtcttcttttttcccccttccctgtttatcctgaaaaggatttgaagacaagcttgaaggataaaaagccttggtgcttcccaggagccgagccgaggagcagaagaggaagagccgggggctgccgtagcctttggagatggacgagcagcccaggctgatgcattcccatgctggggtcgggatggccggacaccccggcctgtcccagcacttgcaggatggggccggagggaccgagggggagggcgggaggaagcaggacattggagacattttacagcaaattatgaccatcacagaccagagtttggatgaggcgcaggccagaaaacatgctttaaactgccacagaatgaagcctgccttgtttaatgtgttgtgtgaaatcaaagaaaaaacagttttgagtatccgaggagcccaggaggaggaacccacagacccccagctgatgcggctggacaacatgctgttagcggaaggcgtggcggggcctgagaagggcggagggtcggcggcagcggcggcagcggcggcggcttctggaggggcaggttcagacaactcagtggagcattcagattacagagccaaactctcacagatcagacaaatctaccatacggagctggagaaatacgagcaggcctgcaacgagttcaccacccacgtgatgaatctcctgcgagagcaaagccggaccaggcccatctccccaaaggagattgagcggatggtcagcatcatccaccgcaagttcagctccatccagatgcagctcaagcagagcacgtgcgaggcggtgatgatcctgcgttcccgatttctggatgcgcggcggaagagacggaatttcaacaagcaagcgacagaaatcctgaatgaatatttctattcccatctcagcaacccttaccccagtgaggaagccaaagaggagttagccaagaagtgtggcatcacagtctcccaggtatcaaactggtttggaaataagcgaatccggtacaagaagaacataggtaaatttcaagaggaagccaatatttatgctgccaaaacagctgtcactgctaccaatgtgtcagcccatggaagccaagctaactcgccctcaactcccaactcggctggttcttccagttcttttaacatgtcaaactctggagatttgttcatgagcgtgcagtcactcaatggggattcttaccaaggggcccaggttggagccaacgtgcaatcacaggtggatacccttcgccatgttatcagccagacaggaggatacagtgatggactcgcagccagtcagatgtacagtccgcagggcatcagtgctaatggaggttggcaggatgctactaccccttcatcagtgacctcccctacagaaggccctggcagtgttcactctgatacctccaactgatctcccagcaatcgcatcccggctgaccctgtgccccagttggggcaggggcaggagggagggtttctctcccaacgctgaagcggtcagactggaggtcgaagcaatcagcaaacacaataagagtctccttctcttctcttctttgggatgctatttcagccaatctggacacttctttatactctcttcccttttttttctgggtagaagccacccttccctgcctccagctgtcagcctggttttcgtcatcttccctgcccctgtgcctctgtcctagactcccggggtccccgccctctctcatatcactgaaggatattttcaacaattagaggaatttaaagaggaaaaaaattacaaagaaaataataaaagtgtttgtacgttttcatgctggtggtttgaggagccaaatttacctcactcgaatccctcactccctatgttaacaggcaatccttctctgtttctcttattactctcactacctcttagcaggaatactccacattgccctattcattccaggcctccctgcttcctcttgctcttcctccctggggacagtactgattggaacactttcctcctcttccttcctagccccagctattcactggggactgtcatagctgggattctaaaggtgccacatttttcagtttcatctccactaggttggttcccgggcaggaagtcaggcagcagggaaggacacgggaacagcaggtggagaattcctacagtctttcttaccctgctagcaatagctctcagtttcagaggcacagtctttggagaccattcagcactgagaaagcaatatttagaacctattgcaaaactgggcctgagttaggcatggtgatgaatgcatcagcaaggaatagaaagttcttatcgtgaaacccttcaacctcaactatgccttcatagacacacacgttcatgcacatgtaggcacatgtaccatctcacatcttcactttcccgagatgccatatacaattacctacattaataactgtagcactatgccttttgagcccgagagagggaattagtgactctaagtgaaggtcactgacacagagaagcagtatgtgtctggggcttccaggacctgcaggcccactagcgtgcacttaccagaatggcatacacaggacctgatcatgaggaagaccaggtttccagtgtaaactactcttgttcccaccacctctggagcactcagggagccccatacagtacttacaatgtctttaatggacttgattctgtttaattttttgttttatattaggcacactgtattaattttccaaaatgttataccacactatgttcttggtcctgacctattgctctggaggaaagagttgtataagaacgtggctcatgtgaacttttgctagcttcatttgaggacctgagaatcatggggaaagggaaggtaatgttttcattgaaatcatcacagtgatttttattccctgggaacacagcgtgtactaaaaatacatgagaaaatagcatgtatatgaaagctattctcaaaagtcacctgagctcaccatcttcatagccaaccctaccagttataaagatggcagctctatcacttgattaagtgggaggtggtcaaatattttggtgcctcattttcttcatctgtgagatgggaactgttatgcctggcttactaagagtcttgtgagagactgagaagttgattttgttcatatccaatctgtaaatgcgaagtcaggggaagtaatgtccctgaaataaacgggttcatgccatctagggacaataaatggttttcttgttgtaacttctggttaatatcagtaccttgatgtcatcaccgtgatgacaaagagaagagttattgttgatcttcttggttttggtctgtctcttttcttaggataaagaaaaacttccaaactagaaaaacaggccctggttcccttagtttgcacttgaacccaatatgttgccttgtacatacttggtccctgtcacattgactgcttgggaggcttccagggagaagtatgagaccctgaggggtgagaatgggcagctagcaagaacatggaaattctgcttggcactacagtcataaatagaaaacactgtgtgtgctcaggggagcaggggatgccactgaagaaactcaagggaatgtgtatttgaaggaaatgcaaaaactaagtatttagcaaaatgaaattatgccttgatgactaaaaggcactagaaaggttgtgtctactaacttcagccctaatcagaacagatgcctagaaggagcatttttgtgacaacttcatagtgattagaatcagtggagaactccatcttagtggcaggaatataatgaaactacccacgcaagaacatggttgaatcacatttgcttgacttagggcaaagtacgaaagagagacaaaagggttctcttggaaacaagaagagtgactccagatgtggcctgaataattgccatgttaagttaatgcaaaagatcagaacagggctacatttgcacaggcagtttctctccgggccgtagttttcactgatgatcacctttcacagcattttccccaaccagcatttcacttagtcttctctatacccagcacctcccccggcacccccggcaagcccactatcacttccgacttccaacgtggcatccgtgagatctgtccacattaggcgaagcaggagaacactgagagcagcaggatgggtttggaaagagcatgcctctggaaacacagcttcctgggaattcacatgaggccagtcctacagagagcaagatgcaccccaggatttcttcattttctaatagatgtgggagtgctccattttccccgacagcgaatttcccctgagaaacgatactagaccctgggtttgcccaccttgtaactcttccttatctcctccttttcatccctaatccatcctccctctggcatggaattgacgcccgtgcagtacatttgccaagtggcaccttctttcaatttatgttttattttgctatggtggtgattctttatttgctggttgtcttttctcacacatctttctctctgtctctctctttcctgctctttgtttttctgcccagaaaaacctgacttcgataccaaaaaagatgaaactacagaaactcaaatttaaaaaaaactttaaaagaaacaaaaaaatactcaacgattctttcagctttattaacattttccattgtttcttgcgacttgtgtctcgttctttgtagtattgatgatgaacatttgataatgaatgttcttgtatattcagataaagaaaaaaaaaaccaaaaaagcggtctgaatttaatagtgtttataataaaaattttaaaaatgaccctcatagcacgcaaaacaggatggggaatttcccctcttctttctgtgacaatgcgcatcattcctgcattagtttttaacaccagactacctacattcatcatttccctcatttttcttttattttcttgcatttgtgaattagttcaagaatgctagaaaagtgtcgagttgtgcacatccatttcttgtttcacaatgtttaaaagtgacagtaattcattttgtaaactaaaaaaaaaaaaaaaaaggttggaatagtgagcataataggtacaacctaacacattattatgtttattaactttgagacccagaaataaattcttttcttttcttgattcttgctcttaaaaatacaaaaaaaaaaatgttttgttttgtgttatttttggtttgtttattggggggctttttttaattgtcaggattatgatcttgctgtttttcttcaatatgtatacaaggtgatgtgaaaagatgacttgggcagaggagtaagaacaagtaggcttgttcttctactttgcttcagaattcagttaatgccaaaagcgaagatcaagcccatgttgatgtctcgttgctcacctgcatttccagagagtgtgacactcatgcagtccctgagaaaaataaaatcagggacatacttctccttttagccttttaaaaattcaaaaacgtttagtccaagggaactttttatgctatcaggaaaggtttttgctgtttttgattctgattatcacagccaagtactttgttttatttctccctaattaataactacattccatgaggcctcttccaaccaaagaggccttttcttccaggagagtcccgcaggagatgctggtatgatgggcaccattggttaagtaaactacatgcaggaagaagtccttggggccagtctgccagctgagtcctggttttggatgaagagttaatgagatattgggccaggctcaatgctgtagttttaatgctaagaggttacgtttacttcacagagtacacctcttagtaacctctgacttaggcagctgcttaaagcaaattgcaaaactggcttgatttggaatgtttttattagaggaaaaaagaaagccatattatctggaaaaaaattcattttaaataccatcattcaacaaattatgttcagaaagtggtcagaacttaagcaagaaaagtaaagaaagaatgcagaattgtggagcaatgctttaggaaatatttctacctgaacacttgtactcttgaagtcacaacaaaataatgatgagcttttcacatcacctttatggtttcaatccctagctcaaagcttcctggaatcttttattttttgtaaacttttttttcttttgttaaaataaataaaacattcaatgtttttctccttttctctcttattacttctttcctttggcattttcaatttgaaatgctttcctttggttgttggttttattctccccctacccctccccttttcttattattcagaatataaacctgcaaagctctgctctgttttggttttgaaagtttaagcttttctgcttctgtgagagcacaggcttctgtcccttttgattccaactgaacttttgtgttctctaatgatactaacacggtgtaggttttacagtctcctaatttgtactggtaatgcatattccaaataaatagtttcttttgttgcaaaaaaaaa

SEQ ID NO: 266402 - DNA, 1293 bp, Artificial Sequence
  derived and/or modified sequence
atggacgaacagccgaggctcatgcattcccatgcaggcgtgggtatggcaggacatcccggtctttcacagcacctccaggacggggctggcggtacagagggagagggcggacgtaagcaggatataggagatatccttcagcagattatgacaatcacagaccagtcgcttgacgaggcccaagctcgcaagcatgccttgaattgtcatcggatgaaaccagctctatttaacgtgctgtgtgagataaaggaaaagactgttctttctattcgtggcgctcaggaggaagagccgactgatccccagctgatgcggctggataatatgctactggcagaaggtgtagcaggtcccgagaagggtggcggatcggcagcagccgcagccgctgccgcagcctcgggaggcgctggttcagataatagcgtcgagcattcggactatagggctaaactgagccagattcgccagatctaccataccgagctggaaaagtatgagcaagcctgtaatgagttcactacacatgtcatgaacctgttgcgtgagcagtcgcgcacccggcctatttcccctaaggaaattgagcgaatggtaagcatcattcataggaagttttccagtatccaaatgcaactcaaacagtcaacttgtgaggcagtgatgatcttaaggtcccgcttcttggatgcccgaagaaaacggaggaacttcaacaaacaggcaactgagatcttgaacgaatatttttattcccatctctcgaacccttacccatctgaggaggcgaaggaggaactggccaagaagtgcggtataaccgtcagccaggtgtccaactggttcggcaataaacggatcagatataagaaaaatattgggaagttccaggaagaagcaaatatatacgctgccaagacggcagttacagctacaaatgtatcagcgcacggcagccaagcgaactcaccaagcactcctaatagcgctggctctagctcttccttcaacatgtcaaactcaggagatctgttcatgtccgtgcagtcactgaacggggactcctaccagggagctcaggtcggcgctaacgtccagtcccaggtggatactttgcgtcatgtgatttcccaaaccggtgggtatagtgacggcctggccgcttcccaaatgtattctccccagggaatcagcgctaacggcggttggcaagatgccactacacctagtagtgtcacatctccaacagaaggacccggaagtgtccattctgatacctctaactag

SEQ ID NO: 266403 - DNA, 1293 bp, Artificial Sequence
  derived and/or modified sequence
atggacgagcagcccagactgatgcacagccacgccggcgtgggcatggccggccaccccggcctgagccagcacctgcaggacggcgccggcggcaccgagggcgagggcggcagaaagcaggacatcggcgacatcctgcagcagatcatgaccatcaccgaccagagcctggacgaggcccaggccagaaagcacgccctgaactgccacagaatgaagcccgccctgttcaacgtgctgtgcgagatcaaggagaagaccgtgctgagcatcagaggcgcccaggaggaggagcccaccgacccccagctgatgagactggacaacatgctgctggccgagggcgtggccggccccgagaagggcggcggcagcgccgccgccgccgccgccgccgccgccagcggcggcgccggcagcgacaacagcgtggagcacagcgactacagagccaagctgagccagatcagacagatctaccacaccgagctggagaagtacgagcaggcctgcaacgagttcaccacccacgtgatgaacctgctgagagagcagagcagaaccagacccatcagccccaaggagatcgagagaatggtgagcatcatccacagaaagttcagcagcatccagatgcagctgaagcagagcacctgcgaggccgtgatgatcctgagaagcagattcctggacgccagaagaaagagaagaaacttcaacaagcaggccaccgagatcctgaacgagtacttctacagccacctgagcaacccctaccccagcgaggaggccaaggaggagctggccaagaagtgcggcatcaccgtgagccaggtgagcaactggttcggcaacaagagaatcagatacaagaagaacatcggcaagttccaggaggaggccaacatctacgccgccaagaccgccgtgaccgccaccaacgtgagcgcccacggcagccaggccaacagccccagcacccccaacagcgccggcagcagcagcagcttcaacatgagcaacagcggcgacctgttcatgagcgtgcagagcctgaacggcgacagctaccagggcgcccaggtgggcgccaacgtgcagagccaggtggacaccctgagacacgtgatcagccagaccggcggctacagcgacggcctggccgccagccagatgtacagcccccagggcatcagcgccaacggcggctggcaggacgccaccacccccagcagcgtgaccagccccaccgagggccccggcagcgtgcacagcgacaccagcaactag

SEQ ID NO: 266404 - protein, 325 aa, Artificial Sequence
  derived and/or modified sequence
MRLDNMLLAEGVAGPEKGGGSAAAAAAAAASGGAGSDNSVEHSDYRAKLSQIRQIYHTELEKYEQACNEFTTHVMNLLREQSRTRPISPKEIERMVSIIHRKFSSIQMQLKQSTCEAVMILRSRFLDARRKRRNFNKQATEILNEYFYSHLSNPYPSEEAKEELAKKCGITVSQVSNWFGNKRIRYKKNIGKFQEEANIYAAKTAVTATNVSAHGSQANSPSTPNSAGSSSSFNMSNSGDLFMSVQSLNGDSYQGAQVGANVQSQVDTLRHVISQTGGYSDGLAASQMYSPQGISANGGWQDATTPSSVTSPTEGPGSVHSDTSN

SEQ ID NO: 266405 - DNA, 978 bp, Artificial Sequence
  derived and/or modified sequence
atgcgcctagacaacatgctcctcgctgaaggggtcgctgggcccgagaagggcggcggttctgccgccgcggccgcagcagcagcggccagtggtggagccggatcagacaactccgttgaacacagcgattatagagccaagctgtcacagattcgtcaaatctaccatacagagttagagaagtatgaacaggcgtgcaacgagtttaccactcatgttatgaacctactgcgggagcagagcaggaccagaccaatctccccgaaggagatagagagaatggtctctatcattcacagaaaattctctagcatccagatgcaactcaagcaaagcacttgtgaggccgtgatgatcctccgcagcagatttttggacgccaggcgtaaacgcagaaactttaataaacaggcaacggagatcctcaacgagtacttctatagtcacctgtcaaacccctacccgtccgaggaggcaaaagaggagttggccaaaaagtgtggaattaccgtgtctcaggtgtcaaactggttcggaaacaagcggatccgttacaaaaaaaacatcgggaaatttcaggaagaggcaaatatttacgcggcaaaaaccgctgtaacggccaccaacgtgagcgcacatggctcgcaagccaattcccccagtacccccaattccgccggtagcagctcctcctttaacatgtcgaactctggcgacttattcatgagtgtgcagagcctgaacggtgatagctatcagggagcacaggtaggggccaacgtgcagtcacaagtggacactctgcgccatgtgatctctcagaccgggggatacagcgatggcttggccgcctctcagatgtatagccctcaaggtataagtgctaatggcggctggcaagatgcgactaccccctcatctgttacctcccctaccgaaggacctggaagcgtccattccgatacgtccaattag

SEQ ID NO: 266406 - DNA, 978 bp, Artificial Sequence
  derived and/or modified sequence
atgcgccttgataatatgctcctcgcggagggggtcgccggtccagagaaagggggtggcagcgccgctgctgctgccgccgctgccgcctctggcggcgccggatcagacaacagcgtggaacattctgattacagggcaaagctgtcacagattagacagatctaccacaccgaactggagaaatacgagcaggcctgcaacgaattcacaactcacgtgatgaatttactcagagagcagtctcgcaccaggccaatctctccaaaggagatcgagcggatggtcagcataatccatcgaaaattttccagcatccagatgcagctcaagcagagtacatgcgaggcggtcatgattctccgctctcgatttctggatgctcgcagaaagcgcagaaatttcaataaacaggctaccgagattttgaatgagtacttctactcgcatctgagtaatccctacccatcggaggaggccaaggaagagctcgccaaaaaatgtggtattaccgtgtcacaggtgtccaactggtttggaaacaagagaattcgatataagaagaacatcgggaagttccaggaggaggccaacatttacgctgctaaaaccgcagtgaccgccactaacgtctcggcacacggctcccaggctaacagtccttctacacccaattcagccggaagtagctcttcctttaatatgtccaatagcggggacctgtttatgagtgtacagtcacttaacggagactcatatcagggggcacaggtaggcgctaatgtccagtcccaggtggataccctacgccacgttatctctcagacaggcgggtatagtgatgggcttgctgccagccaaatgtattctccgcaaggaatctccgccaacgggggatggcaagacgccacaacaccttctagcgtgacctctcctacagagggccctggctcggtgcattcagataccagcaactag

SEQ ID NO: 266407 - DNA, 978 bp, Artificial Sequence
  derived and/or modified sequence
atgcgtctcgataatatgcttctcgccgagggcgttgcagggcccgagaagggaggcggaagtgcagccgccgctgccgccgccgccgctagtggaggggccggcagtgataatagtgtcgaacactccgattatcgtgccaagctgtcacagatccgtcaaatttatcacactgagctcgagaaatatgagcaggcttgcaacgaattcaccacccatgttatgaacttgctccgggaacaatccaggactaggccaatttctcctaaagaaattgaacggatggtgtcgattattcatcggaagttttctagcatccaaatgcagttgaagcagagcacgtgcgaggctgtgatgatcctccgtagcaggtttctcgacgcgaggaggaaaaggcgaaactttaacaagcaggccactgaaatcctgaacgagtatttctactcccatttatctaatccatatcctagcgaagaggctaaggaggagctggccaagaaatgtggcattacagtgtctcaagtgtccaattggttcggcaataagcgtatcaggtacaaaaagaatattggcaagtttcaggaagaagcaaatatttatgccgcgaagacagcagtcactgccacaaatgtgtcagcccacggctctcaagctaatagcccctccacaccaaacagcgctgggtcctcttcctcctttaatatgtccaattctggcgacctgttcatgagcgtacaaagcctgaatggagacagctaccagggcgcccaggtcggcgccaatgtgcagtcacaggttgatacccttcgtcacgtcataagccagaccggcggttacagtgacggcctggccgcttcacagatgtactctcctcagggaatctcagctaacggaggatggcaagacgcgacgacgcctagctcggtgacatcaccaaccgagggtcccgggtcagtccactccgacacgagcaactag

SEQ ID NO: 266408 - DNA, 978 bp, Artificial Sequence
  derived and/or modified sequence
atgaggctggacaacatgctgctggccgagggcgtggccggccctgagaagggcggcggcagcgctgctgctgctgctgctgctgctgccagcggcggggccggcagtgacaacagcgtggagcacagcgactaccgggccaagctgagccagatccggcagatctaccacacagagctggagaagtatgagcaggcctgcaatgagttcaccacccacgtgatgaacctgctgcgggagcagagcaggacccggcccatcagccccaaggagattgaaagaatggtgtccatcatccacaggaagttcagcagcatccagatgcagctgaagcagagcacctgtgaggccgtgatgatcctgcggagccgcttcctggatgcccggaggaagagaagaaacttcaacaagcaggccacagagatcctgaatgagtacttctacagccacctgagcaacccctaccccagcgaggaggccaaggaggagctggccaagaagtgtggcatcaccgtgtcccaggtgagcaactggtttggaaacaagaggatccgctacaagaagaacatcggcaagttccaggaggaggccaacatctatgctgccaagacagctgtgacagccaccaacgtgtctgcccacggcagccaggccaacagccccagcacccccaacagcgctggcagcagcagcagcttcaacatgagcaacagcggggacctcttcatgtctgtgcagagcctgaatggagacagctaccagggcgcccaggtgggcgccaacgtgcagagccaggtggacaccctgcggcacgtgatcagccagacaggaggctacagtgatggcctggccgccagccagatgtacagcccccagggcatcagcgccaatggaggctggcaggatgccaccacccccagctctgtgaccagccccacagagggccctggctctgtgcacagcgacaccagcaactag

SEQ ID NO: 266409 - DNA, 978 bp, Artificial Sequence
  derived and/or modified sequence
atgcggctggacaacatgctgctggccgagggcgtggccggccccgagaaaggcggagggtctgccgccgccgctgcagcagcagccgccagtggaggagctggttcggacaatagcgtggagcattcggattacagggccaaactgtctcaaattcgacaaatttaccataccgaacttgaaaagtatgagcaggcatgtaatgaattcaccacacacgtgatgaacttgctacgcgagcagtcaaggaccagacctatatctcctaaagaaattgagcggatggtgtcaatcatacaccgtaagttctcaagcatccaaatgcagctcaagcagtcaacgtgcgaggctgttatgatcttgcgatcacggttcttggacgcccggcgcaaacgcaggaattttaataagcaagctactgagatcctgaacgagtacttctactcccacctgtctaatccatacccctccgaagaagctaaagaggaactggccaaaaagtgtggaattaccgtgtctcaggtgtctaattggtttggcaataagcggatccgctataagaagaatattggcaagttccaggaggaagccaacatatatgcggcaaaaactgcagtcactgccacaaacgtctcagctcacgggagccaggcaaactctcctagcacgcctaattctgccgggtcgtcatcttcttttaatatgtccaatagcggggatttgttcatgagcgtgcagtctctaaacggagacagttaccaaggggctcaggtgggcgccaatgtccagagccaagtagacacgcttagacatgttatctcccagactggcggatacagcgacgggctggcagctagccagatgtattcgcctcagggtatttctgcgaatggaggatggcaggatgctactacaccatcttcagtaactagccccaccgaaggtcctggctcggtgcacagcgacacttcaaattag

SEQ ID NO: 266410 - DNA, 978 bp, Artificial Sequence
  derived and/or modified sequence
atgcggctggacaacatgctgctggccgagggcgtggccggccccgaaaagggtggcggaagtgccgcagccgcggcagctgccgccgcctcgggtggcgcgggcagcgacaactcggtggagcattctgactatcgggccaagttgtcacagatacgccaaatttatcataccgagttggaaaaatacgaacaggcctgcaacgagttcacaacacatgttatgaaccttttgagagaacagagccggacacggcccatttcgccaaaggagatcgaacgaatggtgtcaattatccaccgcaagttttcttctatccagatgcagctgaaacagagtacatgtgaggccgtaatgatacttaggtcaaggttcctggacgcccgcaggaagcgcagaaatttcaataagcaggctacggagatactcaatgaatatttctactctcatctctcaaatccgtatccttccgaagaggccaaggaggaattagcaaagaagtgcggaatcaccgtgagtcaggtcagcaattggttcggcaacaaacgcatcaggtacaaaaagaacatcggcaagttccaggaggaggccaatatatacgcagctaaaacagctgtaacagctactaatgtatctgcgcacgggtcccaggccaacagtccttccaccccaaactctgctggcagcagcagttcattcaacatgtctaattcaggggacctgtttatgtcggtccagagcctgaatggggatagttaccaaggggcccaggtgggagcaaacgtccagtcccaggtagacaccctgcggcacgtcatttcgcagacagggggctacagcgacggactcgctgcttcccaaatgtactccccacaaggcatctctgctaatggggggtggcaggacgccactacaccttcaagcgttacctcaccaactgaggggcccggttcagtacattcagacacttcaaactag

SEQ ID NO: 266411 - DNA, 978 bp, Artificial Sequence
  derived and/or modified sequence
atgcggctggacaacatgctgctggccgagggcgtggccggccccgagaaggggggagggtctgcagctgccgccgcagccgccgccgcttccgggggcgctggctccgacaacagcgtagagcattccgattatagggctaagcttagtcagatcaggcagatctaccatacagagcttgaaaagtacgaacaggcctgtaatgaattcactacacacgtgatgaatttgctcagggaacaatcaaggacccggcctatttctcctaaggagatagaaaggatggtgagtattattcaccggaagttttctagtatccagatgcaactcaagcaatccacctgtgaagcggtcatgatactcagatcccgcttccttgatgcacggcggaaacgcagaaactttaacaaacaagccactgaaattttaaatgaatacttctatagtcacttgtcgaacccttatcctagtgaggaagccaaagaggagcttgcgaagaagtgcgggattactgtctcgcaggtctccaactggtttggcaataaaagaatccgttataagaaaaatatcgggaaattccaagaggaggcaaacatttatgccgcgaagacagcagtgaccgccaccaatgttagcgcccacggttcccaagccaactccccttctacacctaacagtgcagggagttcatccagcttcaacatgagcaactctggtgatctgttcatgtcagtgcagtcgcttaatggcgacagctaccagggggcccaggtgggcgccaatgtgcagagccaggttgacacattgagacatgttatttcacaaactgggggctactccgatggactggccgcctctcaaatgtattcacctcagggaattagcgccaatggagggtggcaggacgccaccactcccagctcagtgacttctcctacggagggacccggaagtgtccacagcgacactagcaattag

SEQ ID NO: 266412 - DNA, 978 bp, Artificial Sequence
  derived and/or modified sequence
atgcgtctggacaatatgctgctggccgaaggtgtcgctggacccgaaaaggggggtggtagcgctgccgctgctgccgcagctgctgccagcgggggagccggatcagacaatagcgtggaacattcagattatagggccaagctttcacagattcggcaaatataccatacagaactggagaagtatgaacaggcctgtaatgagtttacgacgcacgttatgaatctcctgcgtgagcaaagcaggacacgccctataagcccaaaggaaatcgaaaggatggtcagtataattcaccggaagttttcctccattcagatgcagctgaaacagagcacttgtgaagccgtgatgatcctccgaagcaggttcctggacgctcgacggaaacgtcggaatttcaataaacaggccaccgagatcctcaatgaatacttctattctcacctatccaatccttatccctcagaagaggccaaggaagagctcgcaaaaaaatgtgggataacggtgagccaggtgtccaattggtttgggaataagaggatacggtataaaaagaacatcggtaaatttcaagaagaggcaaatatctatgccgctaaaacggctgtgacagctaccaatgtgtccgcgcacggcagccaggcaaactctccatcaacccctaactccgcagggagttcttcctcttttaacatgtctaactctggggatttgttcatgtcagtgcagagcctcaacggggacagctatcagggggcacaggtgggcgcaaacgtccagtcccaggtggacacgctgaggcacgtgatatcccagacaggaggatactccgatggccttgccgcttcacaaatgtactccccccaaggcatctccgccaatggcggatggcaagatgctactaccccgtcctcagtcacgtcccccacggaaggccctggctcagtacattccgatactagcaattag

SEQ ID NO: 266413 - DNA, 978 bp, Artificial Sequence
  derived and/or modified sequence
atgcgcctggacaatatgctgctggctgaaggtgttgctggtcctgaaaagggcggaggtagcgccgctgccgctgcagctgctgccgcttcaggcggagcgggtagcgacaactcagtagaacatagtgactacagagccaaattgtctcaaatacgccagatatatcataccgagttggaaaagtatgagcaagcctgtaacgagtttacaacccacgtgatgaatctgctgagggagcagagtcggacgcgcccaattagtccaaaagagatagagagaatggttagcatcatccaccgaaagttctcatctattcaaatgcagctgaaacagagcacctgtgaggctgtgatgatcctaaggagccgctttctcgacgccaggaggaaaaggaggaacttcaacaagcaggccacagagattctgaatgagtatttctacagccatctgtccaatccctacccaagtgaagaagccaaggaggagctcgctaaaaaatgtggaatcaccgtgtcccaggtgagcaattggttcggtaataagagaatacgctataagaagaatattggcaagttccaggaagaggccaatatatacgccgctaagactgccgtgacagcgacgaatgtcagtgcacacggttctcaagcaaactccccatctactccaaacagcgctgggtcttcctcttccttcaatatgagtaattccggggatttgtttatgtcggtgcaatccctgaacggggactcttatcagggcgcacaagtaggcgcaaatgtgcagtcacaagtagacacactccggcatgtaatatctcaaacgggaggatacagtgatggactcgccgcatctcagatgtattctccccaaggcataagcgccaatggaggctggcaggacgccacaacaccgtccagcgtgacttcccctaccgagggccctggatctgtgcacagcgatacaagtaactag

SEQ ID NO: 266414 - DNA, 978 bp, Artificial Sequence
  derived and/or modified sequence
atgcgtttggacaatatgctcctcgccgagggagtggcaggacccgagaagggtggtggtagcgccgctgctgctgcagccgctgccgcatccggaggtgcagggtccgacaacagcgtggaacacagcgattacagggccaagctgtcccagattaggcagatctatcatactgagctggagaagtacgagcaggcttgcaacgagtttacaacccacgtgatgaatcttttacgggaacagtctcgcacaagacctatctcccccaaagaaatagagcgaatggtgagcatcatacaccggaaattctcatctatccagatgcagttgaagcaatccacctgcgaggcggtcatgattctacgcagccggttcctcgatgccagaagaaaacggaggaactttaataagcaagctacggagatattgaatgagtacttttactcccacctgtcgaatccttatccctcggaagaagccaaggaagagctcgccaagaagtgtggcataaccgtaagccaggtgtccaactggtttggcaataagaggatcagatataaaaagaatattggtaagttccaagaggaggcaaacatttatgctgcgaagaccgcagtgacggctacaaatgtctccgcgcatggtagtcaggcaaacagcccttcgacccccaattcagccggatcatccagttcctttaacatgtctaactccggtgacctcttcatgtccgtgcagtcactgaacggcgactcataccaaggcgctcaagtgggggctaatgtccaaagccaggtggacacactgagacatgtaatatctcagaccgggggatatagcgatggcctcgcagcgtcccagatgtatagtccccagggcatatctgcaaatgggggatggcaggatgcaacaacacccagttcagtaacatcacctaccgaggggcctggaagtgttcatagtgacacatctaattag

SEQ ID NO: 266415 - DNA, 978 bp, Artificial Sequence
  derived and/or modified sequence
atgagactggacaacatgctgctggccgagggcgtggccggccccgagaagggcggcggcagcgccgccgccgccgccgccgccgccgccagcggcggcgccggcagcgacaacagcgtggagcacagcgactacagagccaagctgagccagatcagacagatctaccacaccgagctggagaagtacgagcaggcctgcaacgagttcaccacccacgtgatgaacctgctgagagagcagagcagaaccagacccatcagccccaaggagatcgagagaatggtgagcatcatccacagaaagttcagcagcatccagatgcagctgaagcagagcacctgcgaggccgtgatgatcctgagaagcagattcctggacgccagaagaaagagaagaaacttcaacaagcaggccaccgagatcctgaacgagtacttctacagccacctgagcaacccctaccccagcgaggaggccaaggaggagctggccaagaagtgcggcatcaccgtgagccaggtgagcaactggttcggcaacaagagaatcagatacaagaagaacatcggcaagttccaggaggaggccaacatctacgccgccaagaccgccgtgaccgccaccaacgtgagcgcccacggcagccaggccaacagccccagcacccccaacagcgccggcagcagcagcagcttcaacatgagcaacagcggcgacctgttcatgagcgtgcagagcctgaacggcgacagctaccagggcgcccaggtgggcgccaacgtgcagagccaggtggacaccctgagacacgtgatcagccagaccggcggctacagcgacggcctggccgccagccagatgtacagcccccagggcatcagcgccaacggcggctggcaggacgccaccacccccagcagcgtgaccagccccaccgagggccccggcagcgtgcacagcgacaccagcaactag

SEQ ID NO: 266416 - protein, 355 aa, Artificial Sequence
  derived and/or modified sequence
MTGNAGEWCLMESDPGVFTELIKGFGCRGAQVEEIWSLEPENFEKLKPVHGLIFLFKWQPGEEPAGSVVQDSRLDTIFFAKQVINNACATQAIVSVLLNCTHQDVHLGETLSEFKEFSQSFDAAMKGLALSNSDVIRQVHNSFARQQMFEFDTKTSAKEEDAFHFVSYVPVNGRLYELDGLREGPIDLGACNQDDWISAVRPVIEKRIQKDGFSPCCPGWSQTPELKPSACLDLPKWYSEGEIRFNLMAIVSDRKMIYEQKIAELQRQLAEEPMDTDQGNSMLSAIQSEVAKNQMLIEEEVQKLKRYKIENIRRKHNYLPFIMELLKTLAEHQQLIPLVEKAKEKQNAKKAQETK

SEQ ID NO: 266417 - DNA, 1818 bp, Artificial Sequence
  derived and/or modified sequence
cgctacgggtgctgcaaggcctgggaagagtttcgatgtctctagggtggctagagcgtcctcccgcgctcagtcgcgctgcaggtgacggcgcccggaggctgtcgggaagtaggcggggtgacgtgtggttgacgagctcggcggcgggtttgctgagatctgtggccggcggcagctggtgcggggggcagctgagagcgagaggtggatcggggcggtgtgtggccagggccatgacgggcaatgccggggagtggtgcctcatggaaagcgaccccggggtcttcaccgagctcattaaaggattcggttgccgaggagcccaagtagaagaaatatggagtttagagcctgagaattttgaaaaattaaagccagttcatgggttaatttttcttttcaagtggcagccaggagaagaaccagcaggctctgtggttcaggactcccgacttgacacgatattttttgctaagcaggtaattaataatgcttgtgctactcaagccatagtgagtgtgttactgaactgtacccaccaggatgtccatttaggcgagacattatcagagtttaaagaattttcacaaagttttgatgcagctatgaaaggcttggcactgagcaattcagatgtgattcgacaagtacacaacagtttcgccagacagcaaatgtttgaatttgatacgaagacatcagcaaaagaagaagatgcttttcactttgtcagttatgttcctgttaatgggagactgtatgaattagatggattaagagaaggaccgattgatttaggtgcatgcaatcaagatgattggatcagtgcagtaaggcctgtcatagaaaaaaggatacaaaagtacagtgaaggtgaaattcgatttaatttaatggccattgtgtctgacagaaaaatgatatatgagcagaagatagcagagttacaaagacaacttgcagaggaggaacccatggatacagatcaaggtaatagtatgttaagtgctattcagtcagaagttgccaaaaatcagatgcttattgaagaagaagtacagaaattaaaaagatacaagattgagaatatcagaaggaagcataattatctgcctttcattatggaattgttaaagactttagcagaacaccagcagttaataccactagtagaaaaggcaaaagaaaaacagaacgcaaagaaagctcaggaaaccaaatgaagatgttttcagatatgtacacatttctgcttctgcacatattttcatggaaaccattatgtataaagaacttagagcaacatcctaattggctcagtgcacgtttggcaatagtgccagcctgtcttgtctttaatgcatggattcataaacttcttccctacctgcatcatgtgcatgtagtgcatattaaatgaaagtgatattaagaatgctttcccaaattccattatttgacattgagtctgacaactgttagttttctggttgtctaactaccatatgaagctagaaaatgcacaaacgatattccttatctgtaatttaaatacttaaaatttgcaattgtcagatcttgattaaactggttgtcttatttcttctcatcattaacggaaaaaaaatcagtatttctatctttgatatctaagtgttttgaggattttaaaactgaattttatctgctataccagttatttgagaaagtatgattttaatgtaaatcatttaaaaaggacaaaagtataatttccagtgattttcactgctgtcagtagaaaagtaataaacatctcaattttattttagtaaa

SEQ ID NO: 266418 - protein, 192 aa, Artificial Sequence
  derived and/or modified sequence
MKGLALSNSDVIRQVHNSFARQQMFEFDTKTSAKEEDAFHFVSYVPVNGRLYELDGLREGPIDLGACNQDDWISAVRPVIEKRIQKYSEGEIRFNLMAIVSDRKMIYEQKIAELQRQLAEEPMDTDQGNSMLSAIQSEVAKNQMLIEEEVQKLKRYKIENIRRKHNYLPFIMELLKTLAEHQQLIPLVEKIF

SEQ ID NO: 266419 - protein, 317 aa, Artificial Sequence
  derived and/or modified sequence
MESDPGVFTELIKGFGCRGAQVEEIWSLEPENFEKLKPVHGLIFLFKWQPGEEPAGSVVQDSRLDTIFFAKQVINNACATQAIVSVLLNCTHQDVHLGETLSEFKEFSQSFDAAMKGLALSNSDVIRQVHNSFARQQMFEFDTKTSAKEEDAFHFVSYVPVNGRLYELDGLREGPIDLGACNQDDWISAVRPVIEKRIQKYSEGEIRFNLMAIVSDRKMIYEQKIAELQRQLAEEEPMDTDQGNSMLSAIQSEVAKNQMLIEEEVQKLKRYKIENIRRKHNYLPFIMELLKTLAEHQQLIPLVEKFEKHFEKTLLGK

SEQ ID NO: 266420 - protein, 218 aa, Artificial Sequence
  derived and/or modified sequence
  misc_feature (1)..(1): Xaa can be any naturally occurring amino acid
XLSEFKEFSQSFDAAMKGLALSNSDVIRQVHNSFARQQMFEFDTKTSAKEEDAFHFVSYVPVNGRLYELDGLREGPIDLGACNQDDWISAVRPVIEKRIQKYSEGEIRFNLMAIVSDRKMIYEQKIAELQRQLAEEEPMDTDQGNSMLSAIQSEVAKNQMLIEEEVQKLKRYKIENIRRKHNYLPFIMELLKTLAEHQQLIPLVEKFEKHFEKTLLGK

SEQ ID NO: 266421 - protein, 183 aa, Artificial Sequence
  derived and/or modified sequence
  misc_feature (1)..(1): Xaa can be any naturally occurring amino acid
XQQMFEFDTKTSAKEEDAFHFVSYVPVNGRLYELDGLREGPIDLGACNQDDWISAVRPVIEKRIQKYSEGEIRFNLMAIVSDRKMIYEQKIAELQRQLAEEEPMDTDQGNSMLSAIQSEVAKNQMLIEEEVQKLKRYKIENIRRKHNYLPFIMELLKTLAEHQQLIPLVEKFEKHFEKTLLGK

SEQ ID NO: 266422 - protein, 115 aa, Artificial Sequence
  derived and/or modified sequence
  misc_feature (1)..(1): Xaa can be any naturally occurring amino acid
XEGEIRFNLMAIVSDRKMIYEQKIAELQRQLAEEPMDTDQGNSMLSAIQSEVAKNQMLIEEEVQKLKRYKIENIRRKHNYLPFIMELLKTLAEHQQLIPLVEKFEKHFEKTLLGK

SEQ ID NO: 266423 - DNA, 1534 bp, Artificial Sequence
  derived and/or modified sequence
cgagctcggcggcgggtttgctgagatctgtggccggcggcagctggtgcggggggcagctgagagcgagaggtggatcggggcggtgtgtggccagggccatgacgggcaatgccggggagtggtgcctcatggaaagcgaccccggggtcttcaccgagctcattaaaggattcggttgccgaggagcccaagtagaagaaatatggagtttagagcctgagaattttgaaaaattaaagccagttcatgggttaatttttcttttcaagtggcagccaggagaagaaccagcaggctctgtggttcaggactcccgacttgacacgatattttttgctaagcaggtaattaataatgcttgtgctactcaagccatagtgagtgtgttactgaactgtacccaccaggatgtccatttaggcgagacattatcagagtttaaagaattttcacaaagttttgatgcagctatgaaaggcttggcactgagcaattcagatgtgattcgacaagtacacaacagtttcgccagacagcaaatgtttgaatttgatacgaagacatcagcaaaagaagaagatgcttttcactttgtcagttatgttcctgttaatgggagactgtatgaattagatggattaagagaaggaccgattgatttaggtgcatgcaatcaagatgattggatcagtgcagtaaggcctgtcatagaaaaaaggatacaaaagtacagtgaaggtgaaattcgatttaatttaatggccattgtgtctgacagaaaaatgatatatgagcagaagatagcagagttacaaagacaacttgcagaggaacccatggatacagatcaaggtaatagtatgttaagtgctattcagtcagaagttgccaaaaatcagatgcttattgaagaagaagtacagaaattaaaaagatacaagattgagaatatcagaaggaagcataattatctgcctttcattatggaattgttaaagactttagcagaacaccagcagttaataccactagtagaaaagtttgagaaacactttgagaagacactactaggcaaataaaattttggaccattaacttaaagacgagaatacatgggaaaataggataaaagaacaaggtgtgagaaggaatagaaggaaacaaacaggaaagatatggctgcaccatgcagtgctactatatgctgagattctacaggatgagatttttgaatagctgaggcagttgcctataatctgtgatgacataaaagtatttgacctaaaatctttttatttgcaaaataataaataaaaagtgattctccctcggcatggctataatgaacttggttagaacctataaatgtttttgttatgtgagactttttaaccgatgaattcgttgaatacacaccacatttaaaaactgcctaggaggtaatccaaaaatatatagttataaaacttcttgtattatgtaccaaatctctttcttaaaatataaaataaaattatctagtttaagatta

SEQ ID NO: 266424 - DNA, 1507 bp, Artificial Sequence
  derived and/or modified sequence
acggcgcccggaggctgtcgggaagtaggcggggtgacgtgtggttgacgagctcggcggcgggtttgctgagatctgtggccggcggcagctggtgcggggggcagctgagagcgagaggtggatcggggcggtgtgtggccagggccatgacgggcaatgccggggagtggtgcctcatggaaagcgaccccggggtcttcaccgagctcattaaaggattcggttgccgaggagcccaagtagaagaaatatggagtttagagcctgagaattttgaaaaattaaagccagttcatgggttaatttttcttttcaagtggcagccaggagaagaaccagcaggctctgtggttcaggactcccgacttgacacgatattttttgctaagcaggtaattaataatgcttgtgctactcaagccatagtgagtgtgttactgaactgtacccaccaggatgtccatttaggcgagacattatcagagtttaaagaattttcacaaagttttgatgcagctatgaaaggcttggcactgagcaattcagatgtgattcgacaagtacacaacagtttcgccagacagcaaatgtttgaatttgatacgaagacatcagcaaaagaagaagatgcttttcactttgtcagttatgttcctgttaatgggagactgtatgaattagatggattaagagaaggaccgattgatttaggtgcatgcaatcaagatgattggatcagtgcagtaaggcctgtcatagaaaaaaggatacaaaagtacagtgaaggtgaaattcgatttaatttaatggccattgtgtctgacagaaaaatgatatatgagcagaagatagcagagttacaaagacaacttgcagaggaacccatggatacagatcaaggtaatagtatgttaagtgctattcagtcagaagttgccaaaaatcagatgcttattgaagaagaagtacagaaattaaaaagatacaagattgagaatatcagaaggaagcataattatctgcctttcattatggaattgttaaagactttagcagaacaccagcagttaataccactagtagaaaagggaaaataggataaaagaacaaggtgtgagaaggaatagaaggaaacaaacaggaaagatatggctgcaccatgcagtgctactatatgctgagattctacaggatgagatttttgaatagctgaggcagttgcctataatctgtgatgacataaaagtatttgacctaaaatctttttatttgcaaaataataaataaaaagtgattctccctcggcatggctataatgaacttggttagaacctataaatgtttttgttatgtgagactttttaaccgatgaattcgttgaatacacaccacatttaaaaactgcctaggaggtaatccaaaaatatatagttataaaacttcttgtattatgtaccaaatctctttcttaaaatataaaataaaattatctagtttaagatta

SEQ ID NO: 266425 - DNA, 1815 bp, Artificial Sequence
  derived and/or modified sequence
cgctacgggtgctgcaaggcctgggaagagtttcgatgtctctagggtggctagagcgtcctcccgcgctcagtcgcgctgcaggtgacggcgcccggaggctgtcgggaagtaggcggggtgacgtgtggttgacgagctcggcggcgggtttgctgagatctgtggccggcggcagctggtgcggggggcagctgagagcgagaggtggatcggggcggtgtgtggccagggccatgacgggcaatgccggggagtggtgcctcatggaaagcgaccccggggtcttcaccgagctcattaaaggattcggttgccgaggagcccaagtagaagaaatatggagtttagagcctgagaattttgaaaaattaaagccagttcatgggttaatttttcttttcaagtggcagccaggagaagaaccagcaggctctgtggttcaggactcccgacttgacacgatattttttgctaagcaggtaattaataatgcttgtgctactcaagccatagtgagtgtgttactgaactgtacccaccaggatgtccatttaggcgagacattatcagagtttaaagaattttcacaaagttttgatgcagctatgaaaggcttggcactgagcaattcagatgtgattcgacaagtacacaacagtttcgccagacagcaaatgtttgaatttgatacgaagacatcagcaaaagaagaagatgcttttcactttgtcagttatgttcctgttaatgggagactgtatgaattagatggattaagagaaggaccgattgatttaggtgcatgcaatcaagatgattggatcagtgcagtaaggcctgtcatagaaaaaaggatacaaaagtacagtgaaggtgaaattcgatttaatttaatggccattgtgtctgacagaaaaatgatatatgagcagaagatagcagagttacaaagacaacttgcagaggaacccatggatacagatcaaggtaatagtatgttaagtgctattcagtcagaagttgccaaaaatcagatgcttattgaagaagaagtacagaaattaaaaagatacaagattgagaatatcagaaggaagcataattatctgcctttcattatggaattgttaaagactttagcagaacaccagcagttaataccactagtagaaaaggcaaaagaaaaacagaacgcaaagaaagctcaggaaaccaaatgaagatgttttcagatatgtacacatttctgcttctgcacatattttcatggaaaccattatgtataaagaacttagagcaacatcctaattggctcagtgcacgtttggcaatagtgccagcctgtcttgtctttaatgcatggattcataaacttcttccctacctgcatcatgtgcatgtagtgcatattaaatgaaagtgatattaagaatgctttcccaaattccattatttgacattgagtctgacaactgttagttttctggttgtctaactaccatatgaagctagaaaatgcacaaacgatattccttatctgtaatttaaatacttaaaatttgcaattgtcagatcttgattaaactggttgtcttatttcttctcatcattaacggaaaaaaaatcagtatttctatctttgatatctaagtgttttgaggattttaaaactgaattttatctgctataccagttatttgagaaagtatgattttaatgtaaatcatttaaaaaggacaaaagtataatttccagtgattttcactgctgtcagtagaaaagtaataaacatctcaattttattttagtaaa

SEQ ID NO: 266426 - DNA, 1063 bp, Artificial Sequence
  derived and/or modified sequence
gagatctgtggccggcggcagctggtgcggggggcagctgagagcgagaggtggatcggggcggtgtgtggccagggccatgacgggcaatgccggggagtggtgcctcatggaaagcgaccccggggtcttcaccgagctcattaaaggattcggttgccgaggagcccaagtagaagaaatatggagtttagagcctgagaattttgaaaaattaaagccagttcatgggttaatttttcttttcaagtggcagccaggagaagaaccagcaggctctgtggttcaggactcccgacttgacacgatattttttgctaagcaggtaattaataatgcttgtgctactcaagccatagtgagtgtgttactgaactgtacccaccaggatgtccatttaggcgagacattatcagagtttaaagaattttcacaaagttttgatgcagctatgaaaggcttggcactgagcaattcagatgtgattcgacaagtacacaacagtttcgccagacagcaaatgtttgaatttgatacgaagacatcagcaaaagaagaagatgcttttcactttgtcagttatgttcctgttaatgggagactgtatgaattagatggattaagagaaggaccgattgatttaggtgcatgcaatcaagatgattggatcagtgcagtaaggcctgtcatagaaaaaaggatacaaaagtacagtgaaggtgaaattcgatttaatttaatggccattgtgtctgacagaaaaatgatatatgagcagaagatagcagagttacaaagacaacttgcagaggaggaacccatggatacagatcaaggtaatagtatgttaagtgctattcagtcagaagttgccaaaaatcagatgcttattgaagaagaagtacagaaattaaaaagatacaagattgagaatatcagaaggaagcataattatctgcctttcattatggaattgttaaagactttagcagaacaccagcagttaataccactagtagaaaagtttgagaaacactttgagaagacactactaggcaaataa

SEQ ID NO: 266427 - DNA, 1067 bp, Artificial Sequence
  derived and/or modified sequence
gatctgtggccggcggcagctggtgcggggggcagctgagagcgagaggtggatcggggcggtgtgtggccagggccatgacgggcaatgccggggagtggtgcctcatggaaagcgaccccggggtcttcaccgagctcattaaaggattcggttgccgaggagcccaagtagaagaaatatggagtttagagcctgagaattttgaaaaattaaagtaattaataatgcttgtgctactcaagccatagtgagtgtgttactgaactgtacccaccaggatgtccatttaggcgagacattatcagagtttaaagaattttcacaaagttttgatgcagctatgaaaggcttggcactgagcaattcagatgtgattcgacaagtacacaacagtttcgccagacagcaaatgtttgaatttgatacgaagacatcagcaaaagaagaagatgcttttcactttgtcagttatgttcctgttaatgggagactgtatgaattagatggattaagagaaggaccgattgatttaggtgcatgcaatcaagatgattggatcagtgcagtaaggcctgtcatagaaaaaaggatacaaaagtacagtgaaggtgaaattcgatttaatttaatggccattgtgtctgacagaaaaatgatatatgagcagaagatagcagagttacaaagacaacttgcagaggaggaacccatggatacagatcaaggtaatagtatgttaagtgctattcagtcagaagttgccaaaaatcagatgcttattgaagaagaagtacagaaattaaaaagatacaagattgagaatatcagaaggaagcataattatctgcctttcattatggaattgttaaagactttagcagaacaccagcagttaataccactagtagaaaagatattctgatataggggaaggattctttaataagttccccaagtgattctaatgcaactggtctgtgtaccacagtttgagaaacactttgagaagacactactaggcaaataaaattttggaccattaacttaaagacgagaatacatgg

SEQ ID NO: 266428 - protein, 258 aa, Artificial Sequence
  derived and/or modified sequence
MSLGWLERPPALSRAAGCRGAQVEEIWSLEPENFEKLKPVHGLIFLFKWQPGEEPAGSVVQDSRLDTIFFAKQVINNACATQAIVSVLLNCTHQDVHLGETLSEFKEFSQSFDAAMKGLALSNSDVIRQVHNSFARQQMFEFDTKTSAKEEDAFHFVSYVPVNGRLYELDGLREGPIDLGACNQDDWISAVRPVIEKRIQKYSEGEIRFNLMAIVSDRKMIYEQKIAELQRQLAEEPMDTDQGNSMLSAIQSEVAKNQ

SEQ ID NO: 266429 - DNA, 777 bp, Artificial Sequence
  derived and/or modified sequence
atgagcctgggctggctggagagaccccccgccctgagcagagccgccggctgcagaggcgcccaggtggaggagatctggagcctggagcccgagaacttcgagaagctgaagcccgtgcacggcctgatcttcctgttcaagtggcagcccggcgaggagcccgccggcagcgtggtgcaggacagcagactggacaccatcttcttcgccaagcaggtgatcaacaacgcctgcgccacccaggccatcgtgagcgtgctgctgaactgcacccaccaggacgtgcacctgggcgagaccctgagcgagttcaaggagttcagccagagcttcgacgccgccatgaagggcctggccctgagcaacagcgacgtgatcagacaggtgcacaacagcttcgccagacagcagatgttcgagttcgacaccaagaccagcgccaaggaggaggacgccttccacttcgtgagctacgtgcccgtgaacggcagactgtacgagctggacggcctgagagagggccccatcgacctgggcgcctgcaaccaggacgactggatcagcgccgtgagacccgtgatcgagaagagaatccagaagtacagcgagggcgagatcagattcaacctgatggccatcgtgagcgacagaaagatgatctacgagcagaagatcgccgagctgcagagacagctggccgaggagcccatggacaccgaccagggcaacagcatgctgagcgccatccagagcgaggtggccaagaaccagtag

SEQ ID NO: 266430 - DNA, 777 bp, Artificial Sequence
  derived and/or modified sequence
atgtcacttgggtggctggaacgaccccctgctctcagtcgcgctgccggctgtcgcggcgcgcaggtggaagagatttggagtctcgaacctgagaattttgaaaagctgaagcccgtgcatgggttaatattcctattcaagtggcaacccggcgaggaacccgccggctcagtggtgcaggacagtagactggacacaatcttcttcgctaagcaggtgatcaataatgcttgcgctacacaggctatcgtgtccgtgcttctgaactgtacacatcaggatgttcacctgggtgagacattgtctgaattcaaagagttttctcaaagtttcgatgcagccatgaaagggttagccctcagtaattccgacgtgataagacaggtgcataattcgtttgcaagacaacagatgttcgagttcgacactaagacgtccgcaaaagaggaagatgcatttcacttcgtgtcttatgttcccgtcaatggcagactctacgaactagatggtcttcgcgaggggccaattgatctgggcgcctgtaatcaagatgactggatatctgccgtgagacccgtgatcgagaagcgaatccagaaatatagcgagggcgaaatcagatttaatcttatggccatagtgagcgacaggaagatgatttatgaacagaaaatcgccgagttgcaaaggcagctcgctgaagaacccatggataccgaccagggcaattccatgctgtctgctatccaaagcgaggtggccaagaatcaatag

SEQ ID NO: 266431 - DNA, 777 bp, Artificial Sequence
  derived and/or modified sequence
atgagcctgggctggctggagcggcccccagccctgagcagagctgctggctgccgcggggcccaggtggaggagatctggagcctggagcctgagaactttgagaagctgaagcctgtgcacggcctcatcttcctgttcaagtggcagcctggagaggagcccgccggctctgtggtgcaggacagccggctggacaccatcttctttgccaagcaggtgatcaacaatgcctgtgccacccaggccatcgtgtctgtgctgctgaactgcacccaccaggatgtgcacctgggggagaccctgtctgagttcaaggagttcagccagagctttgatgctgccatgaagggcctggccctgagcaacagtgatgtgatccggcaggtgcacaacagctttgcccggcagcagatgtttgaatttgacaccaagaccagcgccaaggaggaggatgccttccactttgtgtcctatgtgcctgtgaatggccgcctgtatgagctggatggcctgcgggagggccccatcgacctgggcgcctgcaaccaggatgactggatctctgctgtgcggcctgtgattgagaagaggatccagaagtacagcgagggggagatccgcttcaacctgatggccatcgtgtctgacaggaagatgatctatgagcagaagattgctgagctgcagaggcagctggccgaggagcccatggacacagaccagggcaacagcatgctgagcgccatccagagcgaggtggccaagaaccagtag

SEQ ID NO: 266432 - DNA, 777 bp, Artificial Sequence
  derived and/or modified sequence
atgagcctgggctggctggagcggccccccgccctgagccgggccgctggctgtcgaggagcgcaggtggaagaaatatggtccctggaacctgagaatttcgaaaaactgaaaccagtgcatggtttgatcttcctcttcaaatggcagcctggtgaagagcccgccggtagtgttgttcaagatagcaggctggacaccattttcttcgcgaagcaagtcattaataatgcctgcgctacacaggccatcgtcagcgtgttgttgaactgcacccaccaggacgtccacctgggagagaccttgtcagaatttaaagagtttagtcaaagctttgacgctgcgatgaagggcctcgccctgtccaactcggatgtcatcagacaagtacataatagttttgcgagacagcagatgtttgaattcgatacaaaaacctccgccaaagaggaggatgcgtttcatttcgttagttatgtacctgtaaatggcagactgtatgagctggacggactgagagaaggacctatagacctgggggcatgcaaccaggatgactggatctccgccgtcaggcccgttatcgagaagagaattcaaaaatactccgaaggtgaaattcggtttaatctgatggcaatcgtgtcggaccggaagatgatatacgaacagaagatcgcggagctccagcgccagctggccgaagaacctatggacaccgaccagggcaactcaatgttgtccgccatacagagtgaggttgcaaaaaaccagtag

SEQ ID NO: 266433 - DNA, 777 bp, Artificial Sequence
  derived and/or modified sequence
atgtcgctcggatggctagaaaggccccctgctctatcaagggccgcaggctgtcgcggtgctcaggttgaggaaatctggagcctggagcctgagaattttgaaaagctgaagcctgtacacggcctgatctttttgttcaagtggcagccaggagaagaacctgctgggagcgtggttcaggattctagacttgataccatattctttgctaaacaggtcataaataacgcttgtgccactcaggccattgtcagtgtgttgctgaattgtacccatcaggatgtccacctgggagagacgttatctgagtttaaagagttttcccagagttttgatgcagccatgaaggggctggcactgtccaactccgacgtaatcaggcaggtgcacaactccttcgctaggcaacaaatgtttgagtttgacaccaaaacaagcgccaaggaagaagacgcttttcattttgtctcctatgttccagtcaatggtcggctttatgaattggacggtttgcgtgaaggcccaatagatctgggagcttgcaaccaagacgactggattagcgccgtccggccagtcatcgagaagcggattcagaaatattcggaaggagaaatccgctttaacctcatggctatcgtgagcgaccggaagatgatctacgagcagaagatcgccgaactgcagcggcagcttgcggaagagcccatggacacggatcaaggcaacagcatgctgtctgcaatccagtctgaagtcgccaaaaaccagtag

SEQ ID NO: 266434 - DNA, 834 bp, Artificial Sequence
  derived and/or modified sequence
tctcaggccccagcccttccgaatccgctacgggtgctgcaaggcctgggaagagtttcgatgtctctagggtggctagagcgtcctcccgcgctcagtcgcgctgcaggttgccgaggagcccaagtagaagaaatatggagtttagagcctgagaattttgaaaaattaaagccagttcatgggttaatttttcttttcaagtggcagccaggagaagaaccagcaggctctgtggttcaggactcccgacttgacacgatattttttgctaagcaggtaattaataatgcttgtgctactcaagccatagtgagtgtgttactgaactgtacccaccaggatgtccatttaggcgagacattatcagagtttaaagaattttcacaaagttttgatgcagctatgaaaggcttggcactgagcaattcagatgtgattcgacaagtacacaacagtttcgccagacagcaaatgtttgaatttgatacgaagacatcagcaaaagaagaagatgcttttcactttgtcagttatgttcctgttaatgggagactgtatgaattagatggattaagagaaggaccgattgatttaggtgcatgcaatcaagatgattggatcagtgcagtaaggcctgtcatagaaaaaaggatacaaaagtacagtgaaggtgaaattcgatttaatttaatggccattgtgtctgacagaaaaatgatatatgagcagaagatagcagagttacaaagacaacttgcagaggaacccatggatacagatcaaggtaatagtatgttaagtgctattcagtcagaagttgccaaaaatcag

SEQ ID NO: 266435 - protein, 193 aa, Artificial Sequence
  derived and/or modified sequence
MKGLALSNSDVIRQVHNSFARQQMFEFDTKTSAKEEDAFHFVSYVPVNGRLYELDGLREGPIDLGACNQDDWISAVRPVIEKRIQKYSEGEIRFNLMAIVSDRKMIYEQKIAELQRQLAEEEPMDTDQGNSMLSAIQSEVAKNQMLIEEEVQKLKRYKIENIRRKHNYLPFIMELLKTLAEHQQLIPLVEKIF

SEQ ID NO: 266436 - DNA, 582 bp, Artificial Sequence
  derived and/or modified sequence
atgaagggcctggccctgagcaacagcgacgtgatcagacaggtgcacaacagcttcgccagacagcagatgttcgagttcgacaccaagaccagcgccaaggaggaggacgccttccacttcgtgagctacgtgcccgtgaacggcagactgtacgagctggacggcctgagagagggccccatcgacctgggcgcctgcaaccaggacgactggatcagcgccgtgagacccgtgatcgagaagagaatccagaagtacagcgagggcgagatcagattcaacctgatggccatcgtgagcgacagaaagatgatctacgagcagaagatcgccgagctgcagagacagctggccgaggaggagcccatggacaccgaccagggcaacagcatgctgagcgccatccagagcgaggtggccaagaaccagatgctgatcgaggaggaggtgcagaagctgaagagatacaagatcgagaacatcagaagaaagcacaactacctgcccttcatcatggagctgctgaagaccctggccgagcaccagcagctgatccccctggtggagaagatcttctag

SEQ ID NO: 266437 - DNA, 582 bp, Artificial Sequence
  derived and/or modified sequence
atgaaaggcttagcactcagtaatagcgacgtcatcaggcaggtccataatagtttcgcccggcagcagatgttcgagtttgacacaaaaacgtctgcaaaggaggaagacgctttccatttcgtgtcatacgtgcctgtaaacggacgactctatgaactcgacgggctgcgggaggggccgattgacctcggggcctgcaatcaggatgattggattagtgccgtccggcctgtcatagaaaagcgcattcaaaaatacagtgagggcgaaatacgcttcaatcttatggcgattgtgagcgatagaaagatgatatacgaacagaaaatcgcagagttgcagagacagctggcagaggaggaaccaatggacacagatcagggtaattctatgctgtcagctatccaaagcgaggttgcaaaaaatcagatgctgattgaggaagaggtgcagaagcttaagcgctacaaaatcgagaatattaggagaaagcacaattatctgccgttcataatggaactccttaagactttggctgagcaccagcaactcatcccattggttgaaaaaattttctag

SEQ ID NO: 266438 - DNA, 582 bp, Artificial Sequence
  derived and/or modified sequence
atgaagggcctggccctgagcaacagtgatgtgatccggcaggtgcacaacagctttgcccggcagcagatgtttgaatttgacaccaagaccagcgccaaggaggaggatgccttccactttgtgtcctatgtgcctgtgaatggccgcctgtatgagctggatggcctgcgggagggccccatcgacctgggcgcctgcaaccaggatgactggatctctgctgtgcggcctgtgattgagaagaggatccagaagtacagcgagggggagatccgcttcaacctgatggccatcgtgtctgacaggaagatgatctatgagcagaagattgctgagctgcagaggcagctggccgaggaggagcccatggacacagaccagggcaacagcatgctgagcgccatccagagcgaggtggccaagaaccagatgctgattgaggaggaggtgcagaagctgaagcgctacaagattgagaacatccggaggaagcacaactacctgcccttcatcatggagctgctgaagaccctggccgagcaccagcagctgatccccctggtggagaagatcttctag

SEQ ID NO: 266439 - DNA, 582 bp, Artificial Sequence
  derived and/or modified sequence
atgaagggcctggccctgagcaacagcgacgtgatccggcaggtgcacaacagctttgcgagacagcagatgtttgaatttgacacaaagacttctgcaaaagaagaagatgcctttcactttgtgagttatgtgccagttaatggcagactgtatgagctcgacggcctgcgggagggacctattgatctgggcgcttgtaaccaagatgattggattagcgcagtaagacccgtgattgaaaagcgcatacagaaatacagtgaaggtgagattagatttaatttgatggccatcgtgagcgatcggaagatgatttacgaacaaaagatcgcagagttgcagcggcagctagctgaggaggagcccatggacaccgatcaggggaacagcatgctttccgctatacaatccgaagtggcgaagaatcagatgcttattgaagaagaggtacaaaagctgaagcggtacaagattgaaaacatccgccggaagcacaattatcttccatttatcatggagctactcaaaacacttgctgagcatcaacaactgatcccacttgtagagaaaatcttttag

SEQ ID NO: 266440 - DNA, 582 bp, Artificial Sequence
  derived and/or modified sequence
atgaaggggctggcattatctaattcggacgtcatccggcaggtgcacaattcattcgcccgtcagcagatgttcgaatttgacacgaaaacgagtgccaaagaggaggatgcctttcatttcgtaagctatgtcccagtgaatggtcgcctgtatgagctggatggacttagggaaggccctatcgatctcggggcatgcaaccaggacgactggatatcagcggtacggcctgtcatcgagaaacggatccaaaagtattcagaaggcgaaatccgctttaacctcatggccattgtcagcgaccgcaaaatgatctacgagcaaaagatcgctgaacttcagaggcagctagcagaagaggagccaatggacaccgatcaggggaacagcatgcttagcgctatccagagtgaagttgctaagaatcagatgctgattgaagaggaagtgcagaagctcaagaggtataaaattgaaaatatacgtcgtaagcacaactatctgcccttcattatggagttgctgaaaactttagctgagcatcagcagctgataccactcgtcgaaaaaatcttttag

SEQ ID NO: 266441 - protein, 173 aa, Artificial Sequence
  derived and/or modified sequence
MRPWSSPAQLVAGAQPAGRGDPLGPRPIPPPRFRRASSQREPPYPRPAEPALELAGSKCQPDTPAASLCPADSPSQHRVMPPGPASWANVGSRPHTVANGHELFEVSEERDEEVAAFCHMLDILRSGSDIQDYFLTGYVWSAVTPSPEHLGDEVNLKVTVLCDRLQEALTFTC

SEQ ID NO: 266442 - protein, 131 aa, Artificial Sequence
  derived and/or modified sequence
MSSTQGNGEHWKSLESVGISRKELAMAEALQMEYDALSRLRHDKEENRAKQNADPSLISWDEPGVDFYSKPAGRRTDLKLLRGLSGSDPTLNYNSLSPQEGPPNHSTSQGPQPGSDPWPKGSLSGDYLYIF

SEQ ID NO: 266443 - protein, 1606 aa, Artificial Sequence
  derived and/or modified sequence
MSSTQGNGEHWKSLESVGISRKELAMAEALQMEYDALSRLRHDKEENRAKQNADPSLISWDEPGVDFYSKPAGRRTDLKLLRGLSGSDPTLNYNSLSPQEGPPNHSTSQGPQPGSDPWPKGSLSGDYLYIFDGSDGGVSSSPGPGDIEGSCKKLSPPPLPPRASIWDTPPLPPRKGSPSSSKISQPSDINTFSLVEQLPGKLLEHRILEEEEVLGGGGQGRLLGSVDYDGINDAITRLNLKSTYDAEMLRDATRGWKEGRGPLDFSKDTSGKPVARSKTMPPQVPPRTYASRYGNRKNATPGKNRRISAAPVGSRPHTVANGHELFEVSEERDEEVAAFCHMLDILRSGSDIQDYFLTGYVWSAVTPSPEHLGDEVNLKVTVLCDRLQEALTFTCNCSSTVDLLIYQTLCYTHDDLRNVDVGDFVLKPCGLEEFLQNKHALGSHEYIQYCRKFDIDIRLQLMEQKVVRSDLARTVNDDQSPSTLNYLVHLQERPVKQTISRQALSLLFDTYHNEVDAFLLADGDFPLKADRVVQSVKAICNALAAVETPEITSALNQLPPCPSRMQPKIQKDPSVLAVRENREKVVEALTAAILDLVELYCNTFNADFQTAVPGSRKHDLVQEACHFARSLAFTVYATHRIPIIWATSYEDFYLSCSLSHGGKELCSPLQTRRAHFSKYLFHLIVWDQQICFPVQVNRLPRETLLCATLYALPIPPPGSSSEANKQRRVPEALGWVTTPLFNFRQVLTCGRKLLGLWPATQENPSARWSAPNFHQPDSVILQIDFPTSAFDIKFTSPPGDKFSPRYEFGSLREEDQRKLKDIMQKESLYWLTDADKKRLWEKRYYCHSEWTHMNHQDALGLLHATFPDQEVRRMAVQWIGSLSDAELLDYLPQLVQALKYECYLDSPLVRFLLKRAVSDLRVTHYFFWLLKDGLKDSQFSIRYQYLLAALLCCCGKGLREEFNRQCWLVNALAKLAQQVREAAPSARQGILRTGLEEVKQFFALNGSCRLPLSPSLLVKGIVPRDCSYFNSNAVPLKLSFQNVDPLGENIRVIFKCGDDLRQDMLTLQMIRIMSKIWVQEGLDMRMVIFRCFSTGRGRGMVEMIPNAETLRKIQVEHGVTGSFKDRPLADWLQKHNPGEDEYEKAVENFIYSCAGCCVATYVLGICDRHNDNIMLKTTGHMFHIDFGRFLGHAQMFGNIKRDRAPFVFTSDMAYVINGGDKPSSRFHDFVDLCCQAYNLIRKHTHLFLNLLGLMLSCGIPELSDLEDLKYVYDALRPQDTEANATTYFTRLIESSLGSVATKLNFFIHNLAQMKFTGSDDRLTLSFASRTHTLKSSGRISDVFLCRHEKIFHPNKGYIYVVKVMRENTHEATYIQRTFEEFQELHNKLRLLFPSSHLPSFPSRFVIGRSRGEAVAERRREELNGYIWHLIHAPPEVAECDLVYTFFHPLPRDEKAMGTSPAPKSSDGTWARPVGKVGGEVKLSISYKNNKLFIMVMHIRGLQLLQDGNDPDPYVKIYLLPDPQKTTKRKTKVARKTCNPTYNEMLVYDGIPKGDLQQRELQLSVLSEQGFWENVLLGEVNIRLRELDLAQEKTGWFALGSRSHGTL

SEQ ID NO: 266444 - DNA, 4821 bp, Artificial Sequence
  derived and/or modified sequence
atgagctctacccaggggaacggggaacactggaagtccctggagtccgttgggatctctcgcaaagaactggcaatggctgaggccctgcagatggaatatgatgccttgagtcgactgaggcacgataaggaagagaaccgagctaaacagaacgcggacccatcactcatttcttgggacgaaccaggagttgacttctactcaaagccagccggtcgcaggactgaccttaagctgcttcggggtttgtctggtagcgatcctaccctgaattacaattccctctctccgcaggaggggccacctaatcatagcacctcccagggtcctcagcccggatctgatccatggcctaaagggagcctcagcggtgattatctgtatatctttgacggcagtgacggcggcgtgtcatcatcacccggccccggggacattgaaggcagttgtaaaaaactttcgccacctccccttccaccccgtgcttctatctgggacacacccccgctgccccctcggaaggggagcccatcttcatcaaagataagccagcccagcgatatcaacactttttctctggttgagcagcttccaggcaagctgcttgagcatagaatcctggaagaagaggaagtgctggggggaggcggtcaggggaggctgctcgggtccgtggattacgatggtataaacgacgccattaccagactgaacttgaagagcacctatgatgccgagatgctgagagatgcaactcgggggtggaaggaggggagggggcctctcgacttctcgaaagacacatccggaaagcccgtggcccggagcaaaaccatgcctccacaggtccctcctagaacctatgctagcaggtatggtaaccgcaagaatgccacacctgggaaaaatcgcaggatttccgccgcccctgtgggatcacggcctcacaccgtcgccaatggccacgagctgttcgaagtgagcgaggagcgagatgaggaagtcgctgcattttgccacatgctcgacatcctgcgaagtggaagcgatatccaagattacttcttgactgggtatgtgtggagcgccgtgacaccatctccagagcatctcggcgatgaggtgaacctgaaggtgaccgtgctgtgcgacaggctgcaggaggcattgacctttacatgtaactgctcctctacagtggacctgttaatctaccagaccctgtgttatacccacgatgatcttcgtaacgtggatgtgggcgacttcgtgctgaagccctgcggccttgaagagtttctgcagaacaaacacgctcttgggagccacgaatacatccagtactgtcgcaaatttgatatcgacatccgcttacagctcatggagcagaaagtcgtgcgatcggacctggcccgcacggtcaatgatgatcagtcaccttccacgctgaactacctcgttcacctacaagagcgccctgtgaagcaaaccatcagccgtcaggccttgagcctgctgttcgacacttaccataacgaggttgacgccttcctgctggccgacggagatttccccctgaaggccgacagagttgtacagagtgtcaaagctatatgcaacgcacttgcagccgtagaaacgcctgaaattacctctgcattgaaccagcttccaccatgcccttcccgaatgcagcctaagatccagaaggatccatccgtgctagccgtgagggaaaacagggagaaggtggtggaagcattaacagcagctatcttggatctcgtcgagctgtattgtaacacattcaacgccgacttccagactgctgttcccggctcaaggaagcacgatctggtacaagaagcctgccattttgcaagatcgttggccttcaccgtctatgctacacatcgaatcccgattatctgggcgacaagctatgaggatttttacctaagttgctccctcagccacggcggcaaggaattatgctcacctctgcagacccgtcgcgcacatttcagtaagtacctgtttcacttaattgtctgggaccagcagatatgttttcctgtgcaggtgaaccgccttccgagggaaaccctgctctgcgccactctctatgcgcttcccattcctccgcccggcagttcgtctgaagctaacaagcaacgtcgggtgcctgaggctctgggatgggtcacgacgccgttatttaactttcgccaggtgttgacatgcggccgcaagctgctgggactgtggcccgccactcaagagaatccttccgcccgctggtctgctccgaacttccaccaaccagacagtgtcatccttcagatcgattttcccacctcagcttttgacatcaagttcacttcacctcccggcgacaagttcagtccgaggtatgagtttggatccctccgtgaggaggatcaaagaaagctcaaagacatcatgcagaaggaaagcctgtactggctgacagacgctgataagaagagattgtgggagaaaagatattactgccactcagagtggacccacatgaaccaccaggacgctctgggattattgcatgctacctttcctgatcaggaggtaaggcggatggcggtgcagtggataggctcactttctgatgcagagctcttagattatcttcctcaactggtgcaagccctgaagtatgaatgttatctggattctccactcgtgaggttcctgctcaagagggcagtcagcgatctcagggtgacccactattttttctggttacttaaagatggtcttaaagatagccagttttccatacgctaccagtaccttctggcggcccttctatgttgctgtggcaagggcctgagggaagaattcaataggcagtgctggcttgtgaacgcactcgcgaagctcgctcagcaggtaagagaggccgccccctctgccagacaggggattcttagaactggactagaggaggtcaaacaattcttcgctctcaatggctcctgccggttaccactgtctccctcattgctggtgaagggaatagttccacgcgattgcagttacttcaactccaacgccgtgcctctcaagctgtcattccagaatgtcgacccacttggcgagaacatacgcgtcatcttcaaatgcggtgatgacctccggcaggacatgctgactctccaaatgatccgaattatgtctaaaatctgggtccaggaaggactagacatgaggatggtgatcttccggtgcttcagtactggacgcgggagaggaatggttgagatgattcctaatgcagagacattgaggaagattcaggttgagcacggcgtcaccggctcatttaaagaccggcccctcgcagactggctgcagaagcataatcccggcgaagatgaatatgagaaagccgttgaaaatttcatctatagttgtgccggatgctgcgtagcgacctacgtgctcggaatttgtgacaggcataacgataacattatgcttaagacaacaggccacatgtttcacattgacttcggcaggttcctggggcatgcccagatgttcggaaacattaaacgagatcgggcaccctttgtattcacaagcgacatggcctacgttatcaacgggggagacaaaccatccagcagatttcacgacttcgtggacctgtgttgccaggcgtacaatctgatccgcaaacacacccatctgttcctgaacctgctaggcctcatgctgtcctgcgggattcctgagctctccgacttggaagacctgaagtatgtttacgatgccttaaggcctcaagacactgaggctaacgccacaacctactttacaaggctcattgagtcgtcacttggttccgtcgctacgaagctgaattttttcatccacaatctggcccagatgaaatttacaggatcagacgatcggctgactttgagcttcgcttctcgcacccatacactcaagtctagcggacgcatttcagacgtttttctgtgtcgtcacgagaagatattccacccgaataaaggctatatctatgtcgtcaaagtgatgcgggaaaatactcatgaagccacgtacattcagcgcacattcgaagagttccaggaactgcataacaagttgcgcttgttatttccatcttctcacctaccgagcttcccgagccgcttcgtgatcggccgcagcagaggcgaagcagtggcagagcgtcgccgcgaggaactgaacggatacatctggcacctcattcatgcaccacctgaagttgccgaatgcgatttggtctacaccttcttccaccctctccctcgagacgaaaaggctatggggactagccccgcccccaagagttctgacgggacctgggccagaccagttgggaaggtggggggcgaggtgaaactgagcatctcctacaagaataacaagcttttcattatggttatgcacatccgtgggctgcagctgctccaagacgggaatgatcccgacccatacgtgaagatttatctcctgcctgacccacagaaaacaacgaagcggaaaacgaaggtcgcacggaaaacctgtaaccctacttataatgaaatgctggtctatgacggtatcccaaaaggtgacctacaacagcgcgaattacagttgagcgtcctttccgaacaggggttctgggaaaacgtgcttctcggcgaggtgaacatccggctgcgcgaactggatcttgcccaagagaagaccggttggttcgcccttggtagccgctcccacggtactctttag

SEQ ID NO: 266445 - DNA, 4821 bp, Artificial Sequence
  derived and/or modified sequence
atgagcagcacccagggcaatggagagcactggaagagcctggagagcgtgggcatcagcaggaaggagctggccatggccgaggccctgcagatggagtatgatgccctgagccggctgcggcatgacaaggaggagaacagagccaagcagaatgctgaccccagcctcatctcctgggatgagcccggggtggacttctacagcaagccagctggccgcaggacagacctgaagctgctgcggggcctgagcggcagtgaccccaccctgaactacaacagcctgagcccccaggagggcccccccaaccacagcaccagccagggcccccagcccggcagtgacccctggcccaagggcagcctgagcggggactacctgtacatctttgatggcagtgatggaggagtgagcagcagccctggccctggggacatcgagggcagctgcaagaagctgagccccccacccctgcccccccgggccagcatctgggacaccccacccctgccccccaggaagggcagccccagcagcagcaagatcagccagcccagcgacatcaacaccttcagcctggtggagcagctgcccgggaagctgctggagcaccgcatcctggaggaggaggaggtgctgggcggcggcggccagggccgcctgctgggctctgtggactatgatggcatcaatgatgccatcacccggctgaacctgaagagcacctatgatgctgagatgctgagagatgccacccggggctggaaggagggccggggccccctggacttcagcaaggacaccagcggcaagcctgtggcccggagcaagaccatgccaccccaggtgccccccaggacctacgccagccgctatggcaacaggaagaatgccaccccaggcaagaacagacgcatctctgctgcccctgtgggcagccggccccacacagtggccaatggacatgagctgtttgaggtgtctgaggagagagatgaggaggtggccgccttctgccacatgctggacatcctgcggagcggcagtgacatccaggactacttcctgaccggctacgtgtggagcgctgtgacccccagccctgagcacctgggagatgaggtgaacctgaaggtgacagtgctgtgtgaccggctgcaggaggccctgaccttcacctgcaactgcagcagcacagtggacctgctgatctaccagaccctgtgctacacccatgatgacctgagaaatgtggatgtgggggactttgtgctgaagccctgtggcctggaggagttcctgcagaacaagcacgccctgggcagccatgagtacatccagtactgcaggaagtttgatattgacatccggctgcagctgatggagcagaaggtggtgcggagtgacctggccaggacagtgaatgatgaccagagccccagcaccctgaactacctggtgcacctgcaggagaggcctgtgaagcagaccatcagccggcaggccctgagcctgctgtttgacacctaccacaatgaggtggatgccttcctgctggctgatggagacttccccctgaaggctgacagagtggtgcagagcgtgaaggccatctgcaatgccctggccgctgtggagaccccagagatcaccagcgccctgaaccagctgcccccctgccccagcaggatgcagcccaagatccagaaggaccccagcgtgctggccgtgcgggagaaccgggagaaggtggtggaggccctgacagctgccatcctggacctggtggagctgtactgcaacaccttcaatgctgacttccagacagctgtgcccggcagcaggaagcatgacctggtgcaggaggcctgccactttgcccggagcctggccttcaccgtgtatgccacccaccgcatccccatcatctgggccaccagctatgaggacttctacctgagctgcagcctgagccacggcggcaaggagctgtgcagccccctgcagacccggcgggcccacttcagcaagtacctgttccacctgattgtgtgggaccagcagatctgcttccctgtgcaggtgaaccggctgccccgggagaccctgctgtgtgccaccctgtatgccctgcccatccccccacctggcagcagcagcgaggccaacaagcagaggagagtgcctgaggccctgggctgggtgaccacccccctcttcaacttccggcaggtgctgacctgtggcaggaagctgctgggcctgtggccagccacccaggagaaccccagcgcccgctggagcgcccccaacttccaccagcctgacagcgtcatcctgcagattgacttccccaccagcgcctttgacatcaagttcaccagccccccaggggacaagttcagccccaggtatgaatttggcagcctgcgggaggaggaccagaggaagctgaaggacatcatgcagaaggagagcctgtactggctgacagatgctgacaagaagaggctgtgggagaagcgctactactgccacagcgagtggacccacatgaaccaccaggatgccctgggcctgctgcacgccaccttcccagaccaggaggtgcggaggatggctgtgcagtggattggcagcctgagtgatgctgagctgctggactacctgccccagctggtgcaggccctgaagtatgagtgctacctggacagccccctggtgcgcttcctgctgaagagagctgtgtctgacctgcgggtgacccactacttcttctggctgctgaaggatggcctgaaggacagccagttcagcatccgctaccagtacctgctggccgccctgctgtgctgctgcggcaagggcctgcgggaggagttcaaccggcagtgctggctggtgaatgccctggccaagctggcccagcaggtgcgggaggccgcccccagcgcccggcagggcatcctgaggacaggcctggaggaggtgaagcagttctttgccctgaatggcagctgccgcctgcccctgagccccagcctgctggtgaagggcatcgtgccccgggactgcagctacttcaacagcaatgctgtgcccctgaagctgtccttccagaatgtggaccccctgggggagaacatccgggtcatcttcaagtgtggagatgacctgcggcaggacatgctgaccctgcagatgatccgcatcatgagcaagatctgggtgcaggagggcctggacatgaggatggtgatcttccgctgcttcagcacaggccggggccggggcatggtggagatgatccccaatgctgagaccctgaggaagatccaggtggagcacggcgtgacaggcagcttcaaggaccggcccctggccgactggctgcagaagcacaaccctggagaagatgaatatgagaaggctgtggagaacttcatctacagctgtgccggctgctgcgtggccacctacgtgctgggcatctgtgacagacacaatgacaacatcatgctgaagaccaccggccacatgttccacatcgactttggccgcttcctgggccacgcccagatgtttggaaacatcaagagggaccgggccccctttgtgttcaccagtgacatggcctacgtgatcaatggaggagacaagcccagcagccgcttccatgactttgtggacctgtgctgccaggcctacaacctgatcaggaagcacacccacctgttcctgaacctgctgggcctgatgctgagctgtggcatccctgagctgagtgacctggaggacctgaagtatgtgtatgatgccctgcggccccaggacacagaggccaatgccaccacctacttcaccaggctcatcgagagcagcctgggctctgtggccaccaagctgaacttcttcatccacaacctggcccagatgaagttcaccggcagtgatgaccggctgaccctgagctttgccagcaggacccacaccctgaagagcagcggccgcatcagtgatgtgttcctgtgcagacatgagaagatcttccaccccaacaagggctacatctacgtggtgaaggtgatgagggagaacacccatgaggccacctacatccagaggacctttgaggagttccaggagctgcacaacaagctgcggctgctcttccccagcagccacctgcccagcttccccagccgcttcgtcatcggccgcagcagaggagaggccgtggccgagcggcggcgggaggagctgaatggctacatctggcacctgattcatgcccctcctgaggtggccgagtgtgacctggtgtacaccttcttccaccccctgcccagagatgagaaggccatgggcaccagccctgcccccaagagcagtgatggcacctgggcccggcctgtgggcaaggtgggcggggaggtgaagctgagcatctcctacaagaacaacaagctgttcatcatggtgatgcacatccggggcctgcagctgctgcaggatggaaatgaccctgacccctacgtgaagatctacctgctgcctgacccccagaagaccaccaagaggaagaccaaggtggccaggaagacctgcaaccccacctacaatgagatgctggtgtatgatggcatccccaagggggacctgcagcagcgggagctgcagctgtctgtgctgtctgagcagggcttctgggagaatgtgctgctgggggaggtgaacatccggctgcgggagctggacctggcccaggagaagacaggctggtttgccctgggcagccgcagccacggcaccctgtag

SEQ ID NO: 266446 - DNA, 4821 bp, Artificial Sequence
  derived and/or modified sequence
atgagcagcacccagggcaacggcgagcactggaagagcctggagagtgtaggcatcagccggaaggaactcgcgatggccgaggctctccaaatggaatatgacgcattgtcccgacttagacatgacaaggaagagaatagagccaagcaaaatgccgatccatccctgatttcttgggacgagccaggggtggacttctactccaagccagcaggccgccgtacagacttgaaactcctgaggggcttaagcggaagtgacccaaccctcaattacaattccctctctcctcaggagggaccaccgaatcacagcacttctcaggggccgcagcccggaagtgacccatggccaaaagggtccttaagtggggattacctctacatatttgatggctccgacggtggcgtctcaagctcgcctggacccggagatattgaaggtagttgcaagaagttatcaccccccccattaccgccaagagcttccatctgggacacacctccattgcctccccgaaagggcagtccctcgtcctctaaaatctctcagccctcagatataaacaccttctccctggttgagcaactccctgggaagcttctcgaacacagaatcctcgaagaggaagaagtgttgggagggggcggacagggccggctcctgggaagcgtcgactacgacgggatcaacgacgcgatcacaagactgaatctcaaatcaacttatgatgccgagatgcttcgggacgcaacccgtggatggaaagagggacgcggcccacttgactttagtaaggacacctcgggaaagcccgtggcacgctccaaaaccatgcctccccaggttccccctcggacttatgcaagccggtatgggaaccggaagaacgccacccctggcaaaaaccgccgcatatcagccgcgcccgtcgggtcgagaccccataccgtggctaatggccacgagctgtttgaggtgagcgaggaacgtgacgaagaggtggctgccttctgtcatatgctggatatcttaaggtccggtagcgatatccaggattactttctgaccggatatgtgtggtccgccgtaacaccctcacctgagcacctgggagatgaagtcaaccttaaggtgaccgtgctctgcgatcgtctccaagaggctctgacctttacatgcaattgcagcagcaccgtagatctgctcatttatcagactttatgttacacccatgacgatctgaggaacgttgacgttggggatttcgtgttaaagccttgtggtctcgaagagttcctgcagaataaacacgctttagggtcccatgaatacatccagtattgcaggaaatttgatatcgacatacggctgcagctgatggaacagaaggtggtgcgctcagacctggccaggacagtaaatgacgaccaatctccgtctacactaaactaccttgtgcacttgcaggagagaccggtcaaacagactattagtcgacaggctttgagcttactgttcgacacctaccacaatgaggttgacgcctttctcctcgccgacggggactttcctttgaaggccgatagagtggtgcagtcagtgaaagctatctgcaacgcactggcagctgttgagacgcctgagattacctcagctctgaaccaactgcccccctgcccatctcgaatgcagcccaaaattcagaaggacccaagtgtgctggcagttcgagagaaccgcgagaaggtggtcgaggcgctgaccgctgctatcctggatttggtcgaactctactgcaatacctttaatgctgactttcagaccgctgtgcccggatcacgaaagcacgatttagtgcaggaggcttgtcacttcgcccggtcattggcctttacagtgtatgccacccatagaattcccataatttgggccaccagctacgaagacttttacttgagctgcagtttatctcacggcggaaaggagctgtgttctccattgcaaactcggcgagcccacttttccaaatacctgttccacctcatcgtttgggaccagcaaatttgtttccctgtgcaggtaaacagactgccacgggaaacacttctctgcgcgacgctatatgcactccccatccctcctcccggcagctcctccgaagcaaacaaacagagaagggttcccgaagctctagggtgggtgacaacacctctgttcaatttccggcaggtcttaacatgcggcaggaagctgttggggctctggcccgccacccaggagaacccgtcagcacgctggagtgcccccaattttcatcagccagacagcgtcattctccagattgatttccccactagtgccttcgatatcaagtttacctcacccccaggcgacaagttttctcctcgttacgaatttggtagtctacgcgaagaagaccagcgcaagctgaaggacatcatgcagaaagaaagcctttattggcttacggacgcagataagaaaagactgtgggaaaagaggtactactgccacagcgagtggactcacatgaaccaccaagacgcactgggcctgttgcatgcaactttccctgatcaggaagtccggaggatggcagtccagtggattggctccctgtcagatgcagagctgttggactatttaccccagctggtacaggcacttaaatacgaatgttaccttgactctcccctggtccgctttttgctcaaacgcgctgtctccgatctccgggtgacccactacttcttctggctcctgaaggatggcctgaaggactcacagttctctattagataccaataccttctagcggccctcctctgttgttgcggcaaaggactaagggaagagtttaatcggcagtgctggttagtgaatgccctcgccaaactggcccagcaagtgcgggaggctgcgccctctgctcggcagggcatcctgcgcactggcctcgaagaagtcaaacagttcttcgctctgaacgggtcatgccggctccccctctcacccagtctcctggtgaaaggaattgtgccccgcgattgttcgtatttcaatagcaatgccgtgcctctgaagcttagcttccaaaatgtagatcctttgggcgagaacatcagagtgatatttaagtgtggagacgatctcagacaggatatgttgacactgcaaatgattcggattatgagcaagatctgggtacaggagggactcgatatgcgtatggtcatcttccgctgtttcagtacaggccgaggccgaggaatggttgaaatgattcctaacgcagaaaccttacgcaagatccaggtagaacacggcgtgaccgggtccttcaaggacagacccctcgcagactggcttcaaaaacacaatcccggcgaggatgagtacgaaaaagcagtggagaattttatctacagttgcgccggctgctgcgtggccacttatgtcttgggtatctgcgatcggcacaatgacaatattatgttaaagacaaccggtcacatgtttcatatagacttcgggaggtttctcggacacgcccagatgtttggaaacatcaagagggaccgggccccctttgtgtttacttccgacatggcttacgtgataaacggtggagataagcccagcagccgattccatgacttcgtggatctgtgctgccaagcttataatctcatcagaaagcatacccacctcttcctgaatcttttgggactcatgctgagttgcgggatccctgaattgagcgacctggaggacctaaagtacgtctatgacgctctgagaccacaggatacagaggcaaatgctacaacttactttacccgactgatagaatcctctctgggctccgtggccaccaagctaaactttttcatccacaacttagctcagatgaaattcacaggaagtgacgacagacttaccctatcgttcgcaagtcggacacacaccttaaaatcctccgggaggatctcagacgtgttcctgtgccggcatgagaagatcttccatccaaacaagggatacatctacgtcgtgaaggtaatgagagagaatacccacgaagccacatatatccagcgcaccttcgaagagttccaggagctgcataacaagctgagactgctgttcccgtcctctcacttgccttcttttcctagcaggtttgttattggacggagccggggtgaagccgtcgctgagagaaggcgcgaggaactgaacggctacatttggcacctcatacacgccccgcccgaggtggctgagtgtgatctcgtctatactttttttcaccctttaccacgcgatgagaaagctatgggcactagccctgctccgaaaagctctgatggcacttgggcacgcccagtaggcaaagtgggcggtgaggtgaaattgagcattagctacaagaacaacaagttattcatcatggtcatgcatattcgcgggctccagttgctgcaagacggaaatgatcctgatccctacgtcaagatctatcttctccctgacccccagaaaacaaccaagcgaaagaccaaggtggccagaaaaacgtgtaaccctacgtataacgaaatgcttgtgtacgatggaatccccaagggtgacctccagcaacgagagctgcaattgagcgttctgtcggagcagggattctgggagaacgtgttgctgggagaagtgaatatccggcttcgcgagctcgacctggcccaggagaaaaccggttggtttgccctagggagtaggtcacatgggactctgtag

SEQ ID NO: 266447 - DNA, 2375 bp, Artificial Sequence
  derived and/or modified sequence
atgtttggcaacatcaagcgggaccgtgccccctttgtcttcacctcggacatggcgtatgtcatcaacgggggtgacaagccttccagccgcttccatgattttgttgacctttgctgccaagcctacaacctcattcgcaagcacacccacctcttcctcaaccttctgggcctgatgttgtcctgtgggatccctgaactctcagacctggaggacctcaagtatgtgtacgatgccctgaggcctcaggatacagaggccaatgccactacctacttcactagggtgattctggcctctgtggtaggaggcagggagagtaagacatgctctgctgtctcttcctctggagactgaacttgggttggttgtgatgagcagccccttggaggctgtgaggttgcagcaaagttttaagtttaccttgtgtcaagggagcaatgcttggtttggggagtgtgtggggtgggctgtatgaagtagcattttgggggtgggtgggtggatatcttaatttttatttttaaaaaatgaaatagtgatgttgtcctaactgggacaggaagccttgcgagaagggacgtacctatgccccagaaggcaagagaggaagactatttggactttttgtatgattaaggttcttattggacttttccctaggttttttttttttgttattgttgttgttgtttcgttttctagctataggaactatctggggaggggcccagtgggtcctcggccagagccctctctaaggacaggttggggagggttggggagggctgcctgtgctggactgaggcttgtgccactgggcctttctgattttgcctccaaaggagagcgctgtgatacctacatgtgtaaggaagggccttccgtattggggttctgccaaggacccgtattcagggacccatgctcttttggggggacttttcctcttgtcttccctactttattaggacttgccctgaataccattttctaccccttgcccctccattctcctggcccttctgggggtcagctggtctctatgaatatgctgggggtgcttccccataggtctctcccttcatttgtctctggtgggacaaaatactgactcagtccttagatgtagtttcacccaagagcatcttggccctgggaagaggtccctaggctgcagatgctactgactgcttgctaggtagcctctggaaagcattccccatccatcactccccacttctttctgctgtgctgcttccctcccaaactccatttctgtcaccctttttataagacttttcctcattctgtggggccataaacctatttagtctggagccaaagggatgccctatctgaaggaaaggggcatggggtgggggattccatcaaaactgttgttttttgccccatgatttttctttggtcagtaggaggctggattggagtggtgattattcccctggagctaagctcaggagcccgaagggagagactgagactgactcccttatctcttcatattctttattccctaccagatggatttttttttttttttttggagacggagtctcgccctgtcgccaggctggagtgtagtggcatgatctcgactcactgcaaaatctgcctcccgggttcaagcgattctcctacctcagcctcccgagtagctgggattacaggcatgtgccaccacgccaagctaatttttgtatttttagtagagacggggtttcaccatgttggccaggatggtctcgatctcttgacctcgtgatctgcctgccttggcctcccaaagtgctgggattacaggcgtgagccaccatgccccgccccagatggattttacatttgctcttttgtgtttcgctccaaagggttgtcttcctcgccaaaaggagggagggactttgaatttgatatgaatctttaaaaccagaattggctggatatttcccatgattgggaaaagagtgaaatgaggacattctgtaaactgtccctccctaattccaaggatcagaaactccccgttttgctgactcattccataactggagaaagaagctccattgaccgaagccacagggcagcatggaagtttaaattttctctaaaattaaaatgccaaggataaagctggctgcttccaggagggggaagaggagtggggagtgggcggtgaaacttttccagatgaacggaccataaatgtgttactggctttgtgcctgtagctcattttattatgacctatatgctcctgatttaaagagatctgtgtactgtttacttcccacttcccagaatcccttgtatctcctttctcgggaattgtattttctaataaatgacatttg

SEQ ID NO: 266448 - DNA, 7318 bp, Artificial Sequence
  derived and/or modified sequence
gagcagaggccctcagggtatagagaaggaagaagagagaggttcactgtagtcctgaagcagaaataagacctgtggctgaaggaagccttagcaattcactccttcctcttcctgagaactctctgtaggaagtctcacctagcagaggcttcacagtatttcagagaagccaaagattgtttgcctctttggaaactgttatccttccatcatgactgtgtcactcctgccactgttccaccatagagatggcgtcctttgcagcaaaccgtaagttataaggatgagggaagaagagtagagggccaaaaggattccattttgaggaaaaactacagtttgccttgccaggtagaagaatcaggcgcccagacaccatgtcacaaccctccagaactgacgttggcaggaagtagagactttgttgcctgtgtcccccatcctcaccatgtcttcgactcagggcaatggggaacactggaagtccctggagtcagtgggcatcagccgcaaagagctagcgatggccgaagccctgcagatggagtatgatgccctgtcccggctccggcatgacaaggaggagaacagagccaagcagaacgcagacccctctctcatcagctgggatgagcctggggtagacttttacagcaagccagcaggaaggcggaccgacctcaagctgttacgcggtctctctggctctgatcctacccttaactacaactcactctccccacaggaagggccgcccaaccactctacctcccaagggccacagcctggctcagatccctggcccaaaggctccctgtctggagactatctctacatttttgatggttcagatgggggagtctcttcgtccccaggaccaggggacatagagggctcttgcaagaaactatccccacctcctctgcctccccgagcttctatctgggatacccctcccctgcctcccagaaaggggtccccctcatcctccaagatctcccagcccagtgacatcaacactttctctttggtcgaacaattgccgggcaaactgctagagcatcggatcctagaagaggaagaggtgctgggaggtgggggtcaggggcgcctactggggtctgtggactatgatggtatcaatgatgcaattactaggctcaacttgaaatcgacctatgatgcggagatgttgcgggatgccaccaggggctggaaggagggccgagggccgctggacttcagcaaagacacctctggaaaacccgtggccaggagcaagactatgccccctcaggtgcccccccgcacctatgcctcccgctatggcaaccgaaagaatgcgacgcctggcaagaaccgccggatttctgcagccccggtgggctcccggccccacactgttgccaatggccatgagttgtttgaggtctcagaagagagagatgaggaggttgctgcattttgccacatgctggatatccttcgatctggctctgacatccaagactacttcctcactggctatgtctggagtgctgtcacccctagcccagagcacctcggggatgaggtcaacctgaaggtgactgtgttgtgtgacaggcttcaagaggcactcactttcacctgcaactgttcctccactgtagacttgcttatctaccagaccctgtgctacacccatgatgacctgaggaatgtggacgtgggtgactttgtgctaaagccctgcgggctggaggagttcctgcagaacaagcatgccttgggcagtcatgagtacatccaatactgccgcaagtttgacattgacattcggctacagctgatggagcagaaggttgtgcgcagtgacctggcccggacggtgaatgatgaccagagcccctccaccttgaactacctcgtccatctccaagagaggcctgtcaagcagaccatcagcaggcaggccctgagtcttctgttcgacacttaccacaatgaggtggatgccttcctgctggctgatggagacttcccactgaaggctgacagggtggtccagtccgtcaaggccatctgcaacgccctggccgccgtggaaacccctgagatcaccagtgctctcaaccagctgcccccctgcccctcccgcatgcagcctaaaattcagaaggatcccagtgtcttggctgtgagggaaaaccgagagaaggtcgtggaagccctgaccgctgccatcttggacctggtggagctgtactgcaacacattcaacgcagacttccagacggcagtgcccgggagccgcaagcatgacctggtccaggaggcctgccatttcgccaggtccctggccttcactgtctatgccacccaccgcatccccatcatctgggctaccagctatgaagatttctacctctcctgctccctcagccatggcggcaaggagctgtgcagccccctgcagacccgaagagctcacttctccaagtacctcttccacctcatcgtctgggaccagcagatctgcttcccagtgcaggtgaaccggctgcctcgggagacactgctgtgtgccactctctatgctctgcccatccccccaccggggagctcctcagaggccaataagcagcggcgggtgcctgaagccctgggctgggtcactaccccactcttcaacttcaggcaggtcctgacctgtggccggaagcttctgggtttgtggccagcaacacaggaaaatcccagcgcccgttggagtgcacctaatttccaccagccagacagtgtcatcctgcagattgacttccccacctcggcctttgacatcaagttcaccagcccccctggagacaagttcagcccccgctatgagtttggcagcctccgggaagaagaccagcgcaagcttaaagacatcatgcagaaagagtccttgtactggctcactgatgctgacaagaagcgcctgtgggagaagcgatattactgccactcggagtggacccacatgaaccaccaggatgccctggggctcctgcatgccaccttcccggaccaggaggtgcgtcgtatggctgtgcagtggattggctcactctcagatgctgagctgctagactacctgccccagctggtacaggccctgaagtatgaatgctacctggacagcccgttggtgcgcttcctcctgaaacgagctgtgtctgacttgagagtgactcactacttcttctggttactgaaggacggcctcaaggactctcagttcagcatccgctaccagtatctgctggcagccttactgtgctgctgtggcaaggggctgagagaagagtttaaccgccagtgctggcttgtcaatgccctggccaaactggcccagcaggtccgggaggcagccccatctgcaaggcagggaatcctccgcacgggcctggaggaggtgaagcagttctttgccctcaatggctcgtgccgcttgccactcagccccagtctgctggttaagggaattgtgcccagggactgttcctacttcaactccaatgctgtccccctcaaactctccttccaaaatgtggatcccctgggtgagaacatccgtgtcatcttcaagtgtggggacgaccttcgccaggacatgctaacgctgcagatgattcgcatcatgagcaagatctgggtccaggaggggctggacatgcgcatggtcatcttccgctgcttctccaccggccggggcagagggatggtggagatgatccctaatgctgagaccctgcgtaagatccaggtggagcatggggtgaccggctcgttcaaggaccggcccctggcagactggctgcagaaacacaaccctggggaggacgagtatgagaaggctgtggagaactttatctactcctgcgctggctgctgcgtggccacgtacgtcttgggcatctgtgaccgacataatgacaacatcatgctgaagaccactggtcacatgttccacattgattttggccgcttcctgggccatgcccagatgtttggcaacatcaagcgggaccgtgccccctttgtcttcacctcggacatggcgtatgtcatcaacgggggtgacaagccttccagccgcttccatgattttgttgacctttgctgccaagcctacaacctcattcgcaagcacacccacctcttcctcaaccttctgggcctgatgttgtcctgtgggatccctgaactctcagacctggaggacctcaagtatgtgtacgatgccctgaggcctcaggatacagaggccaatgccactacctacttcactaggttgattgagtccagcctgggcagtgtagccacaaagctcaattttttcatccataatctggctcagatgaagttcacgggctcagatgaccggctgaccctctcctttgcctcccgaacacacactctcaagagctctggccgaatcagtgatgttttcctctgccgccatgagaagatcttccaccccaacaaaggctatatatatgtggtaaaggtgatgcgagagaacactcacgaggccacctacatccagcggacctttgaggagttccaggaattacacaataagttgcggctgctcttcccttcttcccacttgcccagcttccctagtcgcttcgtgatcggccgctcccggggagaggcggtggccgagcggcggagggaggagctaaacggttacatctggcacttgatccacgcaccccctgaggtggccgagtgtgatttggtgtacaccttcttccacccactgccccgggatgagaaggctatgggcaccagcccagctcctaagtcctcagatggcacatgggcccggcccgtcggaaaggtgggaggggaggtgaagctgtccatctcctacaaaaacaataaactcttcatcatggtgatgcatattcggggcttgcaactgctccaggatggaaatgaccctgacccctatgtgaaaatttacctccttcctgaccctcagaaaaccactaagaggaaaaccaaagtggcccggaaaacctgcaatcctacctacaatgagatgttggtatatgatgggatccccaagggtgacctgcagcagcgggagctccagctgagcgtgctgagtgagcagggattctgggagaacgtcctcctcggtgaggtgaacatccgcctgcgagagctggacctggctcaggagaagaccggctggttcgccctgggatctcgaagtcatggcaccttgtgagcccagcagagccaccacccagcatcccaggctggtggcaggagctgggggagaggactctcccctgtgagactcctccttgtgaagggccagggccctgggcaggcctccagctcggtccaggtgattctggcctctgtggtaggaggcagggagagtaagacatgctctgctgtctcttcctctggagactgaacttgggttggttgtgatgagcagccccttggaggctgtgaggttgcagcaaagttttaagtttaccttgtgtcaagggagcaatgcttggtttggggagtgtgtggggtgggctgtatgaagtagcattttgggggtgggtgggtggatatcttaatttttatttttaaaaaatgaaatagtgatgttgtcctaactgggacaggaagccttgcgagaagggacgtacctatgccccagaaggcaagagaggaagactatttggactttttgtatgattaaggttcttattggacttttccctaggttttttttttttgttattgttgttgttgtttcgttttctagctataggaactatctggggaggggcccagtgggtcctcggccagagccctctctaaggacaggttggggagggttggggagggctgcctgtgctggactgaggcttgtgccactgggcctttctgattttgcctccaaaggagagcgctgtgatacctacatgtgtaaggaagggccttccgtattggggttctgccaaggacccgtattcagggacccatgctcttttggggggacttttcctcttgtcttccctactttattaggacttgccctgaataccattttctaccccttgcccctccattctcctggcccttctgggggtcagctggtctctatgaatatgctgggggtgcttccccataggtctctcccttcatttgtctctggtgggacaaaatactgactcagtccttagatgtagtttcacccaagagcatcttggccctgggaagaggtccctaggctgcagatgctactgactgcttgctaggtagcctctggaaagcattccccatccatcactccccacttctttctgctgtgctgcttccctcccaaactccatttctgtcaccctttttataagacttttcctcattctgtggggccataaacctatttagtctggagccaaagggatgccctatctgaaggaaaggggcatggggtgggggattccatcaaaactgttgttttttgccccatgatttttctttggtcagtaggaggctggattggagtggtgattattcccctggagctaagctcaggagcccgaagggagagactgagactgactcccttatctcttcatattctttattccctaccagatggatttttttttttttttttggagacggagtctcgccctgtcgccaggctggagtgtagtggcatgatctcgactcactgcaaaatctgcctcccgggttcaagcgattctcctacctcagcctcccgagtagctgggattacaggcatgtgccaccacgccaagctaatttttgtatttttagtagagacggggtttcaccatgttggccaggatggtctcgatctcttgacctcgtgatctgcctgccttggcctcccaaagtgctgggattacaggcgtgagccaccatgccccgccccagatggattttacatttgctcttttgtgtttcgctccaaagggttgtcttcctcgccaaaaggagggagggactttgaatttgatatgaatctttaaaaccagaattggctggatatttcccatgattgggaaaagagtgaaatgaggacattctgtaaactgtccctccctaattccaaggatcagaaactccccgttttgctgactcattccataactggagaaagaagctccattgaccgaagccacagggcagcatggaagtttaaattttctctaaaattaaaatgccaaggataaagctggctgcttccaggagggggaagaggagtggggagtgggcggtgaaacttttccag

SEQ ID NO: 266449 - DNA, 4820 bp, Artificial Sequence
  derived and/or modified sequence
atgagtagcacccagggtaatggcgagcactggaagagtctggaatcggttgggatctctcgcaaggagctggcaatggcagaagcgcttcagatggaatatgacgcactatcacgcctgaggcatgataaggaagaaaatcgtgccaaacagaacgcagacccctcacttatctcctgggatgaacccggtgtcgatttttactcaaaacctgcgggaaggagaacagacctcaaactattaagggggttaagtggttccgatccgacactgaattacaatagtctctctccccaagaaggccctcctaatcacagcacctcccagggacctcagccaggatccgacccgtggcctaagggcagtttatcaggcgactacctttacattttcgacggctccgatggaggggtgagtagctcgccagggcctggcgatatcgaggggtcatgcaaaaaattatcacctccgccactgccaccgcgtgcttctatctgggacacgccgcctctgcctcctagaaagggctcccctagtagcagcaagatctcccagccaagcgacatcaacactttcagcctcgttgagcagctgcccggtaagttgttggagcaccggatcctcgaagaagaagaggtgctgggtggcggaggtcaagggagattactgggatccgtggactatgacggcataaatgatgccataacgcgccttaacctgaagagcacatacgatgctgaaatgttacgggatgctacccggggttggaaagagggaaggggaccgctggactttagcaaggacacttcaggtaaaccagtggcgcgatccaagacaatgccaccacaggtgccgcctagaacatacgcatcgagatatggaaatcggaagaacgccactcctgggaagaaccgtcggattagtgcggcacccgtaggcagccggcctcacaccgttgccaacggtcatgagttgttcgaggtgagcgaggaacgggacgaagaggtggctgcattttgccacatgctggacatcctccggtcagggtcggatatccaggattacttcttgaccggctacgtgtggagcgctgtaacaccctctcccgagcatctgggtgatgaagtcaatttgaaagtgactgtgctctgtgacaggctccaagaagctctcaccttcacatgtaattgcagctccaccgtcgatcttctgatataccaaactctgtgctacacccacgatgatctgagaaacgtggacgtaggcgactttgtcctcaagccttgtggtctggaggaatttctgcagaataagcacgctttgggcagtcatgaatacatacaatattgcaggaagttcgacattgatatcaggctgcagcttatggaacagaaggtcgtgaggagtgatctggccaggacagtgaacgacgatcagtcccccagcacactcaactacctggtccacttgcaggagagacctgtgaagcagacgatttctcggcaggcgctcagcttgttattcgacacttaccacaatgaggtagacgcctttcttctggctgatggcgattttcccctgaaggctgatagggtagtgcagtcagtgaaggctatttgtaatgccctggccgcagtggagacaccagagattacgtctgcacttaaccaacttcccccttgtccatcgcggatgcaaccaaaaatccaaaaggatccatcagtattggccgtgcgggagaaccgggagaaggtggtggaggcactgactgccgctattcttgatctagtggagctatattgtaacacctttaacgccgattttcaaaccgctgtccctggtagccgcaagcatgacctggtgcaggaagcatgtcatttcgcaaggagcttggcctttacagtctatgccacacacaggattccaatcatctgggccactagttacgaagatttttacctctcctgttctttatctcatggagggaaggaactttgttctcctctgcagactagaagagctcactttagtaaatatttgttccacctcattgtgtgggaccaacaaatctgcttccctgtacaggtgaataggctgcctagagaaactctgctatgcgcaactttgtacgcactcccaattcctcccccaggctcctccagcgaggcaaataaacagagacgcgttcctgaagctcttgggtgggtgaccacccccctgttcaacttcagacaggttctgacctgcggtcgcaagctgttaggactatggcccgctacacaggaaaatccgtctgccaggtggtctgcaccaaatttccatcagcccgattctgtaatcctgcaaattgattttcccacaagcgcatttgatatcaagttcaccagtcctcctggggacaaattcagccctcgctacgagttcgggtctctgcgcgaggaggaccagcggaaactgaaggacatcatgcaaaaggagtctttatactggctgaccgacgccgacaaaaagcgcctttgggagaagagatattactgtcatagcgaatggacacacatgaaccatcaagacgccctgggactgctccacgccactttcccagatcaggaagttcgccgaatggccgtgcagtggatcggctcactgagcgacgctgagctactggattatctgcctcaacttgttcaagccctcaaatatgaatgttaccttgactcgccactggttcgatttctgctaaagcgcgctgtgtcagaccttcgggtgactcattactttttctggcttcttaaggatggactgaaggactcacaattcagcataaggtaccaatatctgctggcggctttattgtgttgttgcggcaaagggctccgtgaggagtttaatcgacagtgttggcttgtgaatgccctcgcgaaattggcccaacaggtgcgtgaggccgcaccctcagccaggcaggggatcctgcggaccggactggaagaggtaaagcagttttttgccctgaatggatcatgtagactgccactttctccttctctgcttgtgaagggcatcgttcccagagactgctcctatttcaattcgaatgcagtccctttgaagctgtcctttcagaacgttgatcctcttggggaaaacattcgagtgatttttaagtgtggtgatgacctgcggcaggacatgttgaccttgcaaatgatccgaattatgtcgaagatctgggtccaagaaggacttgacatgcgtatggtgatctttaggtgtttttctacaggccgtggcaggggcatggtggagatgattccaaatgcagagactctgagaaaaatccaggtggagcatggggttaccggttcgttcaaagataggcctctggcagactggttacagaagcacaacccaggtgaagatgagtatgaaaaagcggtcgagaattttatttattcttgcgccggatgttgtgtggccacttatgtgctgggtatctgtgatcggcacaacgataacattatgctcaagaccacgggccacatgtttcatatcgattttggcaggtttctggggcatgcccaaatgttcggcaacattaagagggatcgggcaccctttgtctttacatctgatatggcatatgtcatcaacggcggagacaagccatcatccagatttcacgacttcgttgacttatgctgccaggcgtataatctaatacgcaaacatacccacttgttccttaatctgttgggtctgatgctctcttgtggtatcccagaactctcggacctggaagacttgaagtatgtttatgacgcgctccgccctcaggacacagaagcgaatgccaccacatattttacaaggttgattgaatcaagcctggggtcagtcgcaactaagttaaatttttttatccataacctggcacagatgaagtttacggggtccgacgaccgactgacactaagcttcgctagccgcacacacacattaaaatccagcggacgaatttcggatgtgtttctctgtaggcacgaaaaaatatttcacccaaacaaaggatatatctacgtcgttaaggttatgcgtgaaaatacccacgaggcaacgtacattcagaggacctttgaagaatttcaagagctccataacaaactaaggctgctgtttcccagcagccaccttccctcattcccgagccgtttcgtgattggcagaagcaggggtgaggccgtggccgaacggcgtagagaggagctgaacggctacatttggcacctgatccacgctcctcccgaagttgcggagtgcgacctggtctacaccttctttcacccactgccgcgagacgagaaagctatggggacatcgcccgcacctaagagcagtgatggaacctgggccagacctgttgggaaggttggcggagaagttaagttgtcgatctcttacaaaaacaataaactttttataatggtgatgcacattagagggctacagctccttcaggacgggaacgatccagacccatatgttaagatttatctgctgcctgacccgcagaaaaccaccaagaggaaaactaaagtagctaggaaaacatgcaaccctacatataacgagatgctggtttatgacgggataccgaagggagaccttcagcagcgagaactccaactctccgtgctttccgaacagggattttgggagaacgtgctactcggagaagtcaatatccgtcttcgtgaactcgatctggctcaggaaaaaactgggtggttcgccctgggctcccggtctcacggaaccttgta

SEQ ID NO: 266450 - DNA, 4821 bp, Artificial Sequence
  derived and/or modified sequence
atgagcagcacccagggcaacggcgagcactggaagagcctggagagcgtgggcatcagcagaaaggagctggccatggccgaggccctgcagatggagtacgacgccctgagcagactgagacacgacaaggaggagaacagagccaagcagaacgccgaccccagcctgatcagctgggacgagcccggcgtggacttctacagcaagcccgccggcagaagaaccgacctgaagctgctgagaggcctgagcggcagcgaccccaccctgaactacaacagcctgagcccccaggagggcccccccaaccacagcaccagccagggcccccagcccggcagcgacccctggcccaagggcagcctgagcggcgactacctgtacatcttcgacggcagcgacggcggcgtgagcagcagccccggccccggcgacatcgagggcagctgcaagaagctgagccccccccccctgccccccagagccagcatctgggacaccccccccctgccccccagaaagggcagccccagcagcagcaagatcagccagcccagcgacatcaacaccttcagcctggtggagcagctgcccggcaagctgctggagcacagaatcctggaggaggaggaggtgctgggcggcggcggccagggcagactgctgggcagcgtggactacgacggcatcaacgacgccatcaccagactgaacctgaagagcacctacgacgccgagatgctgagagacgccaccagaggctggaaggagggcagaggccccctggacttcagcaaggacaccagcggcaagcccgtggccagaagcaagaccatgcccccccaggtgccccccagaacctacgccagcagatacggcaacagaaagaacgccacccccggcaagaacagaagaatcagcgccgcccccgtgggcagcagaccccacaccgtggccaacggccacgagctgttcgaggtgagcgaggagagagacgaggaggtggccgccttctgccacatgctggacatcctgagaagcggcagcgacatccaggactacttcctgaccggctacgtgtggagcgccgtgacccccagccccgagcacctgggcgacgaggtgaacctgaaggtgaccgtgctgtgcgacagactgcaggaggccctgaccttcacctgcaactgcagcagcaccgtggacctgctgatctaccagaccctgtgctacacccacgacgacctgagaaacgtggacgtgggcgacttcgtgctgaagccctgcggcctggaggagttcctgcagaacaagcacgccctgggcagccacgagtacatccagtactgcagaaagttcgacatcgacatcagactgcagctgatggagcagaaggtggtgagaagcgacctggccagaaccgtgaacgacgaccagagccccagcaccctgaactacctggtgcacctgcaggagagacccgtgaagcagaccatcagcagacaggccctgagcctgctgttcgacacctaccacaacgaggtggacgccttcctgctggccgacggcgacttccccctgaaggccgacagagtggtgcagagcgtgaaggccatctgcaacgccctggccgccgtggagacccccgagatcaccagcgccctgaaccagctgcccccctgccccagcagaatgcagcccaagatccagaaggaccccagcgtgctggccgtgagagagaacagagagaaggtggtggaggccctgaccgccgccatcctggacctggtggagctgtactgcaacaccttcaacgccgacttccagaccgccgtgcccggcagcagaaagcacgacctggtgcaggaggcctgccacttcgccagaagcctggccttcaccgtgtacgccacccacagaatccccatcatctgggccaccagctacgaggacttctacctgagctgcagcctgagccacggcggcaaggagctgtgcagccccctgcagaccagaagagcccacttcagcaagtacctgttccacctgatcgtgtgggaccagcagatctgcttccccgtgcaggtgaacagactgcccagagagaccctgctgtgcgccaccctgtacgccctgcccatccccccccccggcagcagcagcgaggccaacaagcagagaagagtgcccgaggccctgggctgggtgaccacccccctgttcaacttcagacaggtgctgacctgcggcagaaagctgctgggcctgtggcccgccacccaggagaaccccagcgccagatggagcgcccccaacttccaccagcccgacagcgtgatcctgcagatcgacttccccaccagcgccttcgacatcaagttcaccagcccccccggcgacaagttcagccccagatacgagttcggcagcctgagagaggaggaccagagaaagctgaaggacatcatgcagaaggagagcctgtactggctgaccgacgccgacaagaagagactgtgggagaagagatactactgccacagcgagtggacccacatgaaccaccaggacgccctgggcctgctgcacgccaccttccccgaccaggaggtgagaagaatggccgtgcagtggatcggcagcctgagcgacgccgagctgctggactacctgccccagctggtgcaggccctgaagtacgagtgctacctggacagccccctggtgagattcctgctgaagagagccgtgagcgacctgagagtgacccactacttcttctggctgctgaaggacggcctgaaggacagccagttcagcatcagataccagtacctgctggccgccctgctgtgctgctgcggcaagggcctgagagaggagttcaacagacagtgctggctggtgaacgccctggccaagctggcccagcaggtgagagaggccgcccccagcgccagacagggcatcctgagaaccggcctggaggaggtgaagcagttcttcgccctgaacggcagctgcagactgcccctgagccccagcctgctggtgaagggcatcgtgcccagagactgcagctacttcaacagcaacgccgtgcccctgaagctgagcttccagaacgtggaccccctgggcgagaacatcagagtgatcttcaagtgcggcgacgacctgagacaggacatgctgaccctgcagatgatcagaatcatgagcaagatctgggtgcaggagggcctggacatgagaatggtgatcttcagatgcttcagcaccggcagaggcagaggcatggtggagatgatccccaacgccgagaccctgagaaagatccaggtggagcacggcgtgaccggcagcttcaaggacagacccctggccgactggctgcagaagcacaaccccggcgaggacgagtacgagaaggccgtggagaacttcatctacagctgcgccggctgctgcgtggccacctacgtgctgggcatctgcgacagacacaacgacaacatcatgctgaagaccaccggccacatgttccacatcgacttcggcagattcctgggccacgcccagatgttcggcaacatcaagagagacagagcccccttcgtgttcaccagcgacatggcctacgtgatcaacggcggcgacaagcccagcagcagattccacgacttcgtggacctgtgctgccaggcctacaacctgatcagaaagcacacccacctgttcctgaacctgctgggcctgatgctgagctgcggcatccccgagctgagcgacctggaggacctgaagtacgtgtacgacgccctgagaccccaggacaccgaggccaacgccaccacctacttcaccagactgatcgagagcagcctgggcagcgtggccaccaagctgaacttcttcatccacaacctggcccagatgaagttcaccggcagcgacgacagactgaccctgagcttcgccagcagaacccacaccctgaagagcagcggcagaatcagcgacgtgttcctgtgcagacacgagaagatcttccaccccaacaagggctacatctacgtggtgaaggtgatgagagagaacacccacgaggccacctacatccagagaaccttcgaggagttccaggagctgcacaacaagctgagactgctgttccccagcagccacctgcccagcttccccagcagattcgtgatcggcagaagcagaggcgaggccgtggccgagagaagaagagaggagctgaacggctacatctggcacctgatccacgccccccccgaggtggccgagtgcgacctggtgtacaccttcttccaccccctgcccagagacgagaaggccatgggcaccagccccgcccccaagagcagcgacggcacctgggccagacccgtgggcaaggtgggcggcgaggtgaagctgagcatcagctacaagaacaacaagctgttcatcatggtgatgcacatcagaggcctgcagctgctgcaggacggcaacgaccccgacccctacgtgaagatctacctgctgcccgacccccagaagaccaccaagagaaagaccaaggtggccagaaagacctgcaaccccacctacaacgagatgctggtgtacgacggcatccccaagggcgacctgcagcagagagagctgcagctgagcgtgctgagcgagcagggcttctgggagaacgtgctgctgggcgaggtgaacatcagactgagagagctggacctggcccaggagaagaccggctggttcgccctgggcagcagaagccacggcaccctgtag

SEQ ID NO: 266451 - protein, 801 aa, Artificial Sequence
  derived and/or modified sequence
MGDTVVEPAPLKPTSEPTSGPPGNNGGSLLSVITEGVGELSVIDPEVAQKACQEVLEKVKLLHGGVAVSSRGTPLELVNGDGVDSEIRCLDDPPAQIREEEDEMGAAVASGTAKGARRRRQNNSAKQSWLLRLFESKLFDISMAISYLYNSKEPGVQAYIGNRLFCFRNEDVDFYLPQLLNMYIHMDEDVGDAIKPYIVHRCRQSINFSLQCALLLGAYSSDMHISTQRHSRGTKLRKLILSDELKPAHRKRELPSLSPAPDTGLSPSKRTHQRSKSDATASISLSSNLKRTASNPKVENEDEPVRLAPEREFIKSLMAIGKRLATLPTKEQKTQRLISELSLLNHKLPARVWLPTAGFDHHVVRVPHTQAVVLNSKDKAPYLIYVEVLECENFDTTSVPARIPENRIRSTRSVENLPECGITHEQRAGSFSTVPNYDNDDEAWSVDDIGELQVELPEVHTNSCDNISQFSVDSITSQESKEPVFIAAGDIRRRLSEQLAHTPTAFKRDPEDPSAVALKEPWQEKVRRIREGSPYGHLPNWRLLSVIVKCGDDLRQELLAFQVLKQLQSIWEQERVPLWIKPYKILVISADSGMIEPVVNAVSIHQVKKQSQLSLLDYFLQEHGSYTTEAFLSAQRNFVQSCAGYCLVCYLLQVKDRHNGNILLDAEGHIIHIDFGFILSSSPRNLGFETSAFKLTTEFVDVMGGLDGDMFNYYKMLMLQGLIAARKHMDKVVQIVEIMQQGSQLPCFHGSSTIRNLKERFHMSMTEEQLQLLVEQMVDGSMRSITTKLYDGFQYLTNGIM

SEQ ID NO: 266452 - protein, 191 aa, Artificial Sequence
  derived and/or modified sequence
MAIGKRLATLPTKEQKTQRLISELSLLNHKLPARVWLPTAGFDHHVVRVPHTQAVVLNSKDKAPYLIYVEVLECENFDTTSVPARIPENRIRSTRSVENLPECGITHEQRAGSFSTVPNYDNDDEAWSVDDIGELQVELPEVHTNSCDNISQFSVDSITSQESKEPVFIAAGDIRRRLSEQLAHTPTAFKR

SEQ ID NO: 266453 - DNA, 2406 bp, Artificial Sequence
  derived and/or modified sequence
atgggcgacaccgtggtggagcccgcccccctgaagcccaccagcgagcccaccagcggcccccccggcaacaacggcggcagcctgctgagcgtgatcaccgagggcgtgggcgagctgagcgtgatcgaccccgaggtggcccagaaggcctgccaggaggtgctggagaaggtgaagctgctgcacggcggcgtggccgtgagcagcagaggcacccccctggagctggtgaacggcgacggcgtggacagcgagatcagatgcctggacgacccccccgcccagatcagagaggaggaggacgagatgggcgccgccgtggccagcggcaccgccaagggcgccagaagaagaagacagaacaacagcgccaagcagagctggctgctgagactgttcgagagcaagctgttcgacatcagcatggccatcagctacctgtacaacagcaaggagcccggcgtgcaggcctacatcggcaacagactgttctgcttcagaaacgaggacgtggacttctacctgccccagctgctgaacatgtacatccacatggacgaggacgtgggcgacgccatcaagccctacatcgtgcacagatgcagacagagcatcaacttcagcctgcagtgcgccctgctgctgggcgcctacagcagcgacatgcacatcagcacccagagacacagcagaggcaccaagctgagaaagctgatcctgagcgacgagctgaagcccgcccacagaaagagagagctgcccagcctgagccccgcccccgacaccggcctgagccccagcaagagaacccaccagagaagcaagagcgacgccaccgccagcatcagcctgagcagcaacctgaagagaaccgccagcaaccccaaggtggagaacgaggacgagcccgtgagactggcccccgagagagagttcatcaagagcctgatggccatcggcaagagactggccaccctgcccaccaaggagcagaagacccagagactgatcagcgagctgagcctgctgaaccacaagctgcccgccagagtgtggctgcccaccgccggcttcgaccaccacgtggtgagagtgccccacacccaggccgtggtgctgaacagcaaggacaaggccccctacctgatctacgtggaggtgctggagtgcgagaacttcgacaccaccagcgtgcccgccagaatccccgagaacagaatcagaagcaccagaagcgtggagaacctgcccgagtgcggcatcacccacgagcagagagccggcagcttcagcaccgtgcccaactacgacaacgacgacgaggcctggagcgtggacgacatcggcgagctgcaggtggagctgcccgaggtgcacaccaacagctgcgacaacatcagccagttcagcgtggacagcatcaccagccaggagagcaaggagcccgtgttcatcgccgccggcgacatcagaagaagactgagcgagcagctggcccacacccccaccgccttcaagagagaccccgaggaccccagcgccgtggccctgaaggagccctggcaggagaaggtgagaagaatcagagagggcagcccctacggccacctgcccaactggagactgctgagcgtgatcgtgaagtgcggcgacgacctgagacaggagctgctggccttccaggtgctgaagcagctgcagagcatctgggagcaggagagagtgcccctgtggatcaagccctacaagatcctggtgatcagcgccgacagcggcatgatcgagcccgtggtgaacgccgtgagcatccaccaggtgaagaagcagagccagctgagcctgctggactacttcctgcaggagcacggcagctacaccaccgaggccttcctgagcgcccagagaaacttcgtgcagagctgcgccggctactgcctggtgtgctacctgctgcaggtgaaggacagacacaacggcaacatcctgctggacgccgagggccacatcatccacatcgacttcggcttcatcctgagcagcagccccagaaacctgggcttcgagaccagcgccttcaagctgaccaccgagttcgtggacgtgatgggcggcctggacggcgacatgttcaactactacaagatgctgatgctgcagggcctgatcgccgccagaaagcacatggacaaggtggtgcagatcgtggagatcatgcagcagggcagccagctgccctgcttccacggcagcagcaccatcagaaacctgaaggagagattccacatgagcatgaccgaggagcagctgcagctgctggtggagcagatggtggacggcagcatgagaagcatcaccaccaagctgtacgacggcttccagtacctgaccaacggcatcatgtag

SEQ ID NO: 266454 - DNA, 1455 bp, Artificial Sequence
  derived and/or modified sequence
atggccatcggcaagagactggccaccctgcccaccaaggagcagaagacccagagactgatcagcgagctgagcctgctgaaccacaagctgcccgccagagtgtggctgcccaccgccggcttcgaccaccacgtggtgagagtgccccacacccaggccgtggtgctgaacagcaaggacaaggccccctacctgatctacgtggaggtgctggagtgcgagaacttcgacaccaccagcgtgcccgccagaatccccgagaacagaatcagaagcaccagaagcgtggagaacctgcccgagtgcggcatcacccacgagcagagagccggcagcttcagcaccgtgcccaactacgacaacgacgacgaggcctggagcgtggacgacatcggcgagctgcaggtggagctgcccgaggtgcacaccaacagctgcgacaacatcagccagttcagcgtggacagcatcaccagccaggagagcaaggagcccgtgttcatcgccgccggcgacatcagaagaagactgagcgagcagctggcccacacccccaccgccttcaagagagaccccgaggaccccagcgccgtggccctgaaggagccctggcaggagaaggtgagaagaatcagagagggcagcccctacggccacctgcccaactggagactgctgagcgtgatcgtgaagtgcggcgacgacctgagacaggagctgctggccttccaggtgctgaagcagctgcagagcatctgggagcaggagagagtgcccctgtggatcaagccctacaagatcctggtgatcagcgccgacagcggcatgatcgagcccgtggtgaacgccgtgagcatccaccaggtgaagaagcagagccagctgagcctgctggactacttcctgcaggagcacggcagctacaccaccgaggccttcctgagcgcccagagaaacttcgtgcagagctgcgccggctactgcctggtgtgctacctgctgcaggtgaaggacagacacaacggcaacatcctgctggacgccgagggccacatcatccacatcgacttcggcttcatcctgagcagcagccccagaaacctgggcttcgagaccagcgccttcaagctgaccaccgagttcgtggacgtgatgggcggcctggacggcgacatgttcaactactacaagatgctgatgctgcagggcctgatcgccgccagaaagcacatggacaaggtggtgcagatcgtggagatcatgcagcagggcagccagctgccctgcttccacggcagcagcaccatcagaaacctgaaggagagattccacatgagcatgaccgaggagcagctgcagctgctggtggagcagatggtggacggcagcatgagaagcatcaccaccaagctgtacgacggcttccagtacctgaccaacggcatcatgtag

SEQ ID NO: 266455 - DNA, 2406 bp, Artificial Sequence
  derived and/or modified sequence
atgggagacaccgtcgtagaaccggcccccctaaaacctacatccgagccaacatctggtccgcctggcaacaatggcgggtcactactctcggttatcaccgagggtgtgggcgagctgtccgtgatcgatccagaggtggctcagaaagcctgtcaggaagtgttagagaaggtgaagcttctgcacgggggcgtggccgtaagctcacgcggaacacccctggaattggtaaatggggacggtgtggattctgagatcaggtgcctcgatgaccctccggctcagatacgagaagaagaagacgagatgggagctgccgtggcaagcggaactgctaagggggctaggcgcagaaggcagaacaacagcgcgaaacagtcatggctcctgcgtttgtttgaatccaaactgtttgacatcagcatggcgatttcttacctgtacaattccaaagagcccggagttcaagcatacatcggtaacagattattttgtttcaggaatgaagatgtggacttttacctgccacagttgctgaacatgtatatccacatggacgaagacgtgggcgacgctataaagccctatatcgtgcatagatgtcggcagagtattaacttttcactccagtgcgccctgctgcttggcgcctattcttctgacatgcacatttctacgcagcgtcattctagaggcacaaagctgcgcaagctgattctcagtgatgagctgaagcccgcccatcgcaagagagagctgccaagtctgagccccgcccccgatacaggcctatcaccatcgaaacgcactcaccagcggtcaaaaagcgacgcaacggcctccataagcctgagctcaaacttaaagcgtaccgctagcaacccaaaggtggaaaatgaggatgagccggtgcgccttgcccccgagcgagaattcattaaatctctgatggcgatcggaaagcgactcgccaccctccctaccaaggaacaaaaaacgcagcgccttatcagtgaactctctctgctgaaccacaagctacccgccagagtgtggctgcctacagcaggtttcgaccaccacgtcgttagagtgccacatacccaagccgtggtgctgaatagcaaggataaggctccatatctcatttacgttgaggtactggagtgcgagaatttcgataccacctctgttccggcaaggattcccgaaaatcggatccgcagcacccgtagcgtggagaatcttcctgagtgcgggattactcatgagcagagagcaggctcgttttcaactgttccaaactatgataatgatgatgaggcttggtcagtggatgacatcggcgaactgcaggtcgagctgccagaggtgcatactaactcatgcgacaacatttctcagttttcagtagactcaataacttcacaggagagtaaggagccggtgtttattgcggccggcgacatccggcgcaggctttcagaacagttggcccacacaccgactgctttcaagcgagacccagaagaccctagcgcggttgcccttaaggagccatggcaggagaaagtaagacgcatacgggagggatccccgtatggacacctcccaaactggcgccttctttccgttatagtgaagtgtggagatgatctcaggcaggaactgcttgcattccaggtcctgaagcagcttcagtctatctgggaacaggagcgagttcccctgtggatcaaaccctacaagatattagtgataagtgcggattcaggtatgattgaacccgtggtgaacgccgtgagtattcaccaggtgaagaagcaaagtcagttgtctctgctcgactatttcttgcaggaacacggaagttatactaccgaggcatttctgagtgcacagagaaatttcgtgcagagttgcgctggctattgcctcgtctgctacctactgcaggtgaaggatcgccataacgggaacatcctgctcgacgcagagggccatataatacatattgattttgggtttattctgagctcctccccgaggaatcttggattcgagacctctgctttcaagcttaccacagaattcgtggacgtgatgggaggtctagacggtgacatgtttaattactacaaaatgctcatgctgcaagggcttattgctgccaggaaacacatggacaaggtcgtccagatcgtcgagatcatgcaacaaggaagccaattaccttgctttcacgggtcaagcaccatcagaaacctcaaagaaaggttccacatgtcaatgaccgaggagcagttgcagctcctagtggagcagatggtggacggctctatgagaagtattaccactaaactgtatgacgggtttcagtaccttaccaacggtattatgtag

SEQ ID NO: 266456 - DNA, 2406 bp, Artificial Sequence
  derived and/or modified sequence
atgggtgacacagtcgtggaacctgcaccactcaagcccacaagcgagcctacgtccggacctccagggaataatggaggctcccttttgagcgtgattacagagggtgtgggagagctgtctgtgatcgacccagaggtcgcccagaaggcatgtcaggaggtgctggagaaggtgaaactgctgcatggtggcgttgcggtaagcagcaggggaacaccactggagttagttaacggagatggggtggattctgaaattagatgtttagatgaccctccggctcagattcgcgaggaggaggatgaaatgggggcggctgtcgccagtggaacggctaaaggggcccgccggcggaggcagaacaattccgcaaaacaatcctggctgcttaggctctttgaaagtaaactgtttgacatttccatggcaatctcatacctttacaattcgaaagagcccggcgtgcaagcatacataggtaacaggctgttctgtttcaggaatgaggatgtggatttttacctcccacagctgctaaacatgtatatccatatggatgaggacgttggtgatgcaataaagccatacattgtccaccggtgccgccagtccattaacttctctctgcaatgcgccttgttactgggcgcgtactcctccgacatgcacatatccacccagcgccattctcgcgggaccaagcttcgaaagcttattcttagtgatgagctgaagccagcccatcggaagagagagcttcccagtctgtctcccgcgccagacactggcctgagcccttccaagaggacccatcagcgatccaaaagtgatgctacagcttcaatctccttgagctctaatctaaagcgcaccgccagcaacccgaaagtcgaaaacgaggatgaacccgtcagactggctccggaaagagagttcatcaaaagcttgatggccatcggtaaacgattggcgaccctcccgacaaaggaacagaaaacccaacggctgatctctgagttgtctctgctgaatcataaactgccagctcgagtctggcttcccactgcagggttcgaccatcatgtggtgagggtgccgcacactcaggcagtggtgctgaatagtaaagataaggccccttatctcatctacgtggaagtactggaatgcgaaaactttgataccacctccgtccctgctagaatccccgagaacaggatacggagtacacggtccgtggagaaccttcctgaatgcggaatcacccacgagcagcgcgccgggagtttcagtactgtcccaaactacgacaatgacgatgaagcctggagcgtggatgatattggcgaacttcaggtggaattaccagaagtccatacaaattcttgcgataacataagtcagtttagtgtcgactccattacatcacaagaatccaaagagcccgtgttcatagcagccggagatatcagaaggagactgagcgaacagctcgctcatacgcccactgcctttaaacgtgatccggaggatcccagcgccgtagctctgaaggagccttggcaggaaaaagtacgaagaatcagggaaggttcaccctatggacatcttcccaattggagactactctcggtgatcgtaaaatgcggggacgacttacgacaggagcttttggcctttcaagtactaaagcagttgcagtcgatatgggaacaggagcgcgtgcctctctggattaagccttacaaaattctggtgatttctgcagactccggcatgatcgagcctgtggtaaatgccgtgtcaattcatcaggttaagaaacagtctcaattgtccctattggattatttccttcaggaacacggatcttacacaaccgaagctttcctgagcgcccagcgcaactttgttcagagttgcgctggctattgcctggtatgttaccttctccaagtcaaggatcggcataatggcaatatactcttagacgcagagggacatatcatccatatcgattttggctttattcttagcagctcacccaggaacttgggctttgagaccagtgcttttaagctgacaacagaattcgtggatgtaatgggcggattagacggcgatatgtttaactactacaaaatgttaatgctgcagggcttgatcgctgctcgcaagcacatggacaaagtagtgcagattgtcgaaataatgcagcaaggatcccagctcccatgtttccacggcagttccaccattcggaaccttaaggagcgctttcatatgtctatgacggaagagcagctccagctcctcgtggaacagatggttgatgggagcatgagaagcattaccaccaaactgtatgacggattccagtatctgacgaacggcattatgtag

SEQ ID NO: 266457 - DNA, 3331 bp, Artificial Sequence
  derived and/or modified sequence
cgcagccggggcctggtgcagcctccgcggccgctgtcagggaagcgcaggcggccaatggaacccgggagcggtcgctgctgctgaggcggcagtgtcggcagtccaaccgcgactgcccgcaccccctccgcgggggtcccccagaggatcaactaaaccttgaactaagaagaaaaatgtgttgtgagcagggggagcctcagctgcctcaggccgttcaggacagaagggtgtttctgaaggccggagcaagttttgaagaagtccctatcagattacacttggttgactactccggagcagccactaagagggatgaacaggcctgcgtggaaattgaatgagattagttgagtccacgctccatgagaatgctgaacaccatccaaagcagcaaattgagattccttgatttggggaagaggtttgggaggaacccttcaataattggcatgggacaagaggggacccagtccaagtgtatttgggactcgcagtagggaggaacaattcagagagagcttggaagctcgaagtctggctgtggccatgggagatacagtagtggagcctgcccccttgaagccaacttctgagcccacttctggcccaccagggaataatggggggtccctgctaagtgtcatcacggagggggtcggggaactatcagtgattgaccctgaggtggcccagaaggcctgccaggaggtgttggagaaagtcaagcttttgcatggaggcgtggcagtctctagcagaggcaccccactggagttggtcaatggggatggtgtggacagtgagatccgttgcctagatgatccacctgcccagatcagggaggaggaagatgagatgggggccgctgtggcctcaggcacagccaaaggagcaagaagacggcggcagaacaactcagctaaacagtcttggctgctgaggctgtttgagtcaaaactgtttgacatctccatggccatttcatacctgtataactccaaggagcctggagtacaagcctacattggcaaccggctcttctgctttcgcaacgaggacgtggacttctatctgccccagttgcttaacatgtacatccacatggatgaggatgtgggtgatgccattaagccctacatagtccaccgttgccgccagagcattaacttttccctccagtgtgccctgttgcttggggcctattcttcagacatgcacatttccactcaacgacactcccgtgggaccaagctacggaagctgatcctctcagatgagctaaagccagctcacaggaagagggagctgccctccttgagcccggcccctgacacagggctgtctccctccaaaaggactcaccagcgctctaagtcagatgccactgccagcataagtctcagcagcaacctgaaacgaacagccagcaaccctaaagtggagaatgaggatgagcctgttcgactggctcctgagagagaattcatcaagtccctgatggcgatcggcaagcggctggccacgctccccaccaaagagcagaaaacacagaggctgatctcagagctctccctgctcaaccataagctccctgcccgagtctggctgcccactgctggctttgaccaccacgtggtccgtgtaccccacacacaggctgttgtcctcaactccaaggacaaggctccctacctgatttatgtggaagtccttgaatgtgaaaactttgacaccaccagtgtccctgcccggatccccgagaaccgaattcggagtacgaggtccgtagaaaacttgcccgaatgtggtattacccatgagcagcgagctggcagcttcagcactgtgcccaactatgacaacgatgatgaggcctggtcggtggatgacataggcgagctgcaagtggagctccccgaagtgcataccaacagctgtgacaacatctcccagttctctgtggacagcatcaccagccaggagagcaaggagcctgtgttcattgcagcaggggacatccgccggcgcctttcggaacagctggctcataccccgacagccttcaaacgagacccagaagatccttctgcagttgctctcaaagagccctggcaggagaaagtacggcggatcagagagggctccccctacggccatctccccaattggcggctcctgtcagtcattgtcaagtgtggggatgaccttcggcaagagcttctggcctttcaggtgttgaagcaactgcagtccatttgggaacaggagcgagtgcccctttggatcaagccatacaagattcttgtgatttcggctgatagtggcatgattgaaccagtggtcaatgctgtgtccatccatcaggtgaagaaacagtcacagctctccttgctcgattacttcctacaggagcacggcagttacaccactgaggcattcctcagtgcacagcgcaattttgtgcaaagttgtgctgggtactgcttggtctgctacctgctgcaagtcaaggacagacacaatgggaatatccttttggacgcagaaggccacatcatccacatcgactttggcttcatcctctccagctcaccccgaaatctgggctttgagacgtcagcctttaagctgaccacagagtttgtggatgtgatgggcggcctggatggcgacatgttcaactactataagatgctgatgctgcaagggctgattgccgctcggaaacacatggacaaggtggtgcagatcgtggagatcatgcagcaaggttctcagcttccttgcttccatggctccagcaccattcgaaacctcaaagagaggttccacatgagcatgactgaggagcagctgcagctgctggtggagcagatggtggatggcagtatgcggtctatcaccaccaaactctatgacggcttccagtacctcaccaacggcatcatgtgacacgctcctcagcccaggagtggtggggggtccagggcaccctccctagagggcccttgtctgagaaaccccaaaccaggaaaccccacctacccaaccatccacccaagggaaatggaaggcaagaaacacgaaggatcatgtggtaactgcgagagcttgctgaggggtgggagagccagctgtggggtccagacttgttggggcttccctgcccctcctggtctgtgtcagtattaccaccagactgactccaggactcactgccctccagaaaacagaggtgacaaatgtgagggacactggggcctttcttctccttgtaggggtctctcagaggttctttccacaggccatcctcttattccgttct

SEQ ID NO: 266458 - DNA, 3934 bp, Artificial Sequence
  derived and/or modified sequence
ccccgcccccttttctatttctgaacaggcatgttccaggcagctcacccgactccttagattactatggaatcggtagggtcctgaccgctggggaagcaggaaagcgtatcctgggaagaaaggcttggcttggactccggagaagaatactacatcgagacctgctggggaattttattttattttattatttttttggtcttggttgtactgagggaggaagaagaggttgtgtggcccggtcgaacttgtggcagcctgaaggccccctcaggcggcgccgcgggcagccccgcagccggggcctggtgcagcctccgcggccgctgtcagggaagcgcaggcggccaatggaacccgggagcggtcgctgctgctgaggcggcagtgtcggcagtccaaccgcgactgcccgcaccccctccgcgggggtcccccagagcttggaagctcgaagtctggctgtggccatgggagatacagtagtggagcctgcccccttgaagccaacttctgagcccacttctggcccaccagggaataatggggggtccctgctaagtgtcatcacggagggggtcggggaactatcagtgattgaccctgaggtggcccagaaggcctgccaggaggtgttggagaaagtcaagcttttgcatggaggcgtggcagtctctagcagaggcaccccactggagttggtcaatggggatggtgtggacagtgagatccgttgcctagatgatccacctgcccagatcagggaggaggaagatgagatgggggccgctgtggcctcaggcacagccaaaggagcaagaagacggcggcagaacaactcagctaaacagtcttggctgctgaggctgtttgagtcaaaactgtttgacatctccatggccatttcatacctgtataactccaaggagcctggagtacaagcctacattggcaaccggctcttctgctttcgcaacgaggacgtggacttctatctgccccagttgcttaacatgtacatccacatggatgaggatgtgggtgatgccattaagccctacatagtccaccgttgccgccagagcattaacttttccctccagtgtgccctgttgcttggggcctattcttcagacatgcacatttccactcaacgacactcccgtgggaccaagctacggaagctgatcctctcagatgagctaaagccagctcacaggaagagggagctgccctccttgagcccggcccctgacacagggctgtctccctccaaaaggactcaccagcgctctaagtcagatgccactgccagcataagtctcagcagcaacctgaaacgaacagccagcaaccctaaagtggagaatgaggatgagcctgttcgactggctcctgagagagaattcatcaagtccctgatggcgatcggcaagcggctggccacgctccccaccaaagagcagaaaacacagaggctgatctcagagctctccctgctcaaccataagctccctgcccgagtctggctgcccactgctggctttgaccaccacgtggtccgtgtaccccacacacaggctgttgtcctcaactccaaggacaaggctccctacctgatttatgtggaagtccttgaatgtgaaaactttgacaccaccagtgtccctgcccggatccccgagaaccgaattcggagtacgaggtccgtagaaaacttgcccgaatgtggtattacccatgagcagcgagctggcagcttcagcactgtgcccaactatgacaacgatgatgaggcctggtcggtggatgacataggcgagctgcaagtggagctccccgaagtgcataccaacagctgtgacaacatctcccagttctctgtggacagcatcaccagccaggagagcaaggagcctgtgttcattgcagcaggggacatccgccggcgcctttcggaacagctggctcataccccgacagccttcaaacgagacccagaagatccttctgcagttgctctcaaagagccctggcaggagaaagtacggcggatcagagagggctccccctacggccatctccccaattggcggctcctgtcagtcattgtcaagtgtggggatgaccttcggcaagagcttctggcctttcaggtgttgaagcaactgcagtccatttgggaacaggagcgagtgcccctttggatcaagccatacaagattcttgtgatttcggctgatagtggcatgattgaaccagtggtcaatgctgtgtccatccatcaggtgaagaaacagtcacagctctccttgctcgattacttcctacaggagcacggcagttacaccactgaggcattcctcagtgcacagcgcaattttgtgcaaagttgtgctgggtactgcttggtctgctacctgctgcaagtcaaggacagacacaatgggaatatccttttggacgcagaaggccacatcatccacatcgactttggcttcatcctctccagctcaccccgaaatctgggctttgagacgtcagcctttaagctgaccacagagtttgtggatgtgatgggcggcctggatggcgacatgttcaactactataagatgctgatgctgcaagggctgattgccgctcggaaacacatggacaaggtggtgcagatcgtggagatcatgcagcaaggttctcagcttccttgcttccatggctccagcaccattcgaaacctcaaagagaggttccacatgagcatgactgaggagcagctgcagctgctggtggagcagatggtggatggcagtatgcggtctatcaccaccaaactctatgacggcttccagtacctcaccaacggcatcatgtgacacgctcctcagcccaggagtggtggggggtccagggcaccctccctagagggcccttgtctgagaaaccccaaaccaggaaaccccacctacccaaccatccacccaagggaaatggaaggcaagaaacacgaaggatcatgtggtaactgcgagagcttgctgaggggtgggagagccagctgtggggtccagacttgttggggcttccctgcccctcctggtctgtgtcagtattaccaccagactgactccaggactcactgccctccagaaaacagaggtgacaaatgtgagggacactggggcctttcttctccttgtaggggtctctcagaggttctttccacaggccatcctcttattccgttctggggcccaggaagtggggaagagtaggttctcggtacttaggacttgatcctgtggttggccactggccatgctgctgcccagctctacccctcccagggacctacccctcccagggaccgacccctggcccaagctccccttgctggcgggcgctgcgtgggccctgcacttgctgaggttccccatcatgggcaaggaagggaattcccacagccctccagtgtactgagggtactggcctagccatgtggaattccctaccctgactccttccccaaacccagggaaaagagctctcaattttttatttttaatttttgtttgaaataaagtccttagttagccacttgtgtcatttccaggttttctgggggagtgcagggggagatgggtgatgaggtatgaacggatgcctcagtgtccaagatacaaaaggcactacatagaagtttgctttttccctgcctgtcttggtcactaccacctcttccctgagaagggcgggccttccatgttctctcacccgcttcaactccacattgtccaagtcacagaaaaagagaggcctgaatggagattcgaccacaaacagttttaatggtctggttttctccctagttccccaactgtttgttagtattattattactacaagaataaaggattcctgagagcctgtc

SEQ ID NO: 266459 - DNA, 1455 bp, Artificial Sequence
  derived and/or modified sequence
atggccattgggaagcggttggccactctgcctacaaaagagcagaagacacaacgcctgatatccgagttaagtctacttaatcataagctaccagccagagtctggttgccaaccgctggattcgaccatcatgtggtgcgggtaccacacacccaggccgtcgtgttgaactccaaggacaaggccccctacttgatttacgtggaggtcctagagtgcgaaaatttcgacactactagcgtgccagcacggattcctgagaacaggatcagaagcactaggagcgtggagaatttaccggagtgtggtattactcacgagcaacgtgcgggaagtttcagtaccgtcccgaactacgacaatgatgacgaagcttggtctgtcgacgacattggcgaattacaggttgagctccccgaggtgcacaccaactcttgtgataatatctcccagttcagcgtcgatagtatcacatctcaggagtccaaggaacccgtgttcatagcagcgggggacatccgccggcgactctcagagcaactggcccataccccgaccgcgtttaagcgcgaccctgaagatcctagcgccgtcgcactgaaggaaccatggcaagagaaggtacggcgcatccgggagggctcaccttatggccacttgcctaattggcgactactgtctgtcatagtgaagtgcggggatgatctcagacaagagctcctggctttccaagtcctcaagcagttacaaagcatttgggaacaggagagggttcctctgtggataaagccctataaaatcctcgtgatttctgccgatagtgggatgatcgaacctgtggtcaatgccgtgagcatccaccaagtgaagaagcaatctcagctgagtctgttggactatttcctacaggagcacggtagctacacaactgaggccttcttatccgcccagcgtaactttgtccaatcttgtgccggatactgcctggtgtgctacctgctgcaggtgaaagataggcataacggaaacatcttattagacgccgagggccatataattcacatcgacttcggttttatcctatctagtagccctcggaacctgggttttgaaacatccgccttcaagctgaccactgagtttgtggacgttatgggcggactggatggggatatgttcaactattacaagatgctgatgctccagggcttaattgcagcaaggaagcatatggataaggttgtgcagattgtggagatcatgcaacagggatctcagctgccctgctttcacgggagttctaccatcaggaacctcaaagaacgattccacatgtctatgacggaggaacagcttcagctgctcgtggagcaaatggttgacgggagtatgcgttcaatcacaaccaaactctatgacgggttccagtatttgacaaatggcataatgtag

SEQ ID NO: 266460 - DNA, 2406 bp, Artificial Sequence
  derived and/or modified sequence
atgggagacacagtggtggagcccgcccccctgaagcccaccagcgagcccaccagcggccccccaggcaacaatggaggcagcctgctgagcgtcatcacagagggcgtgggggagctgtctgtgattgatcctgaggtggcccagaaggcctgccaggaggtgctggagaaggtgaagctgctgcatggaggagtggccgtgagcagccggggcacccccctggagctggtgaatggagatggagtggacagcgagatccgctgcctggatgatcctccagcccagatccgggaggaggaggatgagatgggcgctgctgtggccagcggcacagccaagggggccaggagaagacggcagaacaacagcgccaagcagagctggctgctgcggctgtttgagagcaagctgtttgacatctccatggccatctcctacctgtacaacagcaaggagcccggggtgcaggcctacatcggcaacagactcttctgcttcagaaatgaagatgtggacttctacctgccccagctgctgaacatgtacatccacatggatgaagatgtgggagatgccatcaagccctacatcgtgcaccgctgccggcagagcatcaacttcagcctgcagtgtgccctgctgctgggcgcctacagcagtgacatgcacatcagcacccagaggcacagccggggcaccaagctgaggaagctgatcctgagtgatgagctgaagccagcccacaggaagcgggagctgcccagcctgagccctgccccagacaccggcctgagccccagcaagaggacccaccagaggagcaagagtgatgccacagccagcatcagcctgagcagcaacctgaagaggacagccagcaaccccaaggtggagaatgaagatgagcctgtgcggctggcccctgagcgggagttcatcaagagcctgatggccatcggcaagaggctggccaccctgcccaccaaggagcagaagacccagaggctcatcagcgagctgagcctgctgaaccacaagctgcctgcccgggtgtggctgcccacagctggctttgaccaccacgtggtgcgggtgccccacacccaggccgtggtgctgaacagcaaggacaaggccccctacctgatctacgtggaggtgctggagtgtgagaactttgacaccacctctgtgcctgcccgcatcccagaaaatcgcatccgcagcaccaggtctgtggagaacctgcctgaatgtggcatcacccatgagcagagagctggcagcttcagcacagtgcccaactatgacaatgatgatgaggcctggagcgtggatgacattggagagctgcaggtggagctgcctgaggtgcacaccaacagctgtgacaacatcagccagttctctgtggacagcatcaccagccaggagagcaaggagcctgtgttcatcgccgccggggacatcagaagaaggctgtctgagcagctggcccacacccccacagccttcaagagggaccctgaggaccccagcgctgtggccctgaaggagccctggcaggagaaggtgcggcgcatccgggagggcagcccctacggccacctgcccaactggaggctgctgtctgtgattgtgaagtgtggagatgacctgcggcaggagctgctggccttccaggtgctgaagcagctgcagagcatctgggagcaggagcgggtgcccctgtggatcaagccctacaagatcctggtgatctctgctgacagcggcatgattgagcctgtggtgaatgctgtgtccatccaccaggtgaagaagcagagccagctgagcctgctggactacttcctgcaggagcacggcagctacaccacagaggccttcctgagcgcccagaggaactttgtgcagagctgtgccggctactgcctggtgtgctacctgctgcaggtgaaggacagacacaatggaaacatcctgctggatgctgagggccacatcatccacatcgactttggcttcatcctgagcagcagccccaggaacctgggctttgagaccagcgccttcaagctgaccacagaatttgtggatgtgatgggcggcctggatggagacatgttcaactactacaagatgctgatgctgcagggcctgattgctgccaggaagcacatggacaaggtggtgcagatcgtggagatcatgcagcagggcagccagctgccctgcttccacggcagcagcaccatccggaacctgaaggagcgcttccacatgtccatgacagaggagcagctgcagctgctggtggagcagatggtggatggctccatgaggagcatcaccaccaagctgtatgatggcttccagtacctgaccaacggcatcatgtag

SEQ ID NO: 266461 - DNA, 1455 bp, Artificial Sequence
  derived and/or modified sequence
atggccatcggcaagaggctggccaccctgcccaccaaggagcagaagacccagaggctcatcagcgagctgagcctgctgaaccacaagctgcctgcccgggtgtggctgcccacagctggctttgaccaccacgtggtgcgggtgccccacacccaggccgtggtgctgaacagcaaggacaaggccccctacctgatctacgtggaggtgctggagtgtgaaaattttgacaccacctctgtgcctgcccgcatccctgagaaccgcatccgcagcaccaggtctgtggagaacctgcctgaatgtggcatcacccatgagcagagagctggcagcttcagcacagtgcccaactatgacaatgatgatgaggcctggagcgtggatgacatcggggagctgcaggtggagctgcctgaggtgcacaccaacagctgtgacaacatcagccagttctctgtggacagcatcaccagccaggagagcaaggagcccgtcttcatcgctgctggggacatcagaagaaggctgtctgagcagctggcccacacccccacagccttcaagagggaccctgaggaccccagcgctgtggccctgaaggagccctggcaggagaaggtgcggcgcatccgggagggcagcccctacggccacctgcccaactggaggctgctgagcgtcatcgtgaagtgtggagatgacctgcggcaggagctgctggccttccaggtgctgaagcagctgcagagcatctgggagcaggagcgggtgcccctgtggatcaagccctacaagatcctggtgatctctgctgacagcggcatgattgagcctgtggtgaatgctgtgtccatccaccaggtgaagaagcagagccagctgagcctgctggactacttcctgcaggagcacggcagctacaccacagaggccttcctgagcgcccagaggaactttgtgcagagctgtgccggctactgcctggtgtgctacctgctgcaggtgaaggacagacacaacggcaacatcctgctggatgctgagggccacatcatccacatcgactttggcttcatcctgagcagcagccccaggaacctgggctttgagaccagcgccttcaagctgaccacagaatttgtggatgtgatgggcggcctggatggagacatgttcaactactacaagatgctgatgctgcagggcctgattgctgccaggaagcacatggacaaggtggtgcagatcgtggagatcatgcagcagggcagccagctgccctgcttccacggcagcagcaccatccggaacctgaaggagcgcttccacatgtccatgacagaggagcagctgcagctgctggtggagcagatggtggatggctccatgaggagcatcaccaccaagctgtatgatggcttccagtacctgaccaacggcatcatgtag

SEQ ID NO: 266462 - DNA, 2406 bp, Artificial Sequence
  derived and/or modified sequence
atgggcgacaccgtggtggagcccgcccccctgaagcccaccagcgagcccacttccgggcctcccgggaataacggcgggtcgctcttgtccgtcattactgaaggggtaggtgagttatccgttatcgatcccgaagtggctcagaaggcctgtcaagaagttctggaaaaggtcaagttgctgcacggtggggtcgctgtgagcagtaggggcaccccgttggaattggtgaacggggacggggtcgactccgagatacgatgcctcgatgaccctcctgcccaaatcagggaggaagaggatgagatgggcgctgccgtggcttctggcactgctaaaggcgcaagacggcgccgccagaataactcagccaagcagtcctggctactgcggctgtttgagtcaaaactgtttgatatttccatggctatcagctacctgtacaattcgaaggagccaggggttcaggcctacatcggtaaccggcttttctgctttcgcaatgaagatgtcgatttttaccttccacagcttctgaatatgtatattcatatggatgaggatgtaggcgacgcgatcaagccttacattgttcaccgctgccgccagagcatcaatttcagcctacaatgtgcattgctgctaggcgcctatagcagtgacatgcacataagtacacaaagacactcacgcggtaccaaactgcgcaaactaatcctgtcagacgagctcaagcccgctcataggaagagagagctcccaagtctctcgccagcacccgatacaggcctgagccccagtaaacgtactcaccaacgatcaaagagtgatgctactgctagcatttcactgagcagtaatctgaagaggactgcaagtaaccccaaagtggaaaatgaagacgaacctgttaggttagcacccgaacgggagtttatcaaatctctgatggctatcggtaagcgactcgctactctgcccacaaaggagcaaaaaactcagagactgatatctgaactgagcctcctgaatcacaagttgcccgctagggtgtggttgcctactgccggattcgaccatcacgtcgtccgggtgcctcacacacaggcagtggtgctcaactccaaggacaaagccccctatctaatctacgtcgaagtcctggaatgcgagaactttgacacaacctcagtgccagcccgcatccctgaaaatcggatccgtagcactcgatctgttgagaacctcccagagtgtggcattacacacgagcaacgagccgggtccttttccactgtgcccaattatgacaatgacgatgaggcttggtctgtggatgacataggtgagctgcaggtcgaattgcccgaagtgcatactaactcatgtgataacatcagtcagttctcagtggattccatcacctcgcaggaaagcaaggagccggtctttatagctgcaggcgacatccgtaggcgactatcggagcagctggcgcatacccccacggcgttcaagcgggacccagaggacccaagcgcagtggccctgaaggagccatggcaagaaaaagtccggcgcattcgagaagggagtccatatgggcacctacctaactggcggctcttaagcgttattgtgaagtgcggggacgacttgcggcaggagctgcttgcattccaggtcctgaaacagctgcaaagcatatgggagcaagaacgggtgcctctgtggatcaaaccctacaagatcctcgtaatctcagcagattctggcatgattgagcccgtggtgaacgctgtctctatccatcaagtgaaaaagcagtctcaactaagtctgctggattatttcctacaagaacacggttcctacacaaccgaagcctttctgtcagctcagcgaaatttcgtgcagtcctgtgctggctattgcctcgtttgttacctgctccaggtgaaagacaggcacaacggtaacatcctgttggatgccgagggacacattatccacattgacttcgggttcatcctcagttcgtctcccaggaaccttgggtttgaaacctcagcgtttaagctgaccactgagtttgtcgacgtgatgggagggctcgacggcgacatgtttaactattataagatgctgatgctgcagggcctgatcgcagcaagaaaacacatggacaaggtcgtgcagatagtcgagatcatgcagcagggtagccagctgccctgttttcacggctccagtaccattcgtaacttgaaagagaggtttcatatgagtatgaccgaggagcagcttcagctgctggttgaacagatggttgacggaagcatgaggtctattactaccaaactctatgacggattccagtatctgaccaacggaattatgtag

SEQ ID NO: 266463 - DNA, 2406 bp, Artificial Sequence
  derived and/or modified sequence
atgggcgacaccgtggtggagcccgcccccctgaagcccaccagcgagcctaccagcggcccccctggcaacaacggcgggagcctgctgagcgttatcactgagggggtcggggaactgtccgtgattgatccggaggtggctcagaaagcttgtcaggaggtcctggagaaggtgaagttgctccatggcggagtcgctgtgagtagtcggggcacccccttggagctcgtgaacggtgacggcgtggattcagaaattcggtgtctggatgatcccccagcccagattagagaagaggaagatgagatgggggccgcagtggcttctggtacagcaaagggcgccagaagacgacgtcagaataactccgctaaacagtcatggctactccggctattcgagagcaaactgttcgacattagtatggctatctcctacctgtacaattccaaagagcccggcgtgcaggcatacatcggaaatagactgttttgcttcaggaatgaggacgtcgacttctacctacctcaactcctcaacatgtacatccacatggacgaggacgtgggcgatgctatcaaaccttatatagtgcacaggtgtcgccagtcgatcaactttagcctgcagtgtgcacttctgctcggggcctactcaagcgacatgcacatctcaactcaaagacattccaggggtaccaagttgaggaaactgatccttagcgacgagctgaagcccgcacatcgaaagcgggaactgccatctctgtcccccgccccagacaccggtcttagtccatctaagcgcactcatcagcgcagtaaatccgatgccaccgcgagtatatctctcagctccaatcttaaaaggaccgcttcgaatccgaaggtggagaacgaggatgaaccagtccggctggctccagagcgggagttcattaagtcgctgatggcaatcggaaagcgactggctactttaccgacaaaagaacagaagacacaaagactcatctctgagctgtccttactgaaccataagcttccagccagggtttggctccctaccgccggattcgatcatcacgtcgtccgggtcccacacacacaggccgtggttctgaattctaaagacaaagccccttacctcatatacgtggaagttctggaatgcgagaactttgatacaactagcgtgcccgcccggatacctgagaacaggataagaagcactaggagcgttgagaacctccccgagtgcggcatcacacacgagcagcgggcaggctcgtttagcaccgtcccgaactatgacaatgacgacgaagcatggtcagtagatgatattggggaactgcaggtagagttgcccgaggtacacaccaatagctgtgataatatctctcagttttctgtcgactctatcaccagccaagagagtaaagaacctgtcttcattgctgccggggatatccggaggcggttgagtgaacagttggctcatacacccacggcgtttaagcgcgatcccgaggatccctctgcagtggcgctgaaagagccctggcaggaaaaagtgaggcggattagggagggtagcccctacgggcatctccccaattggcggctgttgtctgtgattgtgaagtgcggggatgatctgcggcaggaactgctcgcgttccaggtgctcaagcagctgcaatcgatttgggagcaggagagggttccactctggatcaaaccatataagatacttgtgatctccgccgactccgggatgattgagcccgtcgttaatgcagttagcatccatcaggtaaaaaagcagtctcagcttagcctcttggactactttctgcaggagcacgggagctataccacagaagcgtttttatccgcccaacgcaattttgttcagtcctgtgccggttattgcctggtttgttatcttcttcaggtgaaggaccgccataacgggaacattctgctcgacgctgaggggcacatcatccacattgacttcgggtttattctgagcagttcaccaaggaatctcggatttgagacatccgcttttaagttgaccacagagttcgtggatgttatgggtggcctggacggtgacatgtttaattactataaaatgctcatgctgcagggcctgatcgctgccaggaaacacatggacaaggttgtgcagatcgtggagatcatgcagcagggatctcagctgccctgtttccatgggtcatccactattcgtaatctgaaggagcggtttcatatgtccatgacggaagagcagctgcagctgctggtcgagcagatggtggacgggtcgatgagaagtataactacaaaattatatgatggttttcaatacctgaccaatggcatcatgtag

SEQ ID NO: 266464 - DNA, 1455 bp, Artificial Sequence
  derived and/or modified sequence
atggccatcggcaagcggctggccaccctgcccaccaaggagcagaagacacaaaggctcatatcagagctgtctttattaaatcataagcttcccgcacgggtgtggctgccaactgcagggttcgatcaccacgtcgtgcgggttccacacacacaagcagtcgtgctgaacagtaaggataaggcaccgtatctgatttacgtcgaggtcttagaatgtgaaaatttcgacacaacgtcagtgcccgccaggattcctgagaacagaatcagaagtacgcgctcagtggagaatttaccagagtgcggcatcactcacgagcaaagagccggcagctttagcacagtgccaaactacgacaacgacgacgaagcttggagcgtggatgacattggcgaactgcaggttgagctacctgaagtgcacaccaactcgtgtgataacatttcccagttctcagtagactccattacttctcaggaaagcaaggagccagtcttcatagctgctggcgatattcggcggcgtctctccgagcaattagcgcacacaccaacagctttcaaaagggatcccgaggaccctagcgcggtggcattgaaggagccctggcaggagaaggtacgaagaatccgagagggctcaccctacggccacttacccaattggcgacttttgtcagtgatagtgaaatgcggcgatgatttgcgccaggagctcttggcctttcaagtcctgaaacagctgcagtccatctgggagcaagagcgcgttcctctatggatcaaaccatataaaatccttgtaatttctgctgattccgggatgattgaacctgtggtgaacgctgttagcattcaccaggtgaagaaacagagccagctctcattgctggactacttcctccaggagcatggatcttataccactgaagcatttctttctgctcaaaggaattttgtccagagctgcgcaggatactgcctggtatgctacctgctgcaggttaaggacaggcacaatgggaatattctgctggacgctgaagggcacattatccacattgactttggattcatcctttcttcatcccctaggaaccttggctttgaaactagcgcatttaaactcacaacggaatttgtagatgtcatgggggggctggacggcgatatgtttaactactataagatgctgatgctgcagggactgatcgccgcacggaagcacatggataaagtggtgcagatcgtagaaatcatgcagcaggggagccagttgccctgttttcacgggtcatcaacaatcaggaatctcaaggaacgctttcatatgtcaatgaccgaggagcagctgcagctcctcgttgaacagatggtcgacggctcaatgcgttccatcaccacaaagctttatgacgggttccaatatctcactaacgggatcatgtag

SEQ ID NO: 266465 - DNA, 2406 bp, Artificial Sequence
  derived and/or modified sequence
atgggggataccgtcgtggagcccgctccactaaagcccacctccgagcctacaagcggacctcccggtaacaatggcggaagtctgctgagtgtcatcaccgaaggcgttggagagctatccgtgattgacccagaggtggcccaaaaggcctgtcaggaggttctggaaaaagtgaaactccttcacgggggagttgccgttagcagccgcggtacaccccttgagctagtgaacggcgacggtgtggacagcgaaatcaggtgtctggatgacccccctgctcagatcagggaagaggaagacgagatgggtgctgctgtggccagtggtacggcaaagggcgctcggcgacgcaggcagaacaactctgcgaagcagagctggttgttacggttgtttgagagcaaattgttcgacatctcgatggccatctcctacctgtacaattccaaggagcccggtgtgcaggcatacattggcaatcgcctcttctgtttccggaatgaggatgttgacttttatttgcctcagctcctgaatatgtatatacatatggacgaggatgttggggacgcgattaaaccctatatagtgcatagatgccgccagtctattaacttttcattgcagtgcgccttattactaggggcatactctagtgatatgcacatctccacccagagacacagccgtgggactaaactccgcaagttgattttgtcagatgagctaaagcctgcccatcgcaagagggagctgccctccctttcccctgctcccgataccggcttaagtccctctaagagaacacatcaaagatcaaagagcgatgctaccgcaagtatctcattgagcagcaatcttaagagaacagccagcaaccccaaggtggagaatgaagacgagcctgttcggttggccccagaacgagaatttattaagtcacttatggcaatcgggaagcggcttgctacactgccgaccaaggagcagaagacccagcgcctgatttccgagctcagcctgcttaaccacaagttgccagcccgtgtatggttgcccaccgccggattcgaccaccatgtcgtcagagtgcctcatacccaggctgttgtgcttaacagtaaggataaagcaccttatttgatttacgtggaggtgcttgaatgcgaaaattttgacacaacatcagtgcctgcacggatccctgagaatcggatacgctcaaccaggtcagtggagaatttgccagagtgcgggattacacatgagcagagagccggaagcttttccacggtgccaaattatgacaacgacgacgaggcttggtctgtagacgacattggtgaactgcaggtggagctgcccgaagtgcatacaaattcctgtgataacatttctcaattcagtgtcgatagtatcacgtcccaagagtcgaaggaaccggtgttcatagccgctggggatataagacggagattatcggagcagctggcccatacccccactgcgtttaagcgtgatccggaagaccctagcgctgttgcactgaaggagccttggcaagaaaaagtccgtcgaattcgggaaggcagtccctatggccatctgcctaactggaggttactgagtgtcatcgtcaaatgcggagacgacctgagacaggaattgctagccttccaagtactgaagcaactgcaatccatctgggagcaggagagagtcccactgtggattaagccatacaaaattcttgtgatctctgcggattcgggtatgatcgaaccagttgttaatgctgtgagcatccaccaggttaaaaagcagtcgcaactaagcctgctcgattactttctgcaggaacacggttcttacaccaccgaggctttcctgtcagcccagagaaattttgtgcagtcttgtgccggatactgcctggtgtgctatctcctgcaggtcaaagataggcataacggaaatattctgctggacgccgagggtcacatcatccatatcgacttcgggttcattctgtcctcttcacccaggaaccttggcttcgaaacctcagcatttaaactgacaaccgagttcgtggatgtgatggggggtctggatggagatatgttcaactattacaaaatgctgatgctgcaggggctgatcgctgcacggaaacatatggataaggtggtgcagatcgtggagatcatgcaacaggggtcacagctgccatgttttcatggatcttccaccattaggaacttgaaggaaaggtttcacatgagcatgaccgaagagcaactgcagctgctcgttgagcagatggtggatggcagtatgcggagcatcacaaccaagctctatgacgggtttcagtacttgaccaacggtattatgtag

SEQ ID NO: 266466 - DNA, 2406 bp, Artificial Sequence
  derived and/or modified sequence
atgggggataccgtggtggagccagctccacttaaacctacgagtgagcctacctcaggaccacccggtaacaatggaggttcccttttgagcgttattaccgagggcgtgggcgaactctccgtgatagatccggaggtcgcccagaaagcctgccaggaagttctggagaaagtgaaattgctgcatggaggggtggccgtctcatcaagagggactccgctggaattagtcaatggtgacggcgttgactctgagatccgctgtcttgatgaccctcctgctcaaattagggaggaagaggatgaaatgggggcagccgttgcaagcggtaccgcaaagggcgcacggaggagacggcagaacaattcggcaaagcagtcttggctcctaaggttgtttgaatccaagttatttgatatttcaatggctatctcttatctgtacaacagcaaggagcccggagtccaggcatatatcggcaatcgactgttttgctttcgtaacgaggacgtggatttctacttaccgcaattgcttaatatgtacattcacatggacgaggacgtgggagatgcgattaagccttatatagtccatcggtgtcggcagtctatcaatttctcactccagtgtgcgctgctactcggggcatacagttctgatatgcatattagcactcagcgccattctaggggcacgaaattgcggaagctaattcttagcgatgaacttaaaccagctcatagaaagcgcgagctgccatcattaagtccagcccctgacacagggctgagcccttctaaaagaacgcatcagcggtccaagtccgatgccacggcttctatttcactctcatctaatttaaaacggacagccagcaaccctaaagtggagaatgaagacgaaccagttaggctggctccagaacgggagtttattaaatctttgatggccattgggaaacgcctcgctacactgcccactaaagaacagaagactcagagactgatttccgaactgtctctgctaaatcataaacttcctgcccgagtgtggctaccaacggcaggcttcgaccatcatgtggtgcgggtgccccacactcaggccgtcgtcctcaatagcaaggacaaggccccatatctgatttacgtggaggtgctcgagtgcgagaattttgataccaccagtgtccctgcacggatccccgaaaaccggattcgttcaactaggtcagttgagaatcttccggagtgcggcattacccacgagcagagagccggttcctttagtacggttccgaattacgacaacgacgacgaggcgtggtctgtggatgacattggggagttgcaggttgagctgccggaggtacacactaactcttgcgacaatatctctcagttttctgtggactctattacctcacaggaatctaaggagcccgttttcattgcggcaggcgacattcgtagaaggctgtcagagcaactggcccatactcctacagccttcaaacgagatcccgaagatccttcagcagtagctctcaaggagccgtggcaggagaaagtgaggagaataagggagggcagcccttatggacatctcccaaactggagactgctgtcagtgattgtcaagtgcggagacgatttgaggcaggaactgcttgcctttcaagtcctaaagcagttacagtctatatgggagcaagagagagtccctctgtggataaaaccgtacaagattctggtaatcagcgccgattctggcatgatcgagccggtggtgaatgccgtgtcaatccatcaagtgaaaaagcagtcacagctgagcctgctcgactactttttgcaggagcatggcagctatacgaccgaagccttcttgtccgcacagcggaattttgtacagtcgtgtgccggatactgtctagtatgctatcttttgcaggtcaaggacagacataatgggaatatcctgcttgacgccgagggtcatataattcatattgacttcggcttcatcctaagtagctctccgagaaatctgggttttgagacctctgcctttaaactgacaaccgagtttgtggacgtgatggggggtttggatggcgacatgtttaactactacaagatgctgatgcttcagggacttatcgcggcacgcaagcacatggacaaggtggttcagattgtcgaaatcatgcagcagggctcccagctgccttgctttcacggcagtagtaccatcaggaacctcaaggaaaggtttcatatgagcatgaccgaggagcagttgcagttgttagttgagcaaatggtcgacggctctatgaggtctattactacaaaactgtatgacggctttcagtatttgactaacggcataatgtag

SEQ ID NO: 266467 - DNA, 1455 bp, Artificial Sequence
  derived and/or modified sequence
atggccatcggaaaaaggctcgctacactccccacaaaggagcaaaagacacagagactcattagtgagcttagcttgttaaaccataaactgcccgctagagtgtggctccctactgctgggttcgaccatcatgtggtgcgagttcctcatacgcaggctgtagtccttaactctaaagataaagctccgtacctgatctatgtggaagtactagagtgcgaaaactttgatacaaccagtgtcccagccaggattccagagaatcgtatccggtccaccaggtcagttgaaaatttgcccgagtgcggaattactcatgagcagagggccggttccttttcaaccgtgccaaattatgacaatgacgatgaagcgtggagcgtcgacgatatcggagaacttcaggtggagctgccagaggtgcacactaatagctgtgacaacatcagccagttctctgttgatagcatcactagtcaggagagcaaagaaccagtctttatcgccgcaggcgacatacgacgacgcctgagcgaacaactggcccatacacccactgccttcaagagggatcctgaagacccctctgcagttgcattgaaggagccctggcaagagaaagtgcgaaggatcagggagggatccccctatggccacctccccaattggcgcctgctgagcgtgattgtcaagtgcggcgacgatctgagacaagagttactagcctttcaggtgctgaaacagttacagtccatttgggaacaagaacgtgtgccgctgtggattaagccctacaagattctcgtgatatcggccgacagcggcatgatcgaacctgtggtcaatgcggtgagtattcaccaggtgaaaaaacaaagccaactgagtctgttagattactttttacaggaacacggctcctataccacagaggcatttctatctgcgcaacgaaactttgtccagtcttgcgccggatactgtctcgtctgctacctgctgcaagtgaaggatcgacacaacgggaatattcttctggatgcagaagggcacatcatccatattgattttggatttattttgtcctcatcccccagaaatttaggctttgaaactagcgcttttaagctgacaactgagttcgtagatgtcatggggggactagacggggatatgttcaattattacaagatgctaatgctgcagggacttattgccgctcgcaagcatatggataaggtcgtccagatcgtggagattatgcagcaagggtcgcagctcccctgcttccatggaagcagtacgatcaggaacctcaaagaaaggttccacatgtctatgaccgaggagcagctgcagctcttagtggaacagatggtggatggatcgatgcgctctattaccacaaagttgtatgacggcttccagtatttaaccaatgggatcatgtag

SEQ ID NO: 266468 - DNA, 1150 bp, Artificial Sequence
  derived and/or modified sequence
aagcgcaggcggccaatggaacccgggagcggtcgctgctgctgaggcggcagtgtcggcagtccaaccgcgactgcccgcaccccctccgcgggggtcccccagagagttgagtccacgctccatgagaatgctgaacaccatccaaagcagcaaattgagattccttgatttggggaagaggtttgggaggaacccttcaataattggcatgggacaagaggggacccagtccaagtgtatttgggactcgcagtagggaggaacaattcagagagagcttggaagctcgaagtctggctgtggccatgggagatacagtagtggagcctgcccccttgaagccaacttctgagcccacttctggcccaccagggaataatggggggtccctgctaagtgtcatcacggagggggtcggggaactatcagtgattgaccctgaggtggcccagaaggcctgccaggaggtgttggagaaagtcaagcttttgcatggaggcgtggcagtctctagcagaggcaccccactggagttggtcaatggggatggtgtggacagtgagatccgttgcctagatgatccacctgcccagatcagggaggaggaagatgagatgggggccgctgtggcctcaggcacagccaaaggagcaagaagacggcggcagaacaactcagctaaacagtcttggctgctgaggctgtttgagtcaaaactgtttgacatctccatggccatttcatacctgtataactccaaggagcctggagtacaagcctacattggcaaccggctcttctgctttcgcaacgaggacgtggacttctatctgccccagttgcttaacatgtacatccacatggatgaggatgtgggtgatgccattaagccctacatagtccaccgttgccgccagagcattaacttttccctccagtgtgccctgttgcttggggcctattcttcagacatgcacatttccactcaacgacactcccgtgggaccaagctacggaagctgatcctctcagatgagctaaagccagctcacaggaagagggagctgccctccttgagcccggcccctgacacagggctgtctccctccaaaaggactcaccagcgctctaagtcagatgccactgc

SEQ ID NO: 266469 - DNA, 2603 bp, Artificial Sequence
  derived and/or modified sequence
agattactatggaatcggtagggtcctgaccgctggggaagcaggaaagcgtatcctgggaagaaaggcttggcttggactccggagaagaatactacatcgagacctgctggggaattttattttattttattatttttttggtcttggttgtactgagggaggaagaagaggttgtgtggcccggtcgaacttgtggcagcctgaaggccccctcaggcggcgccgcgggcagccccgcagccggggcctggtgcagcctccgcggccgctgtcagggaagcgcaggcggccaatggaacccgggagcggtcgctgctgctgaggcggcagtgtcggcagtccaaccgcgactgcccgcaccccctccgcgggggtcccccagagcctgttcgactggctcctgagagagaattcatcaagtccctgatggcgatcggcaagcggctggccacgctccccaccaaagagcagaaaacacagaggctgatctcagagctctccctgctcaaccataagctccctgcccgagtctggctgcccactgctggctttgaccaccacgtggtccgtgtaccccacacacaggctgttgtcctcaactccaaggacaaggctccctacctgatttatgtggaagtccttgaatgtgaaaactttgacaccaccagtgtccctgcccggatccccgagaaccgaattcggagtacgaggtccgtagaaaacttgcccgaatgtggtattacccatgagcagcgagctggcagcttcagcactgtgcccaactatgacaacgatgatgaggcctggtcggtggatgacataggcgagctgcaagtggagctccccgaagtgcataccaacagctgtgacaacatctcccagttctctgtggacagcatcaccagccaggagagcaaggagcctgtgttcattgcagcaggggacatccgccggcgcctttcggaacagctggctcataccccgacagccttcaaacgagacccagaagatccttctgcagttgctctcaaagagccctggcaggagaaagtacggcggatcagagagggctccccctacggccatctccccaattggcggctcctgtcagtcattgtcaagtgtggggatgaccttcggcaagagcttctggcctttcaggtgttgaagcaactgcagtccatttgggaacaggagcgagtgcccctttggatcaagccatacaagattcttgtgatttcggctgatagtggcatgattgaaccagtggtcaatgctgtgtccatccatcaggtgaagaaacagtcacagctctccttgctcgattacttcctacaggagcacggcagttacaccactgaggcattcctcagtgcacagcgcaattttgtgcaaagttgtgctgggtactgcttggtctgctacctgctgcaagtcaaggacagacacaatgggaatatccttttggacgcagaaggccacatcatccacatcgactttggcttcatcctctccagctcaccccgaaatctgggctttgagacgtcagcctttaagctgaccacagagtttgtggatgtgatgggcggcctggatggcgacatgttcaactactataagatgctgatgctgcaagggctgattgccgctcggaaacacatggacaaggtggtgcagatcgtggagatcatgcagcaaggttctcagcttccttgcttccatggctccagcaccattcgaaacctcaaagagaggttccacatgagcatgactgaggagcagctgcagctgctggtggagcagatggtggatggcagtatgcggtctatcaccaccaaactctatgacggcttccagtacctcaccaacggcatcatgtgacacgctcctcagcccaggagtggtggggggtccagggcaccctccctagagggcccttgtctgagaaaccccaaaccaggaaaccccacctacccaaccatccacccaagggaaatggaaggcaagaaacacgaaggatcatgtggtaactgcgagagcttgctgaggggtgggagagccagctgtggggtccagacttgttggggcttccctgcccctcctggtctgtgtcagtattaccaccagactgactccaggactcactgccctccagaaaacagaggtgacaaatgtgagggacactggggcctttcttctccttgtaggggtctctcagaggttctttccacaggccatcctcttattccgttctggggcccaggaagtggggaagagtaggttctcggtacttaggacttgatcctgtggttggccactggccatgctgctgcccagctctacccctcccagggacctacccctcccagggaccgacccctggcccaagctccccttgctggcgggcgctgcgtgggccctgcacttgctgaggttccccatcatgggcaaggaagggaattcccacagccctccagtgtactgagggtactggcctagccatgtggaattccctaccctgactccttccccaaacccagggaaaagagctctcaattttttatttttaatttttgtttgaaataaagtccttagttagc

SEQ ID NO: 266470 - DNA, 1725 bp, Artificial Sequence
  derived and/or modified sequence
atgtccattcaggaaaacattagttccctgcagctcagatcatgggtcagcaaatcccagagggatctggcaaaatcgatactgatcggcgcccctggaggaccagcgggatatttaaggcgggcctcagtggcccagctgacccaggagcttggaacggccttttttcagcaacagcaactgcccgcggccatggcagacacttttctggagcatctgtgcctgttagacattgacagcgagcccgtcgccgctcgctctaccagcataattgccacaatcggaccagcttcacggtctgtcgagcgcctgaaggagatgatcaaggctgggatgaacatcgctagactgaatttctcccacggtagtcatgagtaccacgctgaatcgatagccaatgtgcgtgaagccgtggagtcattcgccggaagtcccctgtcctaccggcccgtggcaatcgcactggatacgaaagggccggagatcagaacgggaatcctacagggcggccctgagtctgaagttgagctggtgaagggatcacaagtcctagtgactgtcgaccctgcattccgaacccgcgggaacgccaacaccgtatgggtcgattatcctaatatcgttcgggtggtccccgtcgggggccgcatatacatagatgatggcttgatatcgctggtggttcagaaaatcgggcctgagggcctggtgacgcaagttgaaaatggcggagtgctcggcagcaggaagggggtaaacctacccggggcacaagtcgatctcccgggtttatcggaacaagacgtccgggaccttcggttcggcgttgagcatggcgttgacatagtgttcgcatccttcgtacgcaaagctagcgacgtcgcagccgtgagagctgccctaggtcctgagggtcatgggataaaaatcatatctaaaatcgaaaaccacgaaggcgtgaagagattcgacgagattctggaagtttccgacggcatcatggtggctaggggagacctcggcattgaaatcccagccgagaaagtattcctggcccaaaagatgatgattggaagatgtaatctcgctggcaaacctgtggtgtgcgcaacccaaatgctcgaaagcatgatcacgaaaccacgccccactcgcgcagaaacgagcgacgtagccaacgccgttctggacggagcggattgtattatgctctctggagagacagctaaagggaatttccccgtggaggcagtgaagatgcagcatgccatagcacgtgaggcagaggctgctgtgtaccatagacagctattcgaagaattgcggcgcgccgcccccctgtcccgtgatcccacagaagtcactgccattggcgctgtcgaggctgcatttaagtgctgtgccgctgctattatagtgctcacaacgaccggccggagcgctcagctgctatccagataccgtcctagggctgctgtcattgctgtgactcggagcgcacaggctgctagacaggtgcacctgtgccgcggggtgttcccattactgtatagagagccccctgaagccatatgggccgatgatgtggaccgcagggttcagtttggcatcgagagtggcaagcttcggggatttctgcgcgtgggcgacctggtaattgtcgtgacaggctggagaccagggagcggatacactaacatcatgcgagtgctcagcatatcttag

SEQ ID NO: 266471 - DNA, 1800 bp, Artificial Sequence
  derived and/or modified sequence
atgagcatacaagaaaatattagtagcctccagttgaggtcttgggtttcaaaatctcagcgagacctggccaagagcatcctcattggcgcccccggcgttccactgaccactcagcagtgtggcgccgacccccaaaggggaaggccccgagaggtctgctccggaatggagggacctgcgggatacctgagacgtgcttcagtagcccagctcactcaggaattgggtaccgccttttttcaacagcagcaactgcctgccgccatggcagacactttcctggagcatttgtgtctgcttgatattgactccgaaccagtcgcagccagatctacaagtatcatcgccaccatcggaccagccagcaggtcagtggaaagactgaaggaaatgattaaggcaggtatgaacattgccagattgaacttcagccacggatcacacgaataccatgcggagtccattgccaatgtgagagaggccgttgagtcgttcgccggttctccgctgagttaccggccagttgcaattgccttagatactaaagggccagagattcgtactggtattctgcagggcgggcccgagagtgaggtggagctagtgaaaggctctcaggtccttgtgaccgtcgatcccgccttcagaacccgtggtaacgccaacaccgtttgggtagactaccctaacatagtccgggtggtgcccgtgggaggaagaatctacatagatgatggactgattagtcttgtggttcagaagatcgggccagagggactggtgacacaggtggagaacggaggcgtcctcggctcacggaagggcgtgaatctccccggagctcaggtcgacttgccaggactgagcgagcaggatgtgagggatcttcgctttggagtagagcacggggttgacatcgtgttcgcctcctttgtaagaaaagcatccgatgttgctgctgtcagagctgccttggggccggaaggccacggcatcaagatcatttcaaagatcgagaaccatgaaggggtgaagcggttcgatgagatcctggaggtgagtgatggcatcatggtggccaggggtgatctcggaatcgaaatccctgccgaaaaggtgttcctggctcaaaaaatgatgataggcaggtgcaacctggctggaaagcctgtggtctgtgcaacccagatgcttgagtccatgattacaaaaccacggccaactagagcagagacttcggatgtggccaatgctgttctggacggagcagattgtatcatgttatccggcgagacagcaaagggtaactttcccgttgaagccgtaaagatgcagcacgccatcgctcgggaggccgaagctgcggtttatcatagacagctgtttgaggagctgcgacgtgccgcccctctgagccgcgatccgacggaggtaactgcaatcggggcagtcgaagcagccttcaagtgttgcgcagcggctattatcgttcttactactactggcaggtccgcgcagctcctgagtcgctatagacccagggctgctgttatagctgtgactcgctccgcgcaagccgcacgccaggtgcacctttgtaggggggtgtttcctctactctaccgggagcctccggaagccatttgggctgacgatgtggatcgacgtgtgcaatttggcatagaaagcggtaaactacgcgggttcctgagagtgggcgacttagtgatcgtcgtgactggatggagacccgggtctggatacacaaatattatgagggttctcagcataagctag

SEQ ID NO: 266472 - DNA, 1725 bp, Artificial Sequence
  derived and/or modified sequence
atgagcatccaggagaacatcagcagcctgcagctgcgctcctgggtgtccaagagccagagggacctggccaagagcatcctgattggagcccctgggggccctgctggctacctgcggcgggcctctgtggcccagctgacccaggagctgggcacagccttcttccagcagcagcagctgcctgctgccatggctgacaccttcctggagcacctgtgcctgctggacatcgacagcgagcctgtggccgcccggagcaccagcatcatcgccaccatcggccctgccagccgctctgtggagcggctgaaggagatgatcaaggccggcatgaacatcgcccggctgaacttcagccacggcagccatgagtaccacgccgagagcatcgccaacgtgcgggaggccgtggagagctttgctggcagccccctgagctacagacctgtggccatcgccctggacaccaagggccctgagatcagaacaggcatcctgcagggcggccctgagagcgaggtggagctggtgaagggcagccaggtgctggtgacagtggaccctgccttccgcaccagaggaaatgccaacacagtgtgggtggactaccccaacatcgtgcgggtggtgcctgtgggcggccgcatctacattgatgatggcctcatcagcctggtggtgcagaagattggccctgagggcctggtgacccaggtggagaatggaggagtgctgggcagcaggaagggcgtgaacctgcccggggcccaggtggacctgcccggcctgtctgagcaggatgtgcgggacctgcgcttcggcgtggagcacggcgtggacatcgtgtttgccagctttgtgaggaaggccagtgatgtggccgctgtgcgggccgccctgggccctgagggccacggcatcaagatcatcagcaagattgaaaatcatgaaggagtgaagagatttgatgagatcctggaggtgtctgatggcatcatggtggcccggggggacctgggcatcgagatcccagctgagaaggtgttcctggcccagaagatgatgattggccgctgcaacctggccggcaagcctgtggtgtgtgccacccagatgctggagagcatgatcaccaagccccggcccaccagggctgagaccagtgatgtggccaatgctgtgctggatggagctgactgcatcatgctgtctggagaaacagccaagggcaacttccctgtggaggccgtgaagatgcagcacgccatcgcccgggaggccgaggccgctgtgtaccaccggcagctgtttgaggagctgcggcgggccgcccccctgagccgggaccccacagaggtgacagccatcggggctgtggaggccgccttcaagtgctgtgccgccgccatcatcgtgctgaccaccaccggccgcagcgcccagctgctgagccgctaccggcccagggctgctgtgattgctgtgaccaggtctgcccaggccgcccggcaggtgcacctgtgccggggcgtcttccccctgctgtaccgggagcccccagaggccatctgggcagatgatgtggacagaagagtgcagtttggaattgaaagtggcaagctgcggggcttcctgcgggtgggggacctggtgattgtggtgacaggctggaggcctggcagcggctacaccaacatcatgagggtgctgagcatctcctag

SEQ ID NO: 266473 - DNA, 1800 bp, Artificial Sequence
  derived and/or modified sequence
atgagcatccaggagaacatcagcagcctgcagctgcgctcctgggtgtccaagagccagagggacctggccaagagcatcctgattggagcccctggggtgcccctgaccacccagcagtgtggggctgacccccagaggggccggccccgggaggtgtgcagcggcatggagggccctgctggctacctgcggcgggcctctgtggcccagctgacccaggagctgggcacagccttcttccagcagcagcagctgcctgctgccatggctgacaccttcctggagcacctgtgcctgctggacattgattctgagcctgtggccgcccggagcaccagcatcatcgccaccatcggccctgccagccgctctgtggagcggctgaaggagatgatcaaggccggcatgaacatcgcccggctgaacttcagccacggcagccatgagtaccacgccgagagcatcgccaacgtgcgggaggccgtggagagctttgctggcagccccctgagctacagacctgtggccatcgccctggacaccaagggccctgagatcagaacaggcatcctgcagggcggccctgagagcgaggtggagctggtgaagggcagccaggtgctggtgacagtggaccctgccttccgcaccagaggaaatgccaacacagtgtgggtggactaccccaacatcgtgcgggtggtgcctgtgggcggccgcatctacattgatgatggcctcatcagcctggtggtgcagaagattggccctgagggcctggtgacccaggtggagaatggaggagtgctgggcagcaggaaaggagtgaacctgcccggggcccaggtggacctgcccggcctgtctgagcaggatgtgcgggacctgcgctttggagtggagcacggcgtggacatcgtgtttgccagctttgtgaggaaggccagtgatgtggccgctgtgcgggccgccctgggccctgagggccacggcatcaagatcatcagcaagattgagaaccacgagggcgtgaagagatttgatgagatcctggaggtgtctgatggcatcatggtggcccggggggacctgggcatcgagatcccagctgagaaggtgttcctggcccagaagatgatgattggccgctgcaacctggccggcaagcctgtggtgtgtgccacccagatgctggagagcatgatcaccaagccccggcccaccagggctgagaccagtgatgtggccaatgctgtgctggatggagctgactgcatcatgctgagcggggagacagccaagggcaacttccctgtggaggccgtgaagatgcagcacgccatcgcccgggaggccgaggccgctgtgtaccaccggcagctgtttgaggagctgcggcgggccgcccccctgagccgggaccccacagaggtgacagccatcggggctgtggaggccgccttcaagtgctgtgccgccgccatcatcgtgctgaccaccaccggccgcagcgcccagctgctgagccgctaccggcccagggctgctgtgattgctgtgaccaggtctgcccaggccgcccggcaggtgcacctgtgccggggcgtcttccccctgctgtaccgggagcccccagaggccatctgggcagatgatgtggaccggcgggtgcagtttggcatcgagagcggcaagctgcggggcttcctgcgggtgggggacctggtgattgtggtgacaggctggaggcctggcagcggctacaccaacatcatgagggtgctgagcatctcctag

SEQ ID NO: 266474 - DNA, 1725 bp, Artificial Sequence
  derived and/or modified sequence
atgagcatccaggagaacatcagcagcctgcagctgcggagctgggtgagcaagtcccagagggatctcgccaagagtatccttataggcgcccccgggggacccgctggctatctacggcgagcctccgttgcacagctcacacaggagctgggtaccgcatttttccagcagcagcagctgccagctgccatggcagatacatttctggaacacctgtgtctactcgatatcgacagcgagccagtggcagcgcgctctactagtattattgctaccataggacccgcgtcccgtagtgttgagcggctgaaagaaatgataaaggcagggatgaacatcgccaggctgaatttttcccacggaagtcacgagtaccatgcagagagtattgccaacgttcgagaagctgtggagagctttgctggatctccactgtcttaccggcctgtggcgatcgcgttagatacgaaaggacccgaaatcagaaccggcatcctccaaggtgggccagaaagcgaggtcgagctcgtgaaaggatcccaggtgcttgtgaccgtcgatcccgcattccgaactcggggtaacgctaacactgtgtgggtggattaccccaatattgtccgggtcgtgcctgtgggcgggaggatctacatcgacgatggcctaattagcctagttgtgcagaaaattggccctgaagggctggtaacacaggtcgagaacggcggtgtcctgggcagtcgaaagggcgtcaatcttcccggagcccaagtcgatctccccggcttgtctgaacaggacgtgagggaccttagattcggcgtggagcatggagtagatattgtttttgcaagttttgtgcgcaaggccagcgacgtggcggccgtaagagccgccctcgggcctgaagggcatggcatcaagatcatctctaaaatcgagaatcatgagggagtgaagaggttcgacgaaatactcgaagtctccgacggcatcatggtagctcgaggcgacctaggtattgagattcctgcagagaaagtctttttagcacagaagatgatgataggtcgctgcaatctggccgggaagccagttgtatgcgcgacccaaatgcttgagtcaatgatcacaaaaccacgccccacgagggcagagacctcagatgtggcaaacgctgtattggatggcgctgattgtatcatgctgagcggagagacagccaagggcaactttcctgtggaggccgtgaaaatgcagcacgctatcgcccgcgaggccgaggctgccgtctaccacagacagctgtttgaggagctgcgcagagccgccccactgagccgagacccaaccgaggtgacggcaataggtgccgtcgaggctgccttcaagtgttgtgctgcagcgatcatagtgctaactactacaggaaggtcggcgcagctactgtcaagatacagacctagagctgcagtgatcgctgtgacccgatctgctcaggccgccagacaagttcacctgtgccgcggcgtgttccctctgctctatagggaaccgcctgaggcgatttgggccgatgacgttgacagacgggtgcaattcggtattgaaagcgggaaactcagaggcttcctgcgagttggggaccttgtgatcgtggtgacaggatggcgccctggatccggctacaccaatatcatgcgggttctgtcaatctcctag

SEQ ID NO: 266475 - DNA, 1800 bp, Artificial Sequence
  derived and/or modified sequence
atgagcatccaggagaacatcagcagcctgcagctgcggagctgggtctccaaatcccagcgagacctggcgaagtctatcttgattggcgccccaggagtaccactcacaactcaacagtgtggggctgaccctcagagagggcggcctcgagaggtgtgttcaggaatggagggcccggctggttatctgaggcgagccagcgttgctcagttgactcaagaattgggtacagctttttttcaacaacaacaactcccagctgctatggcagatacttttcttgaacatctgtgccttcttgacatcgatagcgagcccgtggctgcacggtctacgagcatcatcgctaccatcggtccagcaagtcggtctgtggagcggctgaaggagatgataaaagcagggatgaatatcgcccgcctgaacttcagccacggcagccacgagtatcacgccgaaagcattgcaaacgtgcgggaagctgtggaatcgttcgccgggtctccattatcctatagaccagttgcaatagcactggatacgaaggggcccgaaataagaaccggcattcttcaggggggccccgaaagtgaggttgaactggtgaaggggagtcaggtactagtgacggtggaccccgcttttaggaccagagggaacgctaacacagtctgggtcgactatccaaacattgttcgtgttgtgcccgttgggggccggatatatatagacgatgggctcattagtctagtcgtgcagaagatcggacccgaagggttggtcacccaggtcgagaacggcggagttctaggtagtcgcaaaggcgttaaccttccgggagcacaggtggatctccccggattgtcagagcaggacgtgcgagacctgagatttggcgtggagcacggagtcgacatagtgttcgcgtcatttgtacgcaaagcctctgacgtggcggccgtcagggctgcccttggacctgagggccatggtattaagattattagcaaaatagagaatcacgagggtgtgaaaagattcgatgagatcctcgaggtgagtgatggcattatggtcgcacgcggcgacctcggaatagagattcctgcagagaaggtgtttcttgctcaaaaaatgatgattggcagatgtaatttagcagggaagcctgtggtgtgtgccacccaaatgctggagagtatgattacaaaacccaggcccacgcgagcagaaaccagtgacgtggccaacgccgttttggacggggccgattgcatcatgctcagtggcgaaactgctaaagggaatttccccgtggaggccgtgaagatgcagcacgcaatcgctagggaggcagaggctgctgtgtaccacagacagctgttcgaggaactgaggcgggcagcccctttgagccgtgaccccactgaggtgacagcgatcggcgccgtggaggctgcatttaagtgctgtgcagctgcaattatcgtcctcactacaaccggacgatctgcacaactcctgtcccggtaccgtcctcgggcagccgtcatcgcagttactagaagcgctcaggccgccaggcaagtccacctatgccggggagtgttccccttactgtatcgtgaaccacccgaggccatttgggccgacgatgtcgaccggagagtccagtttggtatcgagtcaggtaagcttcggggatttctccgagtgggggacctcgtaatcgtcgttaccgggtggagacctgggtcgggctacacgaatattatgcgagtgttaagtatttcatag

SEQ ID NO: 266476 - DNA, 1725 bp, Artificial Sequence
  derived and/or modified sequence
atgagtattcaggagaatataagcagtctgcaattgagatcttgggtgtctaagtcccagcgcgatctggccaagtctatcctcatcggcgcaccgggaggaccagcaggatacctgcgacgggcttcagtggcccaacttacccaggaactgggcaccgccttcttccagcaacagcagctgccagcggcaatggccgacacgtttctcgagcacttgtgcctactggacattgattccgagcccgtggccgctaggtctactagcatcatcgccacaatcggaccggcatctagaagcgtagagcggctgaaagagatgattaaagctggtatgaacatcgcaaggctcaatttttcacatggatcgcacgaataccatgctgagtccatcgccaacgttcgcgaggcagtcgagtccttcgccggttcccctctcagctatcgtcccgtcgctatcgccttggacacaaaaggacctgaaatccgaacaggaatcctgcaaggcggtcccgagagcgaggtggagctcgtgaaaggttcgcaggtgttagtgacggttgatccagcctttagaaccaggggcaatgccaacactgtgtgggtggactatcccaacatcgtgcgcgtcgtaccagtaggcggaaggatttacatcgacgatggactgatctctcttgtcgtccagaagattggaccggagggcttggtcactcaggtcgagaacggcggagtgctcggatcccgaaaaggcgtgaatctccccggtgcccaggtggacctgccgggactgtcggaacaagatgtcagggacttgcggttcggagtcgagcatggagttgatattgttttcgcctccttcgtaagaaaggctagcgacgtggctgcagtccgagcagccctcgggcctgaagggcacggcatcaaaatcattagcaagattgagaaccacgaaggtgttaaacggtttgacgagatactggaagtgtctgatgggatcatggtggccaggggcgatcttggaattgagatacctgcagagaaggtttttttggctcaaaagatgatgatcggaaggtgcaatctggctggcaagcctgtcgtatgcgcaacacaaatgctagagtccatgattacgaagccccgacccacccgagccgaaacctccgatgtggcaaatgccgttctggacggagctgattgcatcatgctttccggcgagaccgcaaaaggaaattttccagtggaggccgtcaaaatgcagcatgcaatcgcgagggaggccgaagcagccgtgtaccatagacagttgttcgaggagctgaggcgcgctgctcccttatcccgggatccaactgaggtgactgcaatcggagccgtggaagcagcttttaagtgttgcgcagctgctattattgtcctgactaccacaggacgatcagcacaactcctctctcggtatcgacccagagccgctgttatcgctgtcaccagatcagcacaagcagccagacaagtgcacttatgcagaggcgtgtttccgctcttatatagggagccccctgaagccatctgggcagacgatgtcgataggcgtgtgcagttcggtattgaatccggaaagctgcggggattcttaagggtcggagacctcgtgatcgtcgtcactgggtggagaccagggtctgggtataccaacataatgagggtactgtctataagttag

SEQ ID NO: 266477 - DNA, 1800 bp, Artificial Sequence
  derived and/or modified sequence
atgtccatccaggaaaacatatctagcctgcagctcagaagctgggtttctaaaagtcagagggatttagccaagtccatcctcatcggtgcgccaggggtgccacttacgacacagcagtgtggggctgacccacagcgtggcagacctcgcgaagtatgttctggaatggaaggacctgcaggatatctcaggagagcatccgtggcacagctcacccaggaattagggactgcctttttccagcagcagcagctccccgctgccatggctgacacctttctcgagcacctgtgcctgctggatatcgattcggaacctgtggccgctagatccacttccattatcgcgaccattgggcctgcctccagaagcgtcgagagactgaaagagatgataaaggcagggatgaacatagctagactcaattttagccacggctcccatgagtatcatgccgaatccattgcgaacgttagagaagcagttgagagcttcgctggcagtcctctctcatataggcctgtggcgattgctcttgataccaagggcccagaaattaggacgggcatcctccaggggggacctgaaagcgaggtggagctggtgaaaggctcacaggtactggtgacagttgatcccgctttcagaactagagggaatgcaaatacggtgtgggtggattaccccaacatagttcgggtcgtccctgtgggtgggcgtatctacattgatgacggactcatttcgctggttgtgcagaaaataggccctgaaggtctcgtcacacaggtggaaaacggcggtgttctgggatccagaaagggggtgaatctccctggagcccaagtggatttgccgggactgtccgaacaggacgtcagagacctgagattcggagtagagcatggggtggacatcgtatttgccagcttcgtgagaaaggcaagcgacgtcgcggcagtgcgggctgctctgggtcccgagggtcacggcattaaaataatctccaagatagagaatcacgagggggtcaagagatttgatgaaatcttggaggtctccgatggaatcatggtggctcgcggagatttagggatcgagattcccgcagaaaaagtgttcttggcacagaagatgatgattggtcgttgtaacttagcaggaaagcccgtggtgtgtgctactcagatgctagagtcgatgatcaccaaaccccgtccgacccgcgctgagacttccgacgtcgctaacgcagtgctggatggcgctgattgcattatgttgtcgggcgagaccgccaaagggaattttccggtggaggctgtcaaaatgcagcatgcaatcgcgagagaggccgaggccgctgtctatcaccggcagctttttgaggagctgcggagagccgctcccctgtcccgcgaccccaccgaagttactgcgatcggtgctgtggaggccgctttcaagtgctgcgccgctgccataatcgtgctcacaacgactggtagatcggcccaactcctttccaggtacaggcctagggcagccgtgatagctgtgactagatcagctcaggcggcacgtcaggtgcatttatgccgaggtgtgttccccctcctgtacagggagcctcctgaagccatctgggcagatgacgttgatcgtagggtccagtttggtattgagtctggcaagctccgtggcttcttgagggtgggcgatttagtcatcgtcgtcacaggctggcgtcccggttccggttatacgaacatcatgagggtgctctccatttcttag

SEQ ID NO: 266478 - DNA, 1692 bp, Artificial Sequence
  derived and/or modified sequence
gacaacccaacagtgtggagcagacccacagagagggagacccagagaggtgtgcagtggcatggaagcagcagcagctgccagctgctatggcagacaccttcctggaacacctctgcctactggacattgactccgagcccgtggctgctcgcagtaccagcatcattgccaccatcgggccagcatctcgctccgtggagcgcctcaaggagatgatcaaggccgggatgaacattgcgcgactcaacttctcccacggctcccacgagtaccatgctgagtccatcgccctggacaccaagggaccggagatccgcactgggatcctgcaggggggtccagagtcggaagtggagctggtgaagggctcccaggtgctggtgactgtggaccccgcgttccggacgcgggggaacgcgaacaccgtgtgggtggactaccccaatattgtccgggtcgtgccggtggggggccgcatctacattgacgacgggctcatctccctagtggtccagaaaatcggcccagagggactggtgacccaagtggagaacggcggcgtcctgggcagccggaagggcgtgaacttgccaggggcccaggtggacttgcccgggctgtccgagcaggacgtccgagacctgcgcttcggggtggagcatggggtggacatcgtctttgcctcctttgtgcggaaagccagcgacgtggctgccgtcagggctgctctgggtccggaaggacacggcatcaagatcatcagcaaaattgagaaccacgaaggcgtgaagaggtttgatgaaatcctggaggtgagcgacggcatcatggtggcacggggggacctaggcatcgagatcccagcagagaaggttttcctggctcagaagatgatgattgggcgctgcaacttggcgggcaagcctgttgtctgtgccacacagatgctggagagcatgattaccaagccccggccaacgagggcagagacaagcgatgtcgccaatgctgtgctggatggggctgactgcatcatgctgtcaggggagactgccaagggcaacttccctgtggaagcggtgaagatgcagcatgcgattgcccgggaggcagaggccgcagtgtaccaccggcagctgtttgaggagctacgtcgggcagcgccactaagccgtgatcccactgaggtcaccgccattggtgctgtggaggctgccttcaagtgctgtgctgctgccatcattgtgctgaccacaactggccgctcagcccagcttctgtctcggtaccgacctcgggcagcagtcattgctgtcacccgctctgcccaggctgcccgccaggtccacttatgccgaggagtcttccccttgctttaccgtgaacctccagaagccatctgggcagatgatgtagatcgccgggtgcaatttggcattgaaagtggaaagctccgtggcttcctccgtgttggagacctggtgattgtggtgacaggctggcgacctggctccggctacaccaacatcatgcgggtgctaagcatatcctgagacgcccctccctcctctggcccagcctacccttgtaccccatcccttcctccccagtctacgttctccagcccacacccctccaaagccccacctttaagtcctctcttctctattcctgaccctccctacctga

SEQ ID NO: 266479 - DNA, 2083 bp, Artificial Sequence
  derived and/or modified sequence
cattccatggtcccgcagccccaggcccacactgaaagcatgtcgatccaggagaacatatcatccctgcagcttcggtcatgggtctctaagtcccaaagagacttagcaaagtccatcctgattggggctccaggagggccagcggggtatctgcggcgggccagtgtggcccaactgacccaggagctgggcactgccttcttccagcagcagcagctgccagctgctatggcagacaccttcctggaacacctctgcctactggacattgactccgagcccgtggctgctcgcagtaccagcatcattgccaccatcgggccagcatctcgctccgtggagcgcctcaaggagatgatcaaggccgggatgaacattgcgcgactcaacttctcccacggctcccacgagtaccatgctgagtccatcgccaacgtccgggaggcggtggagagctttgcaggttccccactcagctaccggcccgtggccatcgccctggacaccaagggaccggagatccgcactgggatcctgcaggggggtccagagtcggaagtggagctggtgaagggctcccaggtgctggtgactgtggaccccgcgttccggacgcgggggaacgcgaacaccgtgtgggtggactaccccaatattgtccgggtcgtgccggtggggggccgcatctacattgacgacgggctcatctccctagtggtccagaaaatcggcccagagggactggtgacccaagtggagaacggcggcgtcctgggcagccggaagggcgtgaacttgccaggggcccaggtggacttgcccgggctgtccgagcaggacgtccgagacctgcgcttcggggtggagcatggggtggacatcgtctttgcctcctttgtgcggaaagccagcgacgtggctgccgtcagggctgctctgggtccggaaggacacggcatcaagatcatcagcaaaattgagaaccacgaaggcgtgaagaggtttgatgaaatcctggaggtgagcgacggcatcatggtggcacggggggacctaggcatcgagatcccagcagagaaggttttcctggctcagaagatgatgattgggcgctgcaacttggcgggcaagcctgttgtctgtgccacacagatgctggagagcatgattaccaagccccggccaacgagggcagagacaagcgatgtcgccaatgctgtgctggatggggctgactgcatcatgctgtcaggggagactgccaagggcaacttccctgtggaagcggtgaagatgcagcatgcgattgcccgggaggcagaggccgcagtgtaccaccggcagctgtttgaggagctacgtcgggcagcgccactaagccgtgatcccactgaggtcaccgccattggtgctgtggaggctgccttcaagtgctgtgctgctgccatcattgtgctgaccacaactggccgctcagcccagcttctgtctcggtaccgacctcgggcagcagtcattgctgtcacccgctctgcccaggctgcccgccaggtccacttatgccgaggagtcttccccttgctttaccgtgaacctccagaagccatctgggcagatgatgtagatcgccgggtgcaatttggcattgaaagtggaaagctccgtggcttcctccgtgttggagacctggtgattgtggtgacaggctggcgacctggctccggctacaccaacatcatgcgggtgctaagcatatcctgagacgcccctccctcctctggcccagcctacccttgtaccccatcccttcctccccagtctacgttctccagcccacacccctccaaagccccacctttaagtcctctcttctctattcctgaccctccctacctgaggcctatctgagactataactgtcatctagccccttcgaggttgccccttccccatctccatttcacacaggtcctgaaagtctgtgtccaattatgcactggccacccaacagcaccaattgtacattccctgcatccaatctgctcagcaggccctaagatgccttgagtctttaatccca

SEQ ID NO: 266480 - DNA, 3116 bp, Artificial Sequence
  derived and/or modified sequence
cattccatggtcccgcagccccaggcccacactgaaagcatgtcgatccaggagaacatatcatccctgcagcttcggtcatgggtctctaagtcccaaagagacttagcaaagtccatcctgattggggctccaggagtgcctctgacaacccaacagtgtggagcagacccacagagagggagacccagagaggtgtgcagtggcatggaagggccagcggggtatctgcggcgggccagtgtggcccaactgacccaggagctgggcactgccttcttccagcagcagcagctgccagctgctatggcagacaccttcctggaacacctctgcctactggacattgactccgagcccgtggctgctcgcagtaccagcatcattgccaccatcgggccagcatctcgctccgtggagcgcctcaaggagatgatcaaggccgggatgaacattgcgcgactcaacttctcccacggctcccacgagtaccatgctgagtccatcgccaacgtccgggaggcggtggagagctttgcaggttccccactcagctaccggcccgtggccatcgccctggacaccaagggaccggagatccgcactgggatcctgcaggggggtccagagtcggaagtggagctggtgaagggctcccaggtgctggtgactgtggaccccgcgttccggacgcgggggaacgcgaacaccgtgtgggtggactaccccaatattgtccgggtcgtgccggtggggggccgcatctacattgacgacgggctcatctccctagtggtccagaaaatcggcccagagggactggtgacccaagtggagaacggcggcgtcctgggcagccggaagggcgtgaacttgccaggggcccaggtggacttgcccgggctgtccgagcaggacgtccgagacctgcgcttcggggtggagcatggggtggacatcgtctttgcctcctttgtgcggaaagccagcgacgtggctgccgtcagggctgctctgggtccggaaggacacggcatcaagatcatcagcaaaattgagaaccacgaaggcgtgaagaggtttgatgaaatcctggaggtgagcgacggcatcatggtggcacggggggacctaggcatcgagatcccagcagagaaggttttcctggctcagaagatgatgattgggcgctgcaacttggcgggcaagcctgttgtctgtgccacacagatgctggagagcatgattaccaagccccggccaacgagggcagagacaagcgatgtcgccaatgctgtgctggatggggctgactgcatcatgctgtcaggggagactgccaagggcaacttccctgtggaagcggtgaagatgcagcatgcgattgcccgggaggcagaggccgcagtgtaccaccggcagctgtttgaggagctacgtcgggcagcgccactaagccgtgatcccactgaggtcaccgccattggtgctgtggaggctgccttcaagtgctgtgctgctgccatcattgtgctgaccacaactggccgctcagcccagcttctgtctcggtaccgacctcgggcagcagtcattgctgtcacccgctctgcccaggctgcccgccaggtccacttatgccgaggagtcttccccttgctttaccgtgaacctccagaagccatctgggcagatgatgtagatcgccgggtgcaatttggcattgaaagtggaaagctccgtggcttcctccgtgttggagacctggtgattgtggtgacaggctggcgacctggctccggctacaccaacatcatgcgggtgctaagcatatcctgagacgcccctccctcctctggcccagcctacccttgtaccccatcccttcctccccagtctacgttctccagcccacacccctccaaagccccacctttaagtcctctcttctctattcctgaccctccctacctgaggcctatctgagactataactgtcatctagccccttcgaggttgccccttccccatctccatttcacacaggtcctgaaagtctgtgtccaattatgcactggccacccaacagcaccaattgtacattccctgcatccaatctgctcagcaggccctaagatgccttgagtctttaatcccagtttggctggttaattccataaccccaggcatcccatcccttggggtgggggagaggggagacagggcaatcttgtccacagtctcccattctcatatgtagccctcatgataatctgggcatctcgtgccagggcaggctaccccttcatggtgactaacagttacatgaaagtccacgcttttgggaaaactgggtgggatggatgctggggagaagtgagggctgggcagctgattttgtcactgtcttcacaacctccgtgctgggcttgtagaccactgtcctggctgctctcatgcctgcctgataccctgcttggtcaaatccccggctgcttccttctgcacccagaaattccttcccactcatgttgttcccacacacaaaccaagagccaaaaatgagtgtgtctattttatatttaaacccagctgtttggaagcaattataaaacttctcccacacaccaagaaccccagaactccccacccagaaggaaaggagacttagggtcctggtcccacagtctttaatgctgtagagtaggagaggggacaggcagagtgagggtggtaaaggactactcttgtccctgagaaggcagaggtgctggctggcctgcccttccccaggcttggataccttgggcctttcccttattcctgcaccaacagcaaactcagaaggaaaaaacaaaacaaaactctaaaggtaaacgcggtccttctccctctctcatgtggctcctcctgcccctacctgggagaaggttcaagtattgcgctgatgggtttgggcaaggaccacagaggctggcatggagaggccctgcctcctcctactcctcctgtctccttacctgaaaaggaggggagggatggataaaggaatgggtaaacaaaattaattggtaacacataaagttagtaaatgaataaatacaattaaataaatg

SEQ ID NO: 266481 - DNA, 1725 bp, Artificial Sequence
  derived and/or modified sequence
atgagcatccaggagaacatcagcagcctgcagctgagaagctgggtgagcaagagccagagagacctggccaagagcatcctgatcggcgcccccggcggccccgccggctacctgagaagagccagcgtggcccagctgacccaggagctgggcaccgccttcttccagcagcagcagctgcccgccgccatggccgacaccttcctggagcacctgtgcctgctggacatcgacagcgagcccgtggccgccagaagcaccagcatcatcgccaccatcggccccgccagcagaagcgtggagagactgaaggagatgatcaaggccggcatgaacatcgccagactgaacttcagccacggcagccacgagtaccacgccgagagcatcgccaacgtgagagaggccgtggagagcttcgccggcagccccctgagctacagacccgtggccatcgccctggacaccaagggccccgagatcagaaccggcatcctgcagggcggccccgagagcgaggtggagctggtgaagggcagccaggtgctggtgaccgtggaccccgccttcagaaccagaggcaacgccaacaccgtgtgggtggactaccccaacatcgtgagagtggtgcccgtgggcggcagaatctacatcgacgacggcctgatcagcctggtggtgcagaagatcggccccgagggcctggtgacccaggtggagaacggcggcgtgctgggcagcagaaagggcgtgaacctgcccggcgcccaggtggacctgcccggcctgagcgagcaggacgtgagagacctgagattcggcgtggagcacggcgtggacatcgtgttcgccagcttcgtgagaaaggccagcgacgtggccgccgtgagagccgccctgggccccgagggccacggcatcaagatcatcagcaagatcgagaaccacgagggcgtgaagagattcgacgagatcctggaggtgagcgacggcatcatggtggccagaggcgacctgggcatcgagatccccgccgagaaggtgttcctggcccagaagatgatgatcggcagatgcaacctggccggcaagcccgtggtgtgcgccacccagatgctggagagcatgatcaccaagcccagacccaccagagccgagaccagcgacgtggccaacgccgtgctggacggcgccgactgcatcatgctgagcggcgagaccgccaagggcaacttccccgtggaggccgtgaagatgcagcacgccatcgccagagaggccgaggccgccgtgtaccacagacagctgttcgaggagctgagaagagccgcccccctgagcagagaccccaccgaggtgaccgccatcggcgccgtggaggccgccttcaagtgctgcgccgccgccatcatcgtgctgaccaccaccggcagaagcgcccagctgctgagcagatacagacccagagccgccgtgatcgccgtgaccagaagcgcccaggccgccagacaggtgcacctgtgcagaggcgtgttccccctgctgtacagagagccccccgaggccatctgggccgacgacgtggacagaagagtgcagttcggcatcgagagcggcaagctgagaggcttcctgagagtgggcgacctggtgatcgtggtgaccggctggagacccggcagcggctacaccaacatcatgagagtgctgagcatcagctag

SEQ ID NO: 266482 - DNA, 1800 bp, Artificial Sequence
  derived and/or modified sequence
atgagcatccaggagaacatcagcagcctgcagctgagaagctgggtgagcaagagccagagagacctggccaagagcatcctgatcggcgcccccggcgtgcccctgaccacccagcagtgcggcgccgacccccagagaggcagacccagagaggtgtgcagcggcatggagggccccgccggctacctgagaagagccagcgtggcccagctgacccaggagctgggcaccgccttcttccagcagcagcagctgcccgccgccatggccgacaccttcctggagcacctgtgcctgctggacatcgacagcgagcccgtggccgccagaagcaccagcatcatcgccaccatcggccccgccagcagaagcgtggagagactgaaggagatgatcaaggccggcatgaacatcgccagactgaacttcagccacggcagccacgagtaccacgccgagagcatcgccaacgtgagagaggccgtggagagcttcgccggcagccccctgagctacagacccgtggccatcgccctggacaccaagggccccgagatcagaaccggcatcctgcagggcggccccgagagcgaggtggagctggtgaagggcagccaggtgctggtgaccgtggaccccgccttcagaaccagaggcaacgccaacaccgtgtgggtggactaccccaacatcgtgagagtggtgcccgtgggcggcagaatctacatcgacgacggcctgatcagcctggtggtgcagaagatcggccccgagggcctggtgacccaggtggagaacggcggcgtgctgggcagcagaaagggcgtgaacctgcccggcgcccaggtggacctgcccggcctgagcgagcaggacgtgagagacctgagattcggcgtggagcacggcgtggacatcgtgttcgccagcttcgtgagaaaggccagcgacgtggccgccgtgagagccgccctgggccccgagggccacggcatcaagatcatcagcaagatcgagaaccacgagggcgtgaagagattcgacgagatcctggaggtgagcgacggcatcatggtggccagaggcgacctgggcatcgagatccccgccgagaaggtgttcctggcccagaagatgatgatcggcagatgcaacctggccggcaagcccgtggtgtgcgccacccagatgctggagagcatgatcaccaagcccagacccaccagagccgagaccagcgacgtggccaacgccgtgctggacggcgccgactgcatcatgctgagcggcgagaccgccaagggcaacttccccgtggaggccgtgaagatgcagcacgccatcgccagagaggccgaggccgccgtgtaccacagacagctgttcgaggagctgagaagagccgcccccctgagcagagaccccaccgaggtgaccgccatcggcgccgtggaggccgccttcaagtgctgcgccgccgccatcatcgtgctgaccaccaccggcagaagcgcccagctgctgagcagatacagacccagagccgccgtgatcgccgtgaccagaagcgcccaggccgccagacaggtgcacctgtgcagaggcgtgttccccctgctgtacagagagccccccgaggccatctgggccgacgacgtggacagaagagtgcagttcggcatcgagagcggcaagctgagaggcttcctgagagtgggcgacctggtgatcgtggtgaccggctggagacccggcagcggctacaccaacatcatgagagtgctgagcatcagctag

SEQ ID NO: 266483 - protein, 773 aa, Artificial Sequence
  derived and/or modified sequence
MLSLLVWILTLSDTFSQGTQTRFSQEPADQTVVAGQRAVLPCVLLNYSGIVQWTKDGLALGMGQGLKAWPRYRVVGSADAGQYNLEITDAELSDDASYECQATEAALRSRRAKLTVLIPPEDTRIDGGPVILLQAGTPHNLTCRAFNAKPAATIIWFRDGTQQEGAVASTELLKDGKRETTVSQLLINPTDLDIGRVFTCRSMNEAIPSGKETSIELDVHHPPTVTLSIEPQTVQEGERVVFTCQATANPEILGYRWAKGGFLIEDAHESRYETNVDYSFFTEPVSCEVHNKVGSTNVSTLVNVHFAPRIVVDPKPTTTDIGSDVTLTCVWVGNPPLTLTWTKKDSNMGPRPPGSPPEAALSAQVLSNSNQLLLKSVTQADAGTYTCRAIVPRIGVAEREVPLYVNGPPIISSEAVQYAVRGDGGKVECFIGSTPPPDRIAWAWKENFLEVGTLERYTVERTNSGSGVLSTLTINNVMEADFQTHYNCTAWNSFGPGTAIIQLEEREVLPVGIIAGATIGASILLIFFFIALVFFLYRRRKGSRKDVTLRKLDIKVETVNREPLTMHSDREDDTASVSTATRVMKAIYSSFKDDVDLKQDLRCDTIDTREEYEMKDPTNGYYNVRAHEDRPSSRAVLYADYRAPGPARFDGRPSSRLSHSSGYAQLNTYSRGPASDYGPEPTPPGPAAPAGTDTTSQLSYENYEKFNSHPFPGAAGYPTYRLGYPQAPPSGLERTPYEAYDPIGKYATATRFSYTSQHSDYGQRFQQRMQTHV

SEQ ID NO: 266484 - DNA, 2322 bp, Artificial Sequence
  derived and/or modified sequence
atgctgagcctgctggtgtggatcctgaccctgagcgacaccttcagccagggcacccagaccagattcagccaggagcccgccgaccagaccgtggtggccggccagagagccgtgctgccctgcgtgctgctgaactacagcggcatcgtgcagtggaccaaggacggcctggccctgggcatgggccagggcctgaaggcctggcccagatacagagtggtgggcagcgccgacgccggccagtacaacctggagatcaccgacgccgagctgagcgacgacgccagctacgagtgccaggccaccgaggccgccctgagaagcagaagagccaagctgaccgtgctgatcccccccgaggacaccagaatcgacggcggccccgtgatcctgctgcaggccggcaccccccacaacctgacctgcagagccttcaacgccaagcccgccgccaccatcatctggttcagagacggcacccagcaggagggcgccgtggccagcaccgagctgctgaaggacggcaagagagagaccaccgtgagccagctgctgatcaaccccaccgacctggacatcggcagagtgttcacctgcagaagcatgaacgaggccatccccagcggcaaggagaccagcatcgagctggacgtgcaccacccccccaccgtgaccctgagcatcgagccccagaccgtgcaggagggcgagagagtggtgttcacctgccaggccaccgccaaccccgagatcctgggctacagatgggccaagggcggcttcctgatcgaggacgcccacgagagcagatacgagaccaacgtggactacagcttcttcaccgagcccgtgagctgcgaggtgcacaacaaggtgggcagcaccaacgtgagcaccctggtgaacgtgcacttcgcccccagaatcgtggtggaccccaagcccaccaccaccgacatcggcagcgacgtgaccctgacctgcgtgtgggtgggcaacccccccctgaccctgacctggaccaagaaggacagcaacatgggccccagaccccccggcagcccccccgaggccgccctgagcgcccaggtgctgagcaacagcaaccagctgctgctgaagagcgtgacccaggccgacgccggcacctacacctgcagagccatcgtgcccagaatcggcgtggccgagagagaggtgcccctgtacgtgaacggcccccccatcatcagcagcgaggccgtgcagtacgccgtgagaggcgacggcggcaaggtggagtgcttcatcggcagcacccccccccccgacagaatcgcctgggcctggaaggagaacttcctggaggtgggcaccctggagagatacaccgtggagagaaccaacagcggcagcggcgtgctgagcaccctgaccatcaacaacgtgatggaggccgacttccagacccactacaactgcaccgcctggaacagcttcggccccggcaccgccatcatccagctggaggagagagaggtgctgcccgtgggcatcatcgccggcgccaccatcggcgccagcatcctgctgatcttcttcttcatcgccctggtgttcttcctgtacagaagaagaaagggcagcagaaaggacgtgaccctgagaaagctggacatcaaggtggagaccgtgaacagagagcccctgaccatgcacagcgacagagaggacgacaccgccagcgtgagcaccgccaccagagtgatgaaggccatctacagcagcttcaaggacgacgtggacctgaagcaggacctgagatgcgacaccatcgacaccagagaggagtacgagatgaaggaccccaccaacggctactacaacgtgagagcccacgaggacagacccagcagcagagccgtgctgtacgccgactacagagcccccggccccgccagattcgacggcagacccagcagcagactgagccacagcagcggctacgcccagctgaacacctacagcagaggccccgccagcgactacggccccgagcccaccccccccggccccgccgcccccgccggcaccgacaccaccagccagctgagctacgagaactacgagaagttcaacagccaccccttccccggcgccgccggctaccccacctacagactgggctacccccaggccccccccagcggcctggagagaaccccctacgaggcctacgaccccatcggcaagtacgccaccgccaccagattcagctacaccagccagcacagcgactacggccagagattccagcagagaatgcagacccacgtgtag

SEQ ID NO: 266485 - DNA, 2322 bp, Artificial Sequence
  derived and/or modified sequence
atgctatctttgctggtgtggatccttactctttctgataccttttctcaagggacgcagactcgcttttctcaggagcctgccgaccaaaccgtggtagcgggacagcgggccgtgttgccatgcgttctgcttaactattccgggatcgtgcagtggaccaaggatggactggccctgggcatgggacagggactaaaagcgtggcccagataccgagttgttggctcggcggacgccgggcaatacaatctggaaatcactgatgcagagttatctgatgatgcatcatacgagtgccaggccaccgaggccgccctcaggagccgtagagcgaaacttacagtgttaatcccccccgaagatactcgaattgacggcggcccagtgatcctcctgcaggcaggcacaccccacaacctaacctgtagggcattcaatgccaagcctgctgcgactataatctggttccgggacgggacacagcaggagggcgcagtggcatccacagaacttttgaaagatggcaaacgtgagaccacggtgtctcagctgctgatcaaccctaccgatttagacattggcagagtatttacatgtcgctcaatgaacgaagccattcccagcggtaaggagactagtattgagttggacgtccatcatccccctaccgtcaccctctcaatcgagccccaaacagttcaggagggcgagagagttgtctttacgtgtcaggccacagcaaaccctgaaatcctcggataccggtgggctaaggggggctttttaattgaggatgcccatgagtcccggtacgaaacgaacgtcgactactctttttttaccgaacctgttagttgtgaggtccacaacaaagtgggatccacaaatgtgagtactcttgtcaacgtgcacttcgccccgaggatagtggtggaccccaagcctacaacaacggatatcggctccgacgtcactctgacttgcgtgtgggtaggaaacccacctttaactctcacgtggacaaagaaggattcaaatatgggaccaagacccccaggatcgccgcccgaggctgccctctcagcacaggtcctcagcaacagcaaccagctgcttctgaagtcagtgactcaggcggacgcgggaacctacacatgtagagccatcgttcctaggataggggtggccgaacgagaagtgccattgtatgtcaacgggccgccaatcattagttccgaggcagtccaatatgccgtgaggggcgatggaggaaaagtggagtgcttcattggttccacccccccgccggacagaattgcctgggcatggaaggaaaacttccttgaggtaggcaccctggaacggtacaccgtagaacgaactaactccgggagcggagtactttctactcttacaataaacaatgtaatggaggccgatttccaaacacactacaactgcactgcatggaactccttcggtcctgggacagcaataattcagcttgaagagagagaagtcctgcccgtgggcatcattgccggagcgaccatcggggcctcgattctcttgattttttttttcatcgccctcgttttcttcctgtaccgccgcagaaaaggatccagaaaggacgttacactgcggaagctcgatatcaaggtggaaacagtgaacagagagccactcactatgcattccgaccgagaggacgatactgccagcgtgtctacggctacaagagtgatgaaagccatctacagcagctttaaagacgatgtggacctcaagcaagatttaaggtgtgatactatcgatacaagggaggaatacgagatgaaagaccccacgaacggatactacaacgtgagagcacatgaggaccgacccagctcccgggcagtactgtacgctgactacagggcccccggacctgcgcgttttgatggtagaccctccagcaggctgtctcattcttctggttacgcacagcttaacacatattcccgcggtcccgcatcggattatggaccagagccaaccccccccgggcccgctgctcccgcaggcactgatactacgtcacagcttagctacgagaactatgaaaagttcaattctcaccctttccccggcgcagctggctaccccacataccggctgggttacccccaggccccgccatctgggctggaacggacgccttatgaggcttatgacccgattgggaaatatgccacggcaacacggttctcctacaccagccagcacagcgattacggccaacggttccagcagaggatgcagacccacgtatag

SEQ ID NO: 266486 - DNA, 3654 bp, Artificial Sequence
  derived and/or modified sequence
ggcgccgtcggagggagagtagacgtcaggcggagggagggaggcaggcaggcagggaggcagggagggagagagggaaggaagagaaggggagagaaagggggagcaaagaccgaaagagacccagagagatacagcttgagaggagaaataattaaagggggagggcgaccaggaggagaaaaaggtctgggaggaaagagagataaagagaatcggagggcagggaaatgagtttgtgcgcgtgagtgtgcgcgcgcgcgtgtgtgtgtgcaggggcgggcgcgggcgggcggggggcgggctcccgggctcccgggctcccctcctccccagcccgctcctctggctcgctcgccaactccgggccccagccgcgggcgggcgcacggcgggcggacagcatgctgagcctcctcgtctggatcctcactctctccgatactttctcccaagggacccagacccgcttcagccaggagccagctgaccagacggtggtggctggacagcgggccgtgctcccctgtgtgctgctcaactactctggaattgtgcaatggaccaaggacgggctggccctgggcatgggccagggcctcaaagcctggccacggtaccgggttgtgggctccgcagacgctgggcagtacaacctggagatcacagatgctgagctctctgacgacgcctcttacgagtgccaggccacggaggccgccctgcgctctcggcgggccaaactcaccgtgctcatccccccagaggacaccaggattgacggaggccctgtgattctactgcaggcaggcaccccccacaacctcacatgccgggccttcaatgcgaagcctgctgccaccatcatctggttccgggacgggacgcagcaggagggcgctgtggccagcacggaattgctgaaggatgggaagagggagaccaccgtgagccaactgcttattaaccccacggacctggacatagggcgtgtcttcacttgccgaagcatgaacgaagccatccctagtggcaaggagacttccatcgagctggatgtgcaccaccctcctacagtgaccctgtccattgagccacagacggtgcaggagggtgagcgtgttgtctttacctgccaggccacagccaaccccgagatcttgggctacaggtgggccaaagggggtttcttgattgaagacgcccacgagagtcgctatgagacaaatgtggattattcctttttcacggagcctgtgtcttgtgaggttcacaacaaagtgggaagcaccaatgtcagcactttagtaaatgtccactttgctccccggattgtagttgaccccaaacccacaaccacagacattggctctgatgtgacccttacctgtgtctgggttgggaatccccccctcactctcacctggaccaaaaaggactcaaatatggggcccaggcctcctggctccccacccgaggctgctctctctgcccaggtcctgagtaacagcaaccagctgctgctgaagtcggtgactcaggcagacgctggcacctacacctgccgggccatcgtgcctcgaatcggagtggctgagcgggaggtgccgctctatgtgaacgggccccccatcatctccagtgaggcagtgcagtatgctgtgaggggtgacggtggcaaggtggagtgtttcattgggagcacaccacccccagaccgcatagcatgggcctggaaggagaacttcttggaggtggggaccctggaacgctatacagtggagaggaccaactcaggcagtggggtgctatccacgctcaccatcaacaatgtcatggaggccgactttcagactcactacaactgcaccgcctggaacagcttcgggccaggcacagccatcatccagctggaagagcgagaggtgttacctgtgggcatcatagctggggccaccatcggcgcgagcatcctgctcatcttcttcttcatcgccttggtattcttcctctaccggcgccgcaaaggcagtcgcaaagacgtgaccctgaggaagctggatatcaaggtggagacagtgaaccgagagccacttacgatgcattctgaccgggaggatgacaccgccagcgtctccacagcaacccgggtcatgaaggccatctactcgtcgtttaaggatgatgtggatctgaagcaggacctgcgctgcgacaccatcgacacccgggaggagtatgagatgaaggaccccaccaatggctactacaacgtgcgtgcccatgaagaccgcccgtcttccagggcagtgctctatgctgactaccgtgcccctggccctgcccgcttcgacggccgcccctcatcccgtctctcccactccagcggctatgcccagctcaacacctatagccggggccctgcctctgactatggccctgagcccacaccccctggccctgctgccccagctggcactgacacaaccagccagctgtcctacgagaactatgagaagttcaactcccatcccttccctggggcagctgggtaccccacctaccgactgggctacccccaggccccaccctctggcctggagcggaccccatatgaggcgtatgaccccattggcaagtacgccacagccactcgattctcctacacctcccagcactcggactacggccagcgattccagcagcgcatgcagactcacgtgtaggggccagagcctggctggggcatctctgcggggcagaggagaaggctttcacagctgttccctgatattcaggggcattgctcattgctcccttctcggaccagccttcttcctcccaccatggcaggtggggagcaggtctcccagaaacaccccgtcccgaggatggtgctctgtgcatgccccagcctcctgggcctgcccttccctcttcttcgggaggatgtgtctcttctgacctgcactcttgcctgaccctagaatggggacagggaaagtgaaggttagggaaagcagaggggggcactttttagcattccctttctatcccacccctctgatctcccataagtggaaatgggggtacccagggatgggcaggctttggcctagggacatgaagtatgggagtgggtggctgtggcacagacaggtggaaaacgggatagcctggccagtccctctgttgtctgcattcgtgccctgggtgcctctctccttcctcagggtactgcagaagggagcgaacagggtactgttcgctcttgtctacagaacagccctggcactgcattcaaatccagtcttcattcagctgggatcaaaatgccagtcaccttggctacccactgtggacagctgtctgtcagcatgcagagggatccaggaatccccccggcagcacggcccgctttccttctcctccatgctgggccagccagataagtcagggtcctggtggagaaagaaaggctaggaccatgtcctcattgacccagatactgctgtgtgctgcacagcagtgaaccaacactagagggagccacacaagcctcctctccccagtctgccccacttcctggctttaactcttgagctggtttggggagtggtgaggtaggggtgggggtgctgtaggctctttttc

SEQ ID NO: 266487 - DNA, 2322 bp, Artificial Sequence
  derived and/or modified sequence
atgctgagcctgctggtgtggatcctgaccctgagtgacaccttcagccagggcacccagacccgcttcagccaggagcctgctgaccagacagtggtggccggccagagagctgtgctgccctgtgtgctgctgaactacagcggcatcgtgcagtggaccaaggatggcctggccctgggcatgggccagggcctgaaggcctggccccgctacagagtggtgggcagcgcagatgctggccagtacaacctggagatcacagatgctgagctgagtgatgatgccagctatgagtgccaggccacagaagctgccctgcggagccggcgggccaagctgactgtgctgatccccccagaggacaccagaattgatggcggccctgtgatcctgctgcaggccggcaccccccacaacctgacctgccgggccttcaatgccaagccagctgccaccatcatctggttcagagatggcacccagcaggagggcgctgtggccagcacagagctgctgaaggatggcaagcgggagaccaccgtgtcccagctgctgatcaaccccacagacctggacatcggccgggtcttcacctgccgctccatgaatgaggccatccccagcggcaaggagaccagcattgagctggatgtgcaccacccccccaccgtgaccctgagcattgagccccagacagtgcaggagggggagcgggtggtgttcacctgccaggccacagccaaccctgagatcctgggctaccgctgggccaagggcggcttcctgattgaagatgcccacgagagccgctatgagaccaacgtggactacagcttcttcacagagcctgtgtcctgtgaggtgcacaacaaggtgggcagcaccaacgtgtccaccctggtgaatgtgcactttgccccccgcatcgtggtggaccccaagcccaccaccacagacattggaagtgatgtgaccctgacctgtgtgtgggtgggcaacccccccctgaccctgacctggaccaagaaggacagcaacatgggcccccggcccccaggcagccccccagaggccgccctgagcgcccaggtgctgagcaacagcaaccagctgctgctgaagtctgtgacccaggctgatgctggcacctacacctgccgggccatcgtgccccgcatcggcgtggccgagcgggaggtgcccctgtatgtgaatggcccccccatcatcagcagcgaggccgtgcagtatgctgtgagaggagatggcggcaaggtggagtgcttcatcggcagcaccccacctccagaccgcatcgcctgggcctggaaggagaacttcctggaggtgggcaccctggagcgctacacagtggagaggaccaacagcggcagcggcgtgctgagcaccctgaccatcaacaacgtgatggaggccgacttccagacccactacaactgcacagcctggaacagctttggacctggaacagccatcatccagctggaggagcgggaggtgctgcctgtgggcatcatcgccggggccaccatcggggccagcatcctgctgatcttcttcttcatcgccctggtgttcttcctgtacagaagaaggaagggcagcaggaaggatgtgaccctgaggaagctggacatcaaggtggagaccgtgaaccgggagcccctgaccatgcacagcgacagagaagatgacacagcctctgtgtccacagccaccagggtgatgaaggccatctacagcagcttcaaggatgatgtggacctgaagcaggacctgcgctgtgacaccatcgacacccgggaggagtatgagatgaaggaccccaccaacggctactacaacgtgcgggcccacgaggaccggcccagcagcagagctgtgctgtatgctgactaccgggcccctggccctgccaggtttgatggccggcccagcagccggctgagccacagcagcggctacgcccagctgaacacctacagccggggccctgccagtgactatggccctgagcccaccccacctggccctgctgccccagctggaacagacaccaccagccagctgtcctatgaaaattatgagaagttcaacagccaccccttccctggagctgctggctaccccacctaccgcctgggctacccccaggccccacccagcggcctggagaggaccccctatgaggcctatgaccccatcggcaagtatgccacagccacccgcttctcctacaccagccagcacagcgactatggccagcgcttccagcagaggatgcagacccacgtgtag

SEQ ID NO: 266488 - DNA, 2322 bp, Artificial Sequence
  derived and/or modified sequence
atgctgagcctgctggtgtggatcctgaccctgagcgacaccttctcacaaggaacacagaccaggttctcacaggagcccgctgatcaaaccgttgttgcgggccagagagcagttctgccctgcgtgctcctcaattatagcggcatcgtgcagtggactaaggacggcctggcactcggcatgggacaaggactgaaagcctggcccaggtacagggtcgtgggaagtgctgatgccggccagtacaacttagagatcactgacgccgaactgtcagatgacgcttcctatgagtgccaggccacagaagcggcgttgcggtcccgaagggctaagctaactgtcctgatccctcccgaggacacccgcatcgacggaggtcctgttatcttactgcaggcgggcacaccacacaacctaacctgtagggctttcaacgctaagccagcggcgaccataatttggtttagggacggcacacagcaggaaggtgcagtagcatcgactgagctcttgaaagatggcaagagggagactactgtgtcccaactcctgatcaacccaaccgacctcgatatcggccgggtcttcacctgcaggtcaatgaacgaagccattccatctggtaaggagaccagcatcgaactggatgtccaccaccctccgactgtaactctgtccattgaaccccaaaccgtccaagaaggagagcgcgtggtatttacatgtcaggccactgcaaacccagaaatcttgggatacagatgggctaagggcgggttcctgattgaagacgcacacgagtcccggtacgaaacaaacgtggattactcttttttcacagagcctgtgagttgtgaagttcataataaggtggggtctaccaatgttagcactctggtgaatgtgcactttgcccccagaattgtggtggatcctaagcctaccactaccgatattggaagcgatgtgaccctgacctgcgtgtgggtggggaatcctccgttgactttaacttggacaaaaaaagatagcaacatgggaccacgcccacccggctcgccccccgaggccgctttgtcggctcaggtcctctctaattccaatcagttgctcttaaagagcgtcacacaggccgacgcgggcacctacacttgtagagcgattgttcccaggataggtgtggcagagagagaagttcccctgtatgtaaatgggcccccgatcatcagttctgaggccgtacagtatgctgtcagaggagatggaggcaaagtagaatgttttattggtagtacacctccccccgatagaattgcctgggcctggaaagagaattttcttgaagttggcaccctggaaaggtataccgtggaacgcaccaacagtggtagtggggtcctgtcaactttgaccattaacaatgtaatggaggcagattttcaaacccattataactgtacagcctggaacagcttcgggcctgggaccgcaatcatccaattagaggaaagagaagtcctacccgttggtatcattgcaggcgctactatcggggctagcatcctgcttatcttcttctttattgcccttgtcttcttcctctacagacgccgcaagggttcccgcaaagacgtgacactccgcaagttggacatcaaggtggaaactgtgaatagagagcctctcacgatgcacagtgacagggaggacgacaccgcctccgtttctactgcgacaagggtgatgaaggcgatatatagctccttcaaagacgacgttgatctgaaacaagacctgagatgcgacactattgacacaagggaggagtacgagatgaaagatcctaccaacggttattacaacgtgagggcccacgaggatcggccctcctcacgggccgtcctgtatgccgattatcgcgcgccagggcctgcacgattcgacgggcgcccatcttcaagactgtcccactccagcgggtatgctcagttaaacacgtatagccgtggtcccgcgagcgactacggcccggagcccaccccgcccggaccggctgccccagctggcacggataccacatcccagctgtcctatgaaaactacgaaaagtttaactctcacccattccctggagccgcgggttacccaacatatagactgggataccctcaggcacctccgtcaggcctggaaagaacaccatacgaagcgtatgaccccattggaaagtacgccactgctactcgtttcagttatacctctcaacattccgattacggtcagcgctttcagcagcggatgcagacccacgtgtag

SEQ ID NO: 266489 - DNA, 2322 bp, Artificial Sequence
  derived and/or modified sequence
atgttgagcctccttgtatggattctaaccctttctgacacattctcacaagggactcagacacgtttctctcaggagcctgctgatcaaactgtggtcgccggtcagcgtgcggtgctcccatgcgtgctgttaaattacagtggaattgtgcagtggacaaaggatgggctggcactgggaatgggacagggcctcaaagcatggcctcggtaccgcgtcgttggatcagcggatgcaggccagtacaatttggagatcaccgacgctgagctgagcgacgacgcctcttatgaatgccaggccacagaagcagctctgaggtcacgcagagccaaactcaccgtccttattccgcctgaggatacaagaattgatgggggtcctgtcatactgctccaggcgggaacaccgcataacttgacctgtagagccttcaacgctaagccagccgcaactataatctggtttcgcgacggcacacaacaggagggcgctgtcgcaagcactgagcttttgaaggacggtaaacgcgaaactacagtttcccaattgctgattaaccccacggatctagacatcggtagagtgttcacttgcagaagtatgaatgaggcgattccatctggtaaggagacatcaattgagctcgatgtgcaccacccacccacggtcacgttgagcatcgaacctcagaccgtccaggagggtgagcgagtggtctttacgtgccaggccactgcaaaccccgagatcctgggttacagatgggctaaagggggatttctgattgaggatgcgcatgaatcccgctacgaaacaaatgtggattatagcttctttaccgaaccggtcagttgcgaggtgcacaacaaggtgggatccaccaacgtttcaacgctggtcaatgtgcactttgccccacggatcgtcgtggatcctaaaccaacaaccacggatattgggagcgacgtaaccctaacttgtgtgtgggttgggaatccccctctgaccctgacctggacaaagaaggattcaaacatgggacccagaccaccagggtcaccaccagaagctgcattgtcagcccaagttctgagtaacagcaatcaactgttgctgaagagcgtgacccaggccgacgctgggacctacacgtgtagggccatcgtgcctcgcattggcgtggccgagcgggaggtgcccctgtatgtgaacgggccacctattatttcctctgaagccgttcagtacgctgtgcggggtgacggagggaaagtcgaatgtttcataggctccacacccccacccgataggatagcctgggcctggaaggagaatttcctggaggtggggaccttggaaaggtacactgtagagcggactaattcgggatctggggtactctccaccctaaccatcaacaatgtgatggaggcagattttcagacccactataattgcaccgcttggaattccttcggcccaggcactgcaatcatccagcttgaggagagagaagtgcttcctgtcggtattattgccggtgctaccataggagcatccatactgctgattttcttctttatcgccttggtattctttttataccggcgaaggaaaggaagccgcaaagacgtcaccctgagaaagctggacattaaagtagagacagtcaatcgagagccattgacgatgcactcagatagggaggatgacaccgcaagtgttagcaccgcaacaagggtgatgaaagctatatatagcagtttcaaggatgatgtcgacctgaagcaggaccttagatgtgataccatagacaccagagaggaatacgagatgaaagatccaaccaatgggtactataatgttagggcacatgaggacagaccctcttcacgtgccgttctatacgcagactatcgggctccaggacctgctcgattcgacgggaggccgagctcacgtttgtcacatagtagcgggtacgcccaattgaacacatactctaggggccctgcttctgattacgggcctgaacctacacctccagggccagcagcacccgcaggcacagacaccacttcacagctgtcttacgagaactatgagaagtttaacagccatcctttccccggtgcagctgggtatcctacctatcggcttggatatcctcaggcccctccttccggccttgagcgaacaccctacgaagcgtatgacccaattgggaaatacgccacagccactaggttctcttacacaagccagcatagtgactacggccagagatttcagcagaggatgcagacacatgtttag

SEQ ID NO: 266490 - protein, 467 aa, Artificial Sequence
  derived and/or modified sequence
MLAPAFPPPLLLPPPTGDPRLQPPPPLPFGLGGFPPPPGVSPAEAAGVGEGLGLGLPSPRGPGLNLPPPIGGAGPPLGLPKPKKRKEPVKIAAPELHKGDSDSEEDEPTKKKTILQGSSEGTGLSALLPQPKNLTVKETNRLLLPHAFSRKPSDGSPDTKPSRLASKTKTSSLAPVVGTTTTTPSPSAIKAAAKSAALQVTKQITQEEDDSDEEVAPENFFSLPEKAEPPGVEPYPYPIPTVPEELPPGTEPEPAFQDDAANAPLEFKMAAGSSGAPWMPKPGDDYSYNQFSTYGDANAAGAYYQGLQQHLGHSPLRGIMRFLNSKSGKRTCFVPSFDYYSGGYYPAQDPALVPPQEIAPDASFIDDEAFKRLQGKRNRGREEINFVEIKGDDQLSGAQQWMTKSLTEEKTMKSFSKKKGEQPTGQQRRKHQITYLIHQAKERELELKNTWSENKLSRRQTQAKYGF

SEQ ID NO: 266491 - DNA, 1404 bp, Artificial Sequence
  derived and/or modified sequence
atgttagcaccagcattccccccacctctgttactgccgcctcccaccggcgatccccgactccagccacctcctccactgccatttggcctgggtggattccctcctcccccaggagtatcccctgccgaagcagcaggggtgggagagggccttggcctcggtttgccttctccgcggggtcctggcttgaatcttcccccacctattggaggggcgggtccccctctggggttgcccaagcccaaaaagcggaaggagccggttaagattgccgcgcctgagctgcataagggtgactcagacagcgaggaggacgagcccaccaaaaagaagaccattttacagggcagtagcgaggggaccggcttgagcgccctgttgccgcagccgaagaatcttacagttaaagagaccaatagattactcctgccacatgcgttctcaaggaaacccagtgacggcagcccggacaccaaacctagtcgactggcctccaagacaaagacctcaagcttggctcctgtcgtgggcactactacaaccaccccatctcccagcgctatcaaggcagcagcgaagtccgccgcactccaggtcaccaagcagatcactcaggaggaagatgattcagatgaagaggtggccccagagaatttcttttcattgccggagaaggccgagccccctggagtggagccttatccttacccaatccctactgtgcctgaagagctcccgccaggcaccgaacccgagcccgctttccaggatgatgctgctaacgcgccgctcgagttcaaaatggctgctggatcatctggtgccccatggatgccaaagcctggagacgattatagttacaatcagttttctacctacggagacgcgaatgcagctggcgcctactaccagggcttacagcagcatctgggacatagtcccctgaggggaatcatgcgatttctcaattcaaagtccggtaagagaacttgcttcgtgccgagttttgattactacagcggaggatattacccggcacaggatccggccctggttcccccgcaggaaattgctccggacgcaagctttattgatgacgaagccttcaaaaggctccaggggaagcgcaacagaggccgggaagagataaatttcgttgagattaagggagacgatcaattatctggggctcagcagtggatgaccaagagtctgaccgaggagaagacaatgaaaagcttcagcaaaaaaaagggagagcagcctacgggacaacagcgcaggaaacatcagatcacttatctgatccatcaggccaaggaacgggagctcgaactcaaaaacacatggtcagagaataagctgagccgccggcaaacacaggcgaagtacggcttttag

SEQ ID NO: 266492 - DNA, 1404 bp, Artificial Sequence
  derived and/or modified sequence
atgctggccccagccttccccccacccctgctgctgcccccacccaccggggacccccggctgcagcccccaccacccctgcccttcggcctgggcggcttccccccacctcctggggtgtccccagctgaggccgccggcgtgggggagggcctgggcctgggcctgcccagcccccggggccctggcctgaacctgcccccacccatcggcggggccggcccccccctgggcctgcccaagcccaagaagaggaaggagcctgtgaagattgctgcccctgagctgcacaagggggacagcgacagtgaagaagatgagcccaccaagaagaagaccatcctgcagggcagcagcgagggcaccggcctgagcgccctgctgccccagcccaagaacctgactgtgaaggagaccaaccggctgctgctgccccacgccttcagcaggaagcccagtgatggcagcccagacaccaagcccagccggctggccagcaagaccaagaccagcagcctggcccctgtggtgggcaccaccaccaccacccccagccccagcgccatcaaggccgccgccaagtctgctgccctgcaggtgaccaagcagatcacccaggaggaggatgacagtgatgaggaggtggcccctgagaacttcttcagcctgcctgagaaggccgagcccccaggagtggagccctacccctaccccatccccaccgtgcctgaggagctgcccccaggcacagagcctgagcccgccttccaggatgatgctgccaatgcccccctggagttcaagatggctgctggcagcagcggggccccctggatgcccaagccaggagatgactacagctacaaccagttcagcacctatggagatgccaatgctgctggggcctactaccagggcctgcagcagcacctgggccacagccccctgcggggcatcatgaggttcctgaacagcaagagcggcaagaggacctgctttgtgcccagctttgactactacagcggcggctactacccagcccaggaccctgccctggtgcccccccaggagatcgccccagatgccagcttcattgatgatgaggccttcaagaggctgcagggcaagaggaacagaggccgggaggagatcaactttgtggagatcaagggagatgaccagctgagcggggcccagcagtggatgaccaagagcctgacagaggagaagaccatgaagagcttcagcaagaagaagggggagcagcccaccggccagcagaggaggaagcaccagatcacctacctgatccaccaggccaaggagcgggagctggagctgaagaacacctggagcgagaacaagctgagccggcggcagacccaggccaagtatggcttctag

SEQ ID NO: 266493 - DNA, 1404 bp, Artificial Sequence
  derived and/or modified sequence
atgctggcccccgccttccccccccccctgctgctgcccccccccaccggcgatccgaggctgcaacctccacctcctctgccttttgggctcggggggtttccgcctcctccgggcgtgtcacctgccgaggccgcaggggtaggggagggcttaggccttggacttcccagtcccagaggcccaggcttgaatctgcctccacctatcgggggtgccgggccgcctctgggtctcccaaagccaaaaaagagaaaggagcccgtgaaaatcgccgccccagaactccataagggcgattctgattccgaggaagatgaaccgacaaagaagaaaaccatccttcagggtagtagcgaagggacaggattgtccgcgctcttaccccagcccaagaatcttacggtaaaggagaccaatcggctactgctgccccatgcgttctcacggaaaccatcagacggttccccagacaccaaaccttccaggctggctagcaagaccaagacctctagtctagcccctgtagtagggaccacaaccactacacctagtccctctgccatcaaagccgccgctaagagcgctgcccttcaggttaccaagcaaataacacaggaggaggacgatagcgacgaggaagtcgcccctgagaatttcttttccctgccagaaaaagccgaacctcctggcgtcgagccttacccatacccgataccaactgtccctgaagaactgccgcccggcactgaaccggagccagctttccaggatgatgcggctaatgctcctcttgaatttaaaatggcagccggttcatctggtgccccctggatgcccaagcctggggatgattatagttataatcaattctcaacttacggcgacgccaacgccgctggggcctactatcaaggcctgcagcagcacctaggccatagcccactgaggggtatcatgcgatttctgaacagcaagagtgggaaaaggacctgctttgtgccatccttcgactactacagcggaggttactacccagcacaagatcctgctctcgtcccgcctcaggagatagcccctgacgccagtttcatcgatgacgaggcctttaagcgactccagggcaagaggaacagggggagagaggagataaatttcgtcgagattaaaggtgacgatcaactcagcggggcacagcagtggatgacaaaaagcctcacggaggaaaagacgatgaagagtttttcaaagaaaaagggggaacagccaaccggtcaacagcggcgcaaacatcagatcacctatctgatccaccaggccaaagaacgggagctcgaactgaagaatacctggtccgagaacaaactcagtcgcaggcaaacccaggccaagtatggcttctag

SEQ ID NO: 266494 - DNA, 2140 bp, Artificial Sequence
  derived and/or modified sequence
ttgcccgggactaggagcttaagtgaagaggtacgccttgttcggtggaaatcagccgtagccatgagtttctgccggggctagccctagagtacggagcaggcggacttttcggttccccgccccgccaggtggcggggcctactaggcctccgggcatccccggtctcaagtaggcctcatctgccggcaagggcgcccgaaacgcgggaggcgccatgtcgctggttgcttacgccagcagcgatgagagcgagccggatgaggctgagcccgagccggaggaagaggaggcggtggctcctacatctgggcccgctttagggggcttgttcgcttctctccctgcgcccaagggtccggccttgctgcctccgccccctcagatgctggcgccagcctttcccccgccgctgttgcttcccccacccaccggagaccccaggcttcagcctcctccccccttgcccttcggcctgggaggcttccccccacctccaggcgtgagcccggctgaagcggcgggagttggggagggactgggattggggttgccctcgccccgaggccctggcctcaatctgccccctccaattggcggtgccggtcccccgctggggcttcccaagccaaagaagaggaaagagcccgtgaagatcgcggcgccggagttgcataagggagattcagattctgaggaagatgaacccacaaagaagaaaactatccttcagggatccagtgaggggactggtttgtctgccttgcttccccaacctaaaaacctgactgtgaaagagactaacaggttgctcctgccccatgccttctcccgcaaaccctcggatggctcccctgatactaagccctccagactggcttctaagaccaagacttcctctcttgcccctgttgtgggcaccacaaccaccactccgtcgccctctgctatcaaggctgctgccaagagtgctgccctgcaggtgacaaagcagatcacgcaggaagaagacgacagtgatgaggaagtagcccccgaaaactttttctccctccctgaaaaggctgagccacctggagttgagccatacccttaccccatccccactgtccctgaagagctgcctccaggcacggaaccagagccggctttccaggacgatgcagccaatgccccccttgaattcaagatggcagcaggttcaagtggggccccttggatgcctaagcctggggacgactacagctacaatcagttttccacatatggcgatgccaatgccgctggtgcttattatcagggtctgcagcaacatctgggccactcgcctctaaggggaatcatgagattcctgaactcaaaatctggtaaacgaacctgctttgttcccagctttgattattacagtggtggctactatcctgcacaggacccggccctggtccccccccaggaaattgccccagatgcctccttcatcgatgacgaagcatttaagcggctgcagggcaagaggaaccgagggagagaagaaatcaactttgtggagatcaaaggtgatgaccagctcagtggggcccagcaatggatgactaagtcattgacagaagagaaaaccatgaagtcattcagcaaaaagaaaggtgagcagccaacaggccagcagcggcggaaacaccagatcacatatcttattcatcaggccaaggagcgggagctggaactgaagaacacctggtcagagaacaagctcagccgccgtcagacccaagccaaatatggattctagggctctggaactgattgctcccaggatctcctgccagcccagctggcctggcccccagcttcacctctgggaccccagctgctctaagcccaggatctctttccccaaggacccagccctcgcctctgcgagaatgaacatatttgatagatttttcttaacaagttagaaaattcagctcctttctgtcctggagctagcaaagacttgtgtgatgcctccgaaggggctctgagttctggggtgggagttttgctctctgtcaggtgtgataaaatgttgaaccctccccaccaccacttttttttttttaaaccagggatgtctgttgaaataaaacattcagtctg

SEQ ID NO: 266495 - DNA, 1404 bp, Artificial Sequence
  derived and/or modified sequence
atgcttgcccctgcttttcctcccccattgctcctcccaccaccaacaggggatccacggctgcagcctcctcctccactcccgttcggcctggggggtttcccgcctcctccaggtgtctctccagcagaagcagccggagtaggagaaggcttaggtttgggcctgccttcacccaggggacctggacttaatcttccgcctccaatcggcggagctggcccacctctcggccttcctaagcctaaaaagagaaaggagccggtaaaaattgccgcacccgagctgcataaaggcgatagtgatagcgaagaggacgagccaacaaagaagaaaaccattctccagggatcatcagagggcacgggtctgagcgccctgctccctcaacctaaaaatttaacagtaaaggagaccaatcgcctgctcttgccacatgctttttcgagaaagccatccgatggctcacccgatacaaagccctcccgactcgccagcaagaccaagacaagctctctggcccctgtcgttggaactactactaccactccgtcgcccagcgcgattaaagccgctgccaagtccgctgcactgcaggtaactaagcagattactcaggaggaagacgacagtgatgaagaggttgccccagagaatttctttagcctacccgagaaagcagaacctcccggtgttgagccttatccgtatcctattccaacggtacccgaggaactcccacctggcaccgagcctgagcccgcttttcaggacgacgctgccaacgcacccctagagtttaagatggcagctggctctagcggcgctccatggatgcccaagcctggcgacgattattcctacaaccagtttagtacttatggagatgccaacgccgctggagcatactaccagggactgcagcagcaccttggacacagtccattgcggggtattatgcgcttcttaaacagcaagtctggcaagaggacctgcttcgtccccagctttgactattattccggcggatactacccggcacaagatccggctcttgtgcctccccaggagatcgcgccagatgccagctttattgatgacgaggcctttaagcgcctgcagggaaaaaggaatagaggaagggaggagatcaatttcgtggagattaagggagatgaccagctcagtggcgcacagcagtggatgaccaaatctctcaccgaggagaaaacaatgaagtctttctcaaagaagaagggcgaacagcccaccgggcagcaacgaagaaagcaccaaatcacttatttgatacaccaggcaaaggagcgcgagcttgaactgaagaatacgtggtctgaaaacaagctgtcgaggcggcagacacaggcaaaatatgggttttag

SEQ ID NO: 266496 - DNA, 1404 bp, Artificial Sequence
  derived and/or modified sequence
atgctggcccccgccttccccccccccctgctgctgcccccccccaccggcgaccccagactgcagccccccccccccctgcccttcggcctgggcggcttcccccccccccccggcgtgagccccgccgaggccgccggcgtgggcgagggcctgggcctgggcctgcccagccccagaggccccggcctgaacctgcccccccccatcggcggcgccggcccccccctgggcctgcccaagcccaagaagagaaaggagcccgtgaagatcgccgcccccgagctgcacaagggcgacagcgacagcgaggaggacgagcccaccaagaagaagaccatcctgcagggcagcagcgagggcaccggcctgagcgccctgctgccccagcccaagaacctgaccgtgaaggagaccaacagactgctgctgccccacgccttcagcagaaagcccagcgacggcagccccgacaccaagcccagcagactggccagcaagaccaagaccagcagcctggcccccgtggtgggcaccaccaccaccacccccagccccagcgccatcaaggccgccgccaagagcgccgccctgcaggtgaccaagcagatcacccaggaggaggacgacagcgacgaggaggtggcccccgagaacttcttcagcctgcccgagaaggccgagccccccggcgtggagccctacccctaccccatccccaccgtgcccgaggagctgccccccggcaccgagcccgagcccgccttccaggacgacgccgccaacgcccccctggagttcaagatggccgccggcagcagcggcgccccctggatgcccaagcccggcgacgactacagctacaaccagttcagcacctacggcgacgccaacgccgccggcgcctactaccagggcctgcagcagcacctgggccacagccccctgagaggcatcatgagattcctgaacagcaagagcggcaagagaacctgcttcgtgcccagcttcgactactacagcggcggctactaccccgcccaggaccccgccctggtgcccccccaggagatcgcccccgacgccagcttcatcgacgacgaggccttcaagagactgcagggcaagagaaacagaggcagagaggagatcaacttcgtggagatcaagggcgacgaccagctgagcggcgcccagcagtggatgaccaagagcctgaccgaggagaagaccatgaagagcttcagcaagaagaagggcgagcagcccaccggccagcagagaagaaagcaccagatcacctacctgatccaccaggccaaggagagagagctggagctgaagaacacctggagcgagaacaagctgagcagaagacagacccaggccaagtacggcttctag

SEQ ID NO: 266497 - protein, 459 aa, Artificial Sequence
  derived and/or modified sequence
MSLVAYASSDESEPDEAEPEPEEEEAVAPTSGPALGGLFASLPAPKGPALLPPPPQMLAPAFPPPLLLPPPTGDPRLQPPPPLPFGLGGFPPPPGVSPAEAAGVGEGLGLGLPSPRGPGLNLPPPIGGAGPPLGLPKPKKRKEPVKIAAPELHKGDSDSEEDEPTKKKTILQGSSEGTGLSALLPQPKNLTVKETNRLLLPHAFSRKPSDGSPDTKPSRLASKTKTSSLAPVVGTTTTTPSPSAIKAAAKSAALQVTKQITQEEDDSDEEVAPENFFSLPEKAEPPGVEPYPYPIPTVPEELPPGTEPEPAFQDDAANAPLEFKMAAGSSGAPWMPKPGDDYSYNQFSTYGDANAAGAYYQFKRLQGKRNRGREEINFVEIKGDDQLSGAQQWMTKSLTEEKTMKSFSKKKGEQPTGQQRRKHQITYLIHQAKERELELKNTWSENKLSRRQTQAKYGF

SEQ ID NO: 266498 - DNA, 1380 bp, Artificial Sequence
  derived and/or modified sequence
atgtcactggtggcttatgctagttccgacgagagcgaacccgacgaagctgaacctgaacctgaggaggaagaagctgtggctccaacaagtgggccagcactcggggggttattcgctagtctgcccgcaccaaaaggtccagctctactgcctcccccaccccagatgctcgcaccagcgtttcccccgcctctgttactacctcctcctactggcgatccccggctgcagccccctcccccactccccttcggactggggggattccctccgccccctggggtgtcaccggcagaggcagcaggtgtcggtgagggtctcggcctgggacttcccagtccccggggccctggactgaacctgccgcctcctataggaggggctggtcctcctctgggtctgcccaagcccaagaaacgtaaagagcctgtgaagattgctgccccagagctccataagggcgattccgactccgaagaggacgagccgactaagaagaagaccatcctgcaggggtcaagtgaaggcacgggtctatctgcgttactgccacaacccaaaaatctgaccgtgaaagagactaataggctgttgttgcctcacgccttttctcggaaaccttccgacggtagtcccgataccaagccttctcggcttgcatctaagactaagacaagcagtctggcgcccgtagtcggaactactactacaactccctcaccctcagcgatcaaggctgcagccaaaagcgccgctttgcaggtcacaaaacagatcacacaggaagaagacgactccgacgaggaggtggctccagagaatttcttctcactccctgagaaagccgaacccccgggggttgagccgtatccctacccgatcccgactgttccagaggaactgccccccggtactgagcctgagcctgcttttcaggacgatgccgccaatgccccgctggagtttaagatggctgcaggatcaagcggggctccttggatgcccaaaccaggcgacgactatagttacaaccagttttctacctatggcgatgctaacgcggctggagcttactatcagttcaagcggctgcaaggcaaacgaaaccgcgggcgcgaggagataaattttgtcgagataaagggggatgaccagctgtcaggtgcacagcagtggatgacaaagagcctcacagaggagaaaaccatgaaaagcttttccaaaaaaaaaggtgagcagcccaccggacagcagcgccggaaacatcagataacctatttgatccaccaagccaaagaacgggaactcgagttgaaaaacacctggtctgaaaacaaactttctagacgtcagactcaggcaaaatacggcttttag

SEQ ID NO: 266499 - DNA, 1380 bp, Artificial Sequence
  derived and/or modified sequence
atgagcctggtggcctatgccagcagtgatgagagcgagccagatgaagctgagcctgagcctgaggaggaggaggccgtggcccccaccagcggccctgccctgggcggcctgtttgccagcctgcctgcccccaagggccctgccctgctgcccccaccaccccagatgctggccccagccttccccccacccctgctgctgcccccacccaccggggacccccggctgcagcccccaccacccctgcccttcggcctgggcggcttccccccacctcctggggtgtccccagctgaggccgccggcgtgggggagggcctgggcctgggcctgcccagcccccggggccctggcctgaacctgcccccacccatcggcggggccggcccccccctgggcctgcccaagcccaagaagaggaaggagcctgtgaagattgctgcccctgagctgcacaagggggacagcgacagtgaagaagatgagcccaccaagaagaagaccatcctgcagggcagcagcgagggcaccggcctgagcgccctgctgccccagcccaagaacctgactgtgaaggagaccaaccggctgctgctgccccacgccttcagcaggaagcccagtgatggcagcccagacaccaagcccagccggctggccagcaagaccaagaccagcagcctggcccctgtggtgggcaccaccaccaccacccccagccccagcgccatcaaggccgccgccaagtctgctgccctgcaggtgaccaagcagatcacccaggaggaggatgacagtgatgaggaggtggcccctgagaacttcttcagcctgcctgagaaggccgagcccccaggagtggagccctacccctaccccatccccaccgtgcctgaggagctgcccccaggcacagagcctgagcccgccttccaggatgatgctgccaatgcccccctggagttcaagatggctgctggcagcagcggggccccctggatgcccaagccaggagatgactacagctacaaccagttcagcacctatggagatgccaatgctgctggggcctactaccagttcaagaggctgcagggcaagaggaacagaggccgggaggagatcaactttgtggagatcaagggagatgaccagctgagcggggcccagcagtggatgaccaagagcctgacagaggagaagaccatgaagagcttcagcaagaagaagggggagcagcccaccggccagcagaggaggaagcaccagatcacctacctgatccaccaggccaaggagcgggagctggagctgaagaacacctggagcgagaacaagctgagccggcggcagacccaggccaagtatggcttctag

SEQ ID NO: 266500 - DNA, 1380 bp, Artificial Sequence
  derived and/or modified sequence
atgagcctggtggcctacgccagcagcgacgagagcgagcccgacgaggccgagccagaaccggaggaggaagaagctgtagcgccaaccagtggacctgcactagggggactgtttgcctcactgcccgcccccaaaggccccgctctgctcccccccccaccacagatgctcgcgcccgcctttccccccccactcctgctaccccctcctaccggtgacccacggctccaacctcccccaccacttcccttcgggctaggcggctttcccccccctccgggtgtaagccccgccgaagccgcaggcgtgggcgagggtctcgggcttgggctgcccagcccccgtggacctgggctgaatctgccaccaccaattgggggcgctggtccacctctcggattgcccaagccgaagaagagaaaggagccagtaaagatcgcggctccggaactacacaaaggcgactcagattctgaggaagatgaacccacgaaaaaaaaaacaatcctccagggttcctctgagggaaccggattatctgccctgcttccccaacccaagaatctgacagtgaaagagactaatcgcctgctgctcccacacgcgttcagccgcaagccttccgatggttctcccgatacaaagcccagcagactcgcttccaagactaagactagttccctggctcctgtcgttgggaccacgaccaccacccctagcccctcagccataaaagccgccgctaaaagtgcagccctgcaggtaactaagcaaatcactcaggaggaagacgattctgacgaagaggtggctcctgagaactttttcagtctgccagagaaggctgaacctcctggtgttgaaccctacccctaccccatacccactgtgccggaggagctgcctcctgggacagagccagagccagctttccaggacgatgctgccaacgcgcccctggagtttaaaatggcggctggctcctcaggcgccccatggatgcctaagcccggagacgactactcttataaccaatttagcacgtatggagatgccaatgctgccggggcttactaccaatttaagcgcctccagggcaagcggaatcgtggccgagaagagattaactttgtggaaatcaaaggcgacgaccaactgtccggcgcccagcagtggatgacaaagtcgttaactgaagaaaagacgatgaagagcttctctaagaaaaagggagagcagcctaccggtcagcagagacggaagcaccagatcacatatttgatacaccaggctaaagagcgagaactggaactgaagaacacctggtccgagaataagctgtcacgtaggcagacccaggctaaatacgggttttag

SEQ ID NO: 266501 - DNA, 1948 bp, Artificial Sequence
  derived and/or modified sequence
ttgcccgggactaggagcttaagtgaagaggtacgccttgttcggtggaaatcagccgtagccatgagtttctgccggggctagccctagagtacggagcaggcggacttttcggttccccgccccgccaggtggcggggcctactaggcctccgggcatccccggtctcaagtaggcctcatctgccggcaagggcgcccgaaacgcgggaggcgccatgtcgctggttgcttacgccagcagcgatgagagcgagccggatgaggctgagcccgagccggaggaagaggaggcggtggctcctacatctgggcccgctttagggggcttgttcgcttctctccctgcgcccaagggtccggccttgctgcctccgccccctcagatgctggcgccagcctttcccccgccgctgttgcttcccccacccaccggagaccccaggcttcagcctcctccccccttgcccttcggcctgggaggcttccccccacctccaggcgtgagcccggctgaagcggcgggagttggggagggactgggattggggttgccctcgccccgaggccctggcctcaatctgccccctccaattggcggtgccggtcccccgctggggcttcccaagccaaagaagaggaaagagcccgtgaagatcgcggcgccggagttgcataagggagattcagattctgaggaagatgaacccacaaagaagaaaactatccttcagggatccagtgaggggactggtttgtctgccttgcttccccaacctaaaaacctgactgtgaaagagactaacaggttgctcctgccccatgccttctcccgcaaaccctcggatggctcccctgatactaagccctccagactggcttctaagaccaagacttcctctcttgcccctgttgtgggcaccacaaccaccactccgtcgccctctgctatcaaggctgctgccaagagtgctgccctgcaggtgacaaagcagatcacgcaggaagaagacgacagtgatgaggaagtagcccccgaaaactttttctccctccctgaaaaggctgagccacctggagttgagccatacccttaccccatccccactgtccctgaagagctgcctccaggcacggaaccagagccggctttccaggacgatgcagccaatgccccccttgaattcaagatggcagcaggttcaagtggggccccttggatgcctaagcctggggacgactacagctacaatcagttttccacatatggcgatgccaatgccgctggtgcttattatcagtttaagcggctgcagggcaagaggaaccgagggagagaagaaatcaactttgtggagatcaaaggtgatgaccagctcagtggggcccagcaatggatgactaagtcattgacagaagagaaaaccatgaagtcattcagcaaaaagaaaggtgagcagccaacaggccagcagcggcggaaacaccagatcacatatcttattcatcaggccaaggagcgggagctggaactgaagaacacctggtcagagaacaagctcagccgccgtcagacccaagccaaatatggattctagggctctggaactgattgctcccaggatctcctgccagcccagctggcctggcccccagcttcacctctgggaccccagctgctctaagcccaggatctctttccccaaggacccagccctcgcctctgcgagaatgaacatatttgatagatttttcttaacaagttagaaaattcagctcctttctgtcctggagctagcaaagacttgtgtgatgcctccgaaggggctctgagttctggggtgggagttttgctctctgtcaggtgtgataaaatgttgaaccctccccaccaccacttttttttttttaaaccagggatgtctgttgaaataaaacattcagtctg

SEQ ID NO: 266502 - DNA, 1380 bp, Artificial Sequence
  derived and/or modified sequence
atgtctttggtcgcctacgccagtagtgatgagagcgaaccagatgaagctgaacccgagcccgaggaggaggaggcggtagccccaacaagtggacctgccttaggagggctgtttgcttctcttcccgcaccaaagggtccagcgctcctgcctccgccaccccagatgctcgcacctgcatttcccccaccccttctgctgcctccacccacaggcgaccccaggctccagccccctccacctctgcctttcggtctggggggttttccaccaccccctggggtctcacccgctgaagctgccggtgtcggtgagggactgggcttggggttacctagtcctcgcggacctgggcttaacctgccaccccctatcggaggggcaggtccccctctgggcctccccaaacctaagaaacggaaagaaccagtcaagattgctgccccagagctgcacaaaggtgattctgacagtgaagaagatgaacccactaaaaagaaaaccatactgcaaggttctagtgaggggacagggctgagcgctttactaccccaacccaaaaacttgactgtcaaagagacaaatcgcttactcctgccacacgcttttagtaggaagcccagcgacggtagtcccgataccaaaccaagtagacttgccagtaaaactaagacttccagcctcgccccagtggtagggacaaccactaccactccttctccttcggccatcaaggccgctgcaaagtcggccgcattacaggtcactaagcaaatcacacaggaggaggatgactctgacgaggaggtggcaccagaaaatttcttctcgctgcccgaaaaggctgaaccccctggggtagagccctacccctatcccattcccacagtcccagaggaattacctcctgggaccgagcccgaacccgcttttcaggatgatgctgctaatgcacctcttgaattcaagatggctgccggttccagcggcgcaccatggatgcccaagcccggagatgactatagttacaatcagttcagcacttacggtgacgccaatgccgctggagcgtactaccagtttaagcggctgcagggcaaacggaacagaggacgcgaagagattaatttcgtggaaattaagggagacgaccaactgagcggcgctcagcagtggatgaccaaatcactgacagaggaaaaaacaatgaaatctttttcgaagaagaaaggggagcagccaaccggccaacagcggaggaagcatcaaatcacatacctcatacaccaggccaaagagagggagctcgaactaaagaacacatggagcgaaaataagttaagtcggcgacagacgcaggccaagtacgggttctag

SEQ ID NO: 266503 - DNA, 1380 bp, Artificial Sequence
  derived and/or modified sequence
atgagcctggtggcctacgccagcagcgacgagagcgagcccgacgaggccgagcccgagcccgaggaggaggaggccgtggcccccaccagcggccccgccctgggcggcctgttcgccagcctgcccgcccccaagggccccgccctgctgcccccccccccccagatgctggcccccgccttccccccccccctgctgctgcccccccccaccggcgaccccagactgcagccccccccccccctgcccttcggcctgggcggcttcccccccccccccggcgtgagccccgccgaggccgccggcgtgggcgagggcctgggcctgggcctgcccagccccagaggccccggcctgaacctgcccccccccatcggcggcgccggcccccccctgggcctgcccaagcccaagaagagaaaggagcccgtgaagatcgccgcccccgagctgcacaagggcgacagcgacagcgaggaggacgagcccaccaagaagaagaccatcctgcagggcagcagcgagggcaccggcctgagcgccctgctgccccagcccaagaacctgaccgtgaaggagaccaacagactgctgctgccccacgccttcagcagaaagcccagcgacggcagccccgacaccaagcccagcagactggccagcaagaccaagaccagcagcctggcccccgtggtgggcaccaccaccaccacccccagccccagcgccatcaaggccgccgccaagagcgccgccctgcaggtgaccaagcagatcacccaggaggaggacgacagcgacgaggaggtggcccccgagaacttcttcagcctgcccgagaaggccgagccccccggcgtggagccctacccctaccccatccccaccgtgcccgaggagctgccccccggcaccgagcccgagcccgccttccaggacgacgccgccaacgcccccctggagttcaagatggccgccggcagcagcggcgccccctggatgcccaagcccggcgacgactacagctacaaccagttcagcacctacggcgacgccaacgccgccggcgcctactaccagttcaagagactgcagggcaagagaaacagaggcagagaggagatcaacttcgtggagatcaagggcgacgaccagctgagcggcgcccagcagtggatgaccaagagcctgaccgaggagaagaccatgaagagcttcagcaagaagaagggcgagcagcccaccggccagcagagaagaaagcaccagatcacctacctgatccaccaggccaaggagagagagctggagctgaagaacacctggagcgagaacaagctgagcagaagacagacccaggccaagtacggcttctag

SEQ ID NO: 266504 - protein, 348 aa, Artificial Sequence
  derived and/or modified sequence
MSQEGAVPASAVPLEELSSWPEELCRRELPSVLPRLLSLSQHSDSWIEHIQILKIIVEMFLPHMNHLTLEQTFFSQVLPKTVKLFDDMMYELTSQARGLSSQNLEIQTTLRNILQTMVQLLGALTGCVQHICATQESIILENIQSLPSSVLHIIKSTFVHCKNSESVYSGCLHLVSDLLQALFKEAYSLQKQLMELLDMVCMDPLVDDNDDILNMVIVIHSLLDICSVISSMDHAFHANTWKFIIKQSLKHQSIIKSQLKHKDIITSLCEDILFSFHSCLQLAEQMTQSDAQDNADYRLFQKTLKLCRFFANSLLHYAKEFLPFLSDSCCTLHQLYLQIHRWSFALAV

SEQ ID NO: 266505 - DNA, 1047 bp, Artificial Sequence
  derived and/or modified sequence
atgagccaggagggcgccgtgcccgccagcgccgtgcccctggaggagctgagcagctggcccgaggagctgtgcagaagagagctgcccagcgtgctgcccagactgctgagcctgagccagcacagcgacagctggatcgagcacatccagatcctgaagatcatcgtggagatgttcctgccccacatgaaccacctgaccctggagcagaccttcttcagccaggtgctgcccaagaccgtgaagctgttcgacgacatgatgtacgagctgaccagccaggccagaggcctgagcagccagaacctggagatccagaccaccctgagaaacatcctgcagaccatggtgcagctgctgggcgccctgaccggctgcgtgcagcacatctgcgccacccaggagagcatcatcctggagaacatccagagcctgcccagcagcgtgctgcacatcatcaagagcaccttcgtgcactgcaagaacagcgagagcgtgtacagcggctgcctgcacctggtgagcgacctgctgcaggccctgttcaaggaggcctacagcctgcagaagcagctgatggagctgctggacatggtgtgcatggaccccctggtggacgacaacgacgacatcctgaacatggtgatcgtgatccacagcctgctggacatctgcagcgtgatcagcagcatggaccacgccttccacgccaacacctggaagttcatcatcaagcagagcctgaagcaccagagcatcatcaagagccagctgaagcacaaggacatcatcaccagcctgtgcgaggacatcctgttcagcttccacagctgcctgcagctggccgagcagatgacccagagcgacgcccaggacaacgccgactacagactgttccagaagaccctgaagctgtgcagattcttcgccaacagcctgctgcactacgccaaggagttcctgcccttcctgagcgacagctgctgcaccctgcaccagctgtacctgcagatccacagatggagcttcgccctggccgtgtag

SEQ ID NO: 266506 - DNA, 4355 bp, Artificial Sequence
  derived and/or modified sequence
ggctttggccctggaaagcctcgcggacgtgttctgacccaaggttttagcagtggatgtggcgttttcttccattccttctttcagtttttctgtactcgttgcttgcaattaagtgtaaatacttttgctagtggataatgggggaggcaaggactgagacctgcggtatgacgatagctctggctcttaatagtttgaggtaaagcgagatactctgagcttttgtctcccgtaaaaagggtggtgaatatgaataagggctttcttagcgttataagaattaaagggcatagttctgtggtgtgaaatctttaaaagatgttcagtaaataaaaatgattttcctccttcccctctcagacctctttttcttctttctttctttttttttgacaagttctcactcctctcacccaggctggagtctttctgaaagagttcttccgcttgttgttggctttcaactgttggatttgaggcgcttagcgccttcttcgtccgggtgcagcacattcttgattggtctcatgcctttgtggttgtaaatgtgcctggaatcctagcctttcatggtttgttctgagtaatgaataccctattactatgatactagtatcttccttaattatcctactcattgtctcaacattctgacagttggattgagcatattcaaattttgaaaattattgtagaaatgtttttacctcatatgaaccacctgacattggaacagactttcttttcacaagtgttaccaaagactgtgaaattattcgatgacatgatgtatgaattaaccagtcaagccagaggactgtcaagccaaaatttggaaatccagaccactctaaggaatattttacaaacaatggtgcagctcttaggagctctcacaggatgtgttcagcatatctgtgccacacaggaatccatcattttggaaaatattcagagtctcccctcctcagtccttcatataattaaaagcacatttgtgcattgtaagaatagtgaatctgtgtattctgggtgtttacacctagtttcagaccttctccaggctcttttcaaggaggcctattctcttcaaaagcagttaatggaactgctggacatggtttgcatggaccctttagtagatgacaatgatgatattttgaatatggtaatagttattcattctttattggatatctgctctgttatttccagtatggaccatgcatttcatgccaatacttggaagtttataattaagcagagccttaagcaccagtccataataaaaagccagttgaaacacaaagatataattactagcttgtgtgaagacattcttttctccttccattcttgtttacagttagctgagcagatgacacagtcagatgcacaggataatgctgactacagattatttcagaaaacactcaaattgtgtcgtttttttgccaactcccttttgcactacgctaaggaatttcttcctttcctctctgattcttgctgtactttgcaccaactgtatcttcagatacacagcaagtttcctccaagcctttatgctaccaggatttctaaagcacaccaagaggaaatagcaggtgctttcctagtgacactggatccacttatcagtcagctgctcacatttcagcctttcatgcaggtggttttggacagtaaattagacctgccatgtgaactgcagtttccacaatgtcttcttctggttgttgtcatggataagctgccatctcagcctaaggaagtgcaaaccctgtggtgcacagacagccaggtctcagaaacgacaaccaggatatctctactcaaagccgttttctacagttttgagcagtgttctggtgaactctctctacctgttcatttacagggattaaagagtaaggggaaagctgaggtggctgtcaccttgtatcagcatgtttgtgttcatctgtgtacatttattacttcctttcatccctcactgtttgctgaactggatgctgctctgctgaatgctgtacttagtgctaatatgatcacctctttgttagctatggatgcatggtgcttccttgctcgatatgggactgctgaactgtgtgcacaccatgtcaccatagtggctcatctgataaagtcatgccctggagaatgttatcaactcatcaacctatcaatactgttgaagcgtctctttttcttcatggcaccaccccatcagctggagtttatccagaaattttccccaaaagaagcagaaaatctgcctctgtggcaacatatttccttccaggcgttacctcctgagcttagggaacaaactgtccatgaggtcaccacagtaggcactgcagaatgcaggaaatggctgagcaggagtcgtactttgggagaactagaatctctgaacacagtactgtctgctttgcttgcagtatgtaattctgctggtgaagctttggatacaggaaaacaaactgcaattatcgaagttgtgagtcagctttgggcttttttaaacattaaacaggtagcagatcaaccttatgttcaacagacattcagccttttacttccactgttgggatttttcattcaaactctagatcctaaactgatacttcaggcagtaactttgcagacctcgctacttaaattagagcttcctgactatgttcgtttggcaatgttggattttgtatcttctttaggaaaactttttatacctgaagctatccaggacagaattctgcccaacctgtcctgtatgtttgccttactgctagctgacaggagttggctgctagaacaacataccttggaggcgtttactcagttcgctgagggaacaaatcatgaagagatagttccacagtgtctcagttctgaagaaactaagaacaaagttgtatcctttctggagaagactgggtttgtagatgaaactgaagctgccaaagtggaacgtgtgaaacaggaaaaaggtattttctgggaaccctttgctaatgtgactgtagaagaagcaaagaggtcatctttacagccttatgcaaaaagagctcgtcaggagttcccctgggaagaagagtacaggtcagcgctgcatacaatagcaggggctttggaagcaactgagtcactactccaaaagggtcctgctccagcctggctttcaatggaaatggaggcgctccaagaaaggatggataagctaaaacgttacatacatactctagggtgaaacttatcactaggcagaactgggtttgatgctttgtcaactgaaaatacttatgtctgtacattttctaacagatataaaacaaattttgtaaagttgaatctagtgaaaataatctttatttgacatttagagaacaggattgtggggaatattcttattaagaactttggtacaatgtactacatgtggaacagtcaggaactgcctaggtccacaaagaaccatttactcagatagtctaactgtaaacaaataaataagctgcctaaggaaacctcagcaatttaaaatcatttatataatttatagctaaaattttttaaagttgtatttcataatagagcttactcttatgttaaagaatggcacaaaattaagctaaccagcttgaattacattttctttacttccagaattgtcctggaaaaagcagtaaattcgacctctcctcagctacttgctcttcatagaaactggcctcagtcaaatgcacaaaggctcttcctcctggaaaccagtactgtgagcctcaccacccagggcttttagccagcactcacagtcagtctcctacttcagttggcacagactggataatgagctcctgggatgggaaaagcaggccactttggggttttcttgtcccaaagcctgcttttgaggtattgattttttttaaaaaaagggaatcctttttcctaaagtttaactcacatctattgtcaccagttattatcttcccagttcagctccccttcttcttcccagccttcagcctctccctgcaacaaaataaagcacaccaagaacccactgaaacaaatcatatgcaaaaatcatacgcaaatttgaaaaagcaggaatttaaaatttatcttttgatgccagaaacactacctcgtactaagtaaaataacttagagctctaacagaaagttgaaaagtaggattacaaaaccatggcactggaaaatagcttttcaaaaaccataaaatccagtaaaaatcagtgtggatgacaccaaatccttattttaatcccttttttttctttttcaaataaaaaggttacaatagctcattaaacaaa

SEQ ID NO: 266507 - DNA, 4002 bp, Artificial Sequence
  derived and/or modified sequence
ttccggtctgggctttggcgggtctggtttgaagctctcctgtttgacgaaagtatgtctcaggaaggctggagtctttctgaaagagttcttccgcttgttgttggctttcaactgttggatttgaggcgcttagcgccttcttcgtccgggtgcagcacattcttgattggtctcatgcctttgtggttgtaaatgtgcctggaatcctagcctttcatggtttgttctgagtaatgaataccctattactatgatactagtatcttccttaattatcctactcattgtctcaacattctgacagttggattgagcatattcaaattttgaaaattattgtagaaatgtttttacctcatatgaaccacctgacattggaacagactttcttttcacaagtgttaccaaagactgtgaaattattcgatgacatgatgtatgaattaaccagtcaagccagaggactgtcaagccaaaatttggaaatccagaccactctaaggaatattttacaaacaatggtgcagctcttaggagctctcacaggatgtgttcagcatatctgtgccacacaggaatccatcattttggaaaatattcagagtctcccctcctcagtccttcatataattaaaagcacatttgtgcattgtaagaatagtgaatctgtgtattctgggtgtttacacctagtttcagaccttctccaggctcttttcaaggaggcctattctcttcaaaagcagttaatggaactgctggacatggtttgcatggaccctttagtagatgacaatgatgatattttgaatatggtaatagttattcattctttattggatatctgctctgttatttccagtatggaccatgcatttcatgccaatacttggaagtttataattaagcagagccttaagcaccagtccataataaaaagccagttgaaacacaaagatataattactagcttgtgtgaagacattcttttctccttccattcttgtttacagttagctgagcagatgacacagtcagatgcacaggataatgctgactacagattatttcagaaaacactcaaattgtgtcgtttttttgccaactcccttttgcactacgctaaggaatttcttcctttcctctctgattcttgctgtactttgcaccaactgtatcttcagatacacagcaagtttcctccaagcctttatgctaccaggatttctaaagcacaccaagaggaaatagcaggtgctttcctagtgacactggatccacttatcagtcagctgctcacatttcagcctttcatgcaggtggttttggacagtaaattagacctgccatgtgaactgcagtttccacaatgtcttcttctggttgttgtcatggataagctgccatctcagcctaaggaagtgcaaaccctgtggtgcacagacagccaggtctcagaaacgacaaccaggatatctctactcaaagccgttttctacagttttgagcagtgttctggtgaactctctctacctgttcatttacagggattaaagagtaaggggaaagctgaggtggctgtcaccttgtatcagcatgtttgtgttcatctgtgtacatttattacttcctttcatccctcactgtttgctgaactggatgctgctctgctgaatgctgtacttagtgctaatatgatcacctctttgttagctatggatgcatggtgcttccttgctcgatatgggactgctgaactgtgtgcacaccatgtcaccatagtggctcatctgataaagtcatgccctggagaatgttatcaactcatcaacctatcaatactgttgaagcgtctctttttcttcatggcaccaccccatcagctggagtttatccagaaattttccccaaaagaagcagaaaatctgcctctgtggcaacatatttccttccaggcgttacctcctgagcttagggaacaaactgtccatgaggtcaccacagtaggcactgcagaatgcaggaaatggctgagcaggagtcgtactttgggagaactagaatctctgaacacagtactgtctgctttgcttgcagtatgtaattctgctggtgaagctttggatacaggaaaacaaactgcaattatcgaagttgtgagtcagctttgggcttttttaaacattaaacaggtagcagatcaaccttatgttcaacagacattcagccttttacttccactgttgggatttttcattcaaactctagatcctaaactgatacttcaggcagtaactttgcagacctcgctacttaaattagagcttcctgactatgttcgtttggcaatgttggattttgtatcttctttaggaaaactttttatacctgaagctatccaggacagaattctgcccaacctgtcctgtatgtttgccttactgctagctgacaggagttggctgctagaacaacataccttggaggcgtttactcagttcgctgagggaacaaatcatgaagagatagttccacagtgtctcagttctgaagaaactaagaacaaagttgtatcctttctggagaagactgggtttgtagatgaaactgaagctgccaaagtggaacgtgtgaaacaggaaaaaggtattttctgggaaccctttgctaatgtgactgtagaagaagcaaagaggtcatctttacagccttatgcaaaaagagctcgtcaggagttcccctgggaagaagagtacaggtcagcgctgcatacaatagcaggggctttggaagcaactgagtcactactccaaaagggtcctgctccagcctggctttcaatggaaatggaggcgctccaagaaaggatggataagctaaaacgttacatacatactctagggtgaaacttatcactaggcagaactgggtttgatgctttgtcaactgaaaatacttatgtctgtacattttctaacagatataaaacaaattttgtaaagttgaatctagtgaaaataatctttatttgacatttagagaacaggattgtggggaatattcttattaagaactttggtacaatgtactacatgtggaacagtcaggaactgcctaggtccacaaagaaccatttactcagatagtctaactgtaaacaaataaataagctgcctaaggaaacctcagcaatttaaaatcatttatataatttatagctaaaattttttaaagttgtatttcataatagagcttactcttatgttaaagaatggcacaaaattaagctaaccagcttgaattacattttctttacttccagaattgtcctggaaaaagcagtaaattcgacctctcctcagctacttgctcttcatagaaactggcctcagtcaaatgcacaaaggctcttcctcctggaaaccagtactgtgagcctcaccacccagggcttttagccagcactcacagtcagtctcctacttcagttggcacagactggataatgagctcctgggatgggaaaagcaggccactttggggttttcttgtcccaaagcctgcttttgaggtattgattttttttaaaaaaagggaatcctttttcctaaagtttaactcacatctattgtcaccagttattatcttcccagttcagctccccttcttcttcccagccttcagcctctccctgcaacaaaataaagcacaccaagaacccactgaaacaaatcatatgcaaaaatcatacgcaaatttgaaaaagcaggaatttaaaatttatcttttgatgccagaaacactacctcgtactaagtaaaataacttagagctctaacagaaagttgaaaagtaggattacaaaaccatggcactggaaaatagcttttcaaaaaccataaaatccagtaaaaatcagtgtggatgacaccaaatccttattttaatcccttttttttctttttcaaataaaaaggttacaatagctcattaaacaaa

SEQ ID NO: 266508 - DNA, 1071 bp, Artificial Sequence
  derived and/or modified sequence
gaagctctcctgtttgacgaaagtatgtctcaggaaggtgcggtcccagctagcgcggttcccctggaagaattaagtagctggccagaggagctatgccgccgggaactgccgtccgtcctgccccgactcctctcattgtctcaacattctgacagttggattgagcatattcaaattttgaaaattattgtagaaatgtttttacctcatatgaaccacctgacattggaacagactttcttttcacaagtgttaccaaagactgtgaaattattcgatgacatgatgtatgaattaaccagtcaagccagaggactgtcaagccaaaatttggaaatccagaccactctaaggaatattttacaaacaatggtgcagctcttaggagctctcacaggatgtgttcagcatatctgtgccacacaggaatccatcattttggaaaatattcagagtctcccctcctcagtccttcatataattaaaagcacatttgtgcattgtaagaatagtgaatctgtgtattctgggtgtttacacctagtttcagaccttctccaggctcttttcaaggaggcctattctcttcaaaagcagttaatggaactgctggacatggtttgcatggaccctttagtagatgacaatgatgatattttgaatatggtaatagttattcattctttattggatatctgctctgttatttccagtatggaccatgcatttcatgccaatacttggaagtttataattaagcagagccttaagcaccagtccataataaaaagccagttgaaacacaaagatataattactagcttgtgtgaagacattcttttctccttccattcttgtttacagttagctgagcagatgacacagtcagatgcacaggataatgctgactacagattatttcagaaaacactcaaattgtgtcgtttttttgccaactcccttttgcactacgctaaggaatttcttcctttcctctctgattcttgctgtactttgcaccaactgtatcttcagatacacagatggagtttcgctcttgctgtctag

SEQ ID NO: 266509 - DNA, 1047 bp, Artificial Sequence
  derived and/or modified sequence
atgtcacaggaaggggctgtccctgcctccgctgtgcccctggaggaactgtcgtcatggcctgaagaattgtgcaggcgggagcttccatcagtcctgcctaggctcctttccctttcccaacattctgattcctggatcgaacatattcaaattctcaagatcatcgtggagatgtttctgccccatatgaaccatctcactctcgagcagacattcttctcacaggtgctacccaaaacagttaagctctttgatgacatgatgtacgaattaacaagccaggctaggggactgtcctcccagaatctcgagatccagactactttacggaatatactgcagacaatggtgcagctgctgggggcgctgacagggtgtgtccagcatatctgcgcgactcaggaatccatcatcctcgaaaatattcagtcactgccctccagtgtgttacatatcatcaagtcaacgtttgtgcattgtaagaatagcgagtccgtctatagcgggtgtctgcatctagtctcagatctgctccaggcgttgtttaaggaggcgtactccctgcagaaacaactgatggagctgctcgacatggtgtgcatggaccctcttgtcgacgacaatgatgatattctcaacatggtgatagtgattcattccttattagatatctgcagcgttatatcatcaatggaccacgctttccacgcaaatacttggaagttcatcattaagcagagcctgaagcaccagagtattatcaaatcacagctcaaacacaaagatatcatcacttcactttgcgaggatattctgttttcattccactcctgcctccaactggccgagcaaatgactcaatccgatgcccaagacaacgcagattatcgactgttccagaagaccctgaaactttgcaggttctttgccaactcattgctgcattatgccaaggagttcctgcccttcctttctgattcatgctgcaccttgcaccagctttatctgcagatccataggtggtcattcgcccttgctgtctag

SEQ ID NO: 266510 - DNA, 1047 bp, Artificial Sequence
  derived and/or modified sequence
atgagccaggagggcgctgtgcctgccagcgctgtgcccctggaggagctgagctcctggccagaggagctgtgccggcgggagctgcccagcgtgctgccccggctgctgagcctgagccagcacagcgacagctggattgagcacatccagatcctgaagatcatcgtggagatgttcctgccccacatgaaccacctgaccctggagcagaccttcttcagccaggtgctgcccaagacagtgaagctgtttgatgacatgatgtatgagctgaccagccaggcccggggcctgagcagccagaacctggagatccagaccaccctgaggaacatcctgcagaccatggtgcagctgctgggcgccctgaccggctgtgtgcagcacatctgtgccacccaggagagcatcatcctggagaacatccagagcctgcccagctctgtgctgcacatcatcaagagcacctttgtgcactgcaagaacagcgagagcgtgtacagcggctgcctgcacctggtgtctgacctgctgcaggccctcttcaaggaggcctacagcctgcagaagcagctgatggagctgctggacatggtgtgcatggaccccctggtggatgacaatgatgacatcctgaacatggtgattgtcatccacagcctgctggacatctgcagcgtcatcagctccatggaccacgccttccacgccaacacctggaagttcatcatcaagcagagcctgaagcaccagagcatcatcaagagccagctgaagcacaaggacatcatcaccagcctgtgtgaggacatcctcttctccttccacagctgcctgcagctggccgagcagatgacccagagtgatgcccaggacaatgctgactaccgcctcttccagaagaccctgaagctgtgccgcttctttgccaacagcctgctgcactacgccaaggagttcctgcccttcctgagtgacagctgctgcaccctgcaccagctgtacctgcagatccaccgctggagctttgccctggccgtgtag

SEQ ID NO: 266511 - DNA, 1047 bp, Artificial Sequence
  derived and/or modified sequence
atgagccaggagggcgccgtgcccgccagcgccgtgcccctggaggaactgtcctcctggcccgaagagctgtgtaggagagaacttcccagcgtcttacccagactgttgagtctgagccagcacagcgatagctggatcgagcacatacagatattaaagataatagtggaaatgttcctcccacacatgaatcatctgaccctcgagcagacgttcttttcacaggtgctgcctaaaactgttaagctgttcgatgatatgatgtacgagctgacaagtcaggcaagaggccttagcagtcagaacctggagattcagacaacgctacgcaatatcctgcaaacaatggtccaacttctcggcgccctgaccggctgcgtgcagcatatctgtgctacccaggagagtatcatcttagaaaacatccagagtctgcctagctctgttctgcatattatcaagtcaactttcgtgcactgcaaaaattcagagtcagtctattccgggtgtctacacctggtctctgatcttctgcaggcactcttcaaagaagcctatagcctccagaagcaactgatggaactcctggacatggtatgcatggaccctttggtcgacgataatgatgatattctgaatatggttatcgttatacactctctgctggacatctgttctgtgatctcatccatggatcacgcctttcatgccaatacatggaaatttattattaaacagagtctcaaacaccagtccatcatcaagagtcaattaaaacacaaggacattatcacttccctgtgcgaggatatcctgttttcctttcactcttgcctacaactggccgagcagatgacacagagtgacgcccaggataacgctgactatcgacttttccagaagaccctcaagctctgtcgctttttcgcaaatagtctcttgcattatgccaaggagttcctgccgtttctcagtgattcatgttgcaccctccatcagctgtacctgcaaatccatcgatggtcctttgctctagctgtgtag

SEQ ID NO: 266512 - DNA, 1047 bp, Artificial Sequence
  derived and/or modified sequence
atgtcccaggagggggctgtgccagcctcggcagttccattggaggagctgtccagctggcccgaggagctttgtaggcgcgagctgccatccgtcttaccacggttactgagtctttcacaacactctgactcgtggatcgagcacatccagatcctgaaaattattgtcgagatgttcctcccacatatgaaccatttgactttggagcaaacattctttagtcaggtgctgcctaagacagtgaagctgttcgacgatatgatgtacgagctgacctctcaggcccgaggtctcagttcacaaaacctggagattcagactacactgaggaatattctgcaaaccatggtccagctcctcggtgcccttacaggttgcgttcaacatatatgcgccacccaggaatctattatcctggagaatattcagtccctgccatcgtccgttctccacattataaagtccaccttcgtgcattgtaaaaacagcgaaagcgtctactccgggtgtcttcacttagtcagcgatctcctacaagcactctttaaagaagcttacagcctgcagaaacagttgatggaactcttggacatggtctgcatggaccctctagtcgacgacaatgatgacattttgaatatggtaatagtcatacactctctcctggacatttgctccgtgattagttcaatggaccacgcttttcatgctaacacttggaaatttatcatcaaacagtccctgaagcaccagtcgattataaagtcccagttgaaacacaaagacattattacctcactctgtgaggacattctcttctcgtttcacagctgcctgcagctggccgagcagatgacccagagcgacgcacaggataatgccgactatcgactgttccaaaagacattaaagctctgccgctttttcgcgaatagtctgctgcactacgccaaggaatttctgccatttctcagcgattcctgttgcactctccatcaactctacctgcagatccacagatggagcttcgctctcgctgtctag

SEQ ID NO: 266513 - protein, 380 aa, Artificial Sequence
  derived and/or modified sequence
MVLESTMVCVDNSEYMRNGDFLPTRLQAQQDAVNIVCHSKTRSNPENNVGLITLANDCEVLTTLTPDTGRILSKLHTVQPKGKITFCTGIRVAHLALKHRQGKNHKMRIIAFVGSPVEDNEKDLVKLAKRLKKEKVNVDIINFGEEEVNTEKLTAFVNTLNGKDGTGSHLVTVPPGPSLADALISSPILAGEGGAMLGLGASDFEFGVDPSADPELALALRVSMEEQRQRQEEEARRAAAASAAEAGIATTGTEGERDSDDALLKMTISQQEFGRTGLPDLSSMTEEEQIAYAMQMSLQGAEFGQAESADIDASSAMDTSEPAKEEDDYDVMQDPEFLQSVLENLPGVDPNNEAIRNAMGSLASQATKDGKKDKKEEDKK

SEQ ID NO: 266514 - protein, 203 aa, Artificial Sequence
  derived and/or modified sequence
MRNGDFLPTRLQAQQDAVNIVCHSKTRSNPENNVGLITLANDCEVLTTLTPDTGRILSKLHTVQPKGKITFCTGIRVAHLALKHRQGKNHKMRIIAFVGSPVEDNEKDLVKLAKRLKKEKVNVDIINFGEEEVNTEKLTAFVNTLNGKDGTGSHLVTVPPGPSLADALISSPILAGEGGAMLGLGASDFEFGVDPSADPELAL

SEQ ID NO: 266515 - DNA, 1143 bp, Artificial Sequence
  derived and/or modified sequence
atggtgctggagagcaccatggtgtgcgtggacaacagcgagtacatgagaaacggcgacttcctgcccaccagactgcaggcccagcaggacgccgtgaacatcgtgtgccacagcaagaccagaagcaaccccgagaacaacgtgggcctgatcaccctggccaacgactgcgaggtgctgaccaccctgacccccgacaccggcagaatcctgagcaagctgcacaccgtgcagcccaagggcaagatcaccttctgcaccggcatcagagtggcccacctggccctgaagcacagacagggcaagaaccacaagatgagaatcatcgccttcgtgggcagccccgtggaggacaacgagaaggacctggtgaagctggccaagagactgaagaaggagaaggtgaacgtggacatcatcaacttcggcgaggaggaggtgaacaccgagaagctgaccgccttcgtgaacaccctgaacggcaaggacggcaccggcagccacctggtgaccgtgccccccggccccagcctggccgacgccctgatcagcagccccatcctggccggcgagggcggcgccatgctgggcctgggcgccagcgacttcgagttcggcgtggaccccagcgccgaccccgagctggccctggccctgagagtgagcatggaggagcagagacagagacaggaggaggaggccagaagagccgccgccgccagcgccgccgaggccggcatcgccaccaccggcaccgagggcgagagagacagcgacgacgccctgctgaagatgaccatcagccagcaggagttcggcagaaccggcctgcccgacctgagcagcatgaccgaggaggagcagatcgcctacgccatgcagatgagcctgcagggcgccgagttcggccaggccgagagcgccgacatcgacgccagcagcgccatggacaccagcgagcccgccaaggaggaggacgactacgacgtgatgcaggaccccgagttcctgcagagcgtgctggagaacctgcccggcgtggaccccaacaacgaggccatcagaaacgccatgggcagcctggccagccaggccaccaaggacggcaagaaggacaagaaggaggaggacaagaagtag

SEQ ID NO: 266516 - DNA, 1143 bp, Artificial Sequence
  derived and/or modified sequence
atggtcctggagtccaccatggtctgtgtcgataactccgagtacatgagaaatggtgatttcctcccaacacggctgcaggcccaacaggatgctgtcaatattgtgtgccatagcaaaacacggagcaatccagagaacaatgtgggattaataacactggctaatgattgtgaggtcctaacaactctgactcctgataccgggcggatcctgtcaaagctccatacagttcagccgaagggcaagatcaccttttgcaccgggattcgcgtggcacatcttgcactcaaacatagacaaggaaaaaaccataaaatgcggataattgcttttgtggggagcccagtcgaggacaacgagaaagatctggtcaaactggccaaacgcttaaaaaaggagaaggtgaatgtggacatcattaacttcggggaagaagaggtgaatactgagaaactgaccgcgttcgtcaataccctgaacggcaaggatggcacgggatcgcatctggtgactgtgccccccggcccttcgcttgctgatgctttgataagttcacccatactcgccggcgaagggggggccatgcttggattgggcgcgtccgactttgaatttggcgtagacccctccgctgatccggagctagcgttagccctgagagtttctatggaggagcaaaggcagcggcaagaggaagaagccaggcgcgcggccgcagcgtcagcagctgaagcaggtatcgcaaccactgggacagagggtgagcgcgattctgatgatgccctgttgaagatgaccatctctcagcaagaattcgggcgtacgggactccctgaccttagctccatgaccgaggaagagcagatagcctatgccatgcagatgtcactgcagggggccgagttcggccaggctgagtcagctgatatcgacgcctcttccgccatggacacttctgagcctgccaaagaggaagatgattacgatgtcatgcaggaccccgaattccttcagtccgtcctggagaacctgcctggtgtggatccaaacaacgaggccatcagaaatgccatgggttctctcgcctctcaggcgacgaaagatggcaaaaaagataaaaaagaggaagacaaaaagtag

SEQ ID NO: 266517 - DNA, 1333 bp, Artificial Sequence
  derived and/or modified sequence
gagcgacgggccaattggaggagttgttgttaggccgtcccggagacccggtcgggagggaggaaggtggcaagatggtgttggaaagcactatggtgtgtgtggacaacagtgagtatatgcggaatggagacttcttacccaccaggctgcaggcccagcaggatgctgtcaacatagtttgtcattcaaagacccgcagcaaccctgagaacaacgtgggccttatcacactggctaatgactgtgaagtgctgaccacactcaccccagacactggccgtatcctgtccaagctacatactgtccaacccaagggcaagatcaccttctgcacgggcatccgcgtggcccatctggctctgaagcaccgacaaggcaagaatcacaagatgcgcatcattgcctttgtgggaagcccagtggaggacaatgagaaggatctggtgaaactggctaaacgcctcaagaaggagaaagtaaatgttgacattatcaattttggggaagaggaggtgaacacagaaaagctgacagcctttgtaaacacgttgaatggcaaagatggaaccggttctcatctggtgacagtgcctcctgggcccagtttggctgatgctctcatcagttctccgattttggctggtgaaggtggtgccatgctgggtcttggtgccagtgactttgaatttggagtagatcccagtgctgatcctgagctggccttggcccttcgtgtatctatggaagagcagcggcagcggcaggaggaggaggcccggcgggcagctgcagcttctgctgctgaggccgggattgctacgactgggactgaaggtgaaagagactcagacgatgccctgctgaagatgaccatcagccagcaagagtttggccgcactgggcttcctgacctaagcagtatgactgaggaagagcagattgcttatgccatgcagatgtccctgcagggagcagagtttggccaggcggaatcagcagacattgatgccagctcagctatggacacatctgagccagccaaggaggaggatgattacgacgtgatgcaggaccccgagttccttcagagtgtcctagagaacctcccaggtgtggatcccaacaatgaagccattcgaaatgctatgggctccctggcctcccaggccaccaaggacggcaagaaggacaagaaggaggaagacaagaagtgagactggagggaaagggtagctgagtctgcttaggggactgcatgggaagcacggaatatagggttagatgtgtgttatctgtaaccattacagcctaaataaagcttggcaacttt

SEQ ID NO: 266518 - DNA, 1143 bp, Artificial Sequence
  derived and/or modified sequence
atggtgctggagagcaccatggtgtgtgtggacaacagcgagtacatgagaaatggagacttcctgcccacccggctgcaggcccagcaggatgctgtgaacatcgtgtgccacagcaagaccaggagcaaccctgagaacaacgtgggcctcatcaccctggccaatgactgtgaggtgctgaccaccctgaccccagacaccggccgcatcctgagcaagctgcacacagtgcagcccaagggcaagatcaccttctgcaccggcatccgggtggcccacctggccctgaagcaccggcagggcaagaaccacaagatgaggatcatcgcctttgtgggcagccctgtggaggacaatgagaaggacctggtgaagctggccaagaggctgaagaaggagaaggtgaatgtggacatcatcaactttggagaggaggaggtgaacacagagaagctgacagcctttgtgaacaccctgaatggcaaggatggcaccggcagccacctggtgacagtgcccccaggccccagcctggctgatgccctgatcagcagccccatcctggccggggagggcggggccatgctgggcctgggcgccagtgactttgaatttggagtggaccccagcgctgaccctgagctggccctggccctgcgggtgtccatggaggagcagaggcagaggcaggaggaggaggcccggcgggctgctgctgccagcgctgctgaggccggcatcgccaccactggaacagaaggagagcgggacagtgatgatgccctgctgaagatgaccatcagccagcaggagtttggaagaacaggcctgcctgacctgagctccatgacagaggaggagcagatcgcctatgccatgcagatgagcctgcagggcgctgagtttggccaggccgagagcgctgacattgatgccagcagcgccatggacaccagcgagcccgccaaggaggaggatgattatgatgtgatgcaggaccctgagttcctgcagagcgtgctggagaacctgcccggggtggaccccaacaatgaggccatcagaaatgccatgggcagcctggccagccaggccaccaaggatggcaagaaggacaagaaggaggaggacaagaagtag

SEQ ID NO: 266519 - DNA, 1143 bp, Artificial Sequence
  derived and/or modified sequence
atggtgctggagagcaccatggtgtgcgtggacaacagcgagtacatgcgaaatggagatttcctgcccacacgtctgcaagcccaacaggacgccgttaatatcgtgtgtcacagcaagactaggagcaaccccgaaaataacgtcgggctgatcaccctcgccaacgattgtgaagtgcttacaacgctgactcctgatacggggagaatcctctccaagctccacacggtacaacccaagggcaagattaccttctgtactggcattagagtggcacacttagctttgaagcaccgccagggcaagaatcacaagatgaggatcatcgcattcgttgggagccctgtagaagataacgagaaggatctagtgaaactggcaaaaaggctcaaaaaggagaaagtcaacgttgatataatcaattttggggaggaggaagtcaataccgaaaagctcaccgcatttgtgaatacactgaacggcaaggacggaaccggttctcacctagtgaccgtcccaccaggcccttccttggcagatgccctgatttcttccccaatccttgctggggaagggggagccatgctagggctgggagcttcagattttgagtttggggtggacccgtctgccgaccccgaactggccctggcccttcgggtctcaatggaagaacaaagacagagacaggaggaagaagcaaggagggcagccgccgcgagcgctgcagaggccggtatcgccactacaggaacagaaggcgagagagattccgacgacgcgttactgaaaatgaccatcagccaacaggagtttggccgaactgggcttcccgatctgtcaagcatgaccgaagaggaacagatcgcttatgctatgcagatgtctctgcaaggcgctgaattcgggcaagccgagtccgcagacatcgatgctagctcagccatggatacctccgagcccgctaaggaagaggacgattatgacgtgatgcaggaccccgaattcctgcagagtgtcctggaaaatttacccggtgttgaccctaataatgaagccatacgcaacgccatgggcagcttagcctcccaggctacaaaggacggaaagaaagataagaaagaagaagacaaaaagtag

SEQ ID NO: 266520 - DNA, 1143 bp, Artificial Sequence
  derived and/or modified sequence
atggtgcttgagagcacaatggtctgtgttgataattcggaatacatgaggaatggcgattttctgcctactagactgcaggctcagcaggacgccgtgaatatcgtttgccacagcaaaactcggagtaatcctgagaataatgtggggctcatcacactggcgaacgactgtgaagttctgactactttgacacctgacacgggcagaatcttgtccaagcttcatactgttcagcctaaaggaaaaataaccttctgtaccggcattagggtggcccatctggccctgaagcaccgccagggcaagaatcataagatgaggatcatcgcgtttgtggggagccccgtggaagataacgaaaaggatctagttaaactcgctaaaagactgaagaaagaaaaagtcaacgtcgacataattaacttcggcgaagaagaggtcaatacagagaagctcactgcttttgttaacacactaaacgggaaggatggcaccggttctcatttagtgacagtcccgccaggtccaagtttggctgacgctctgataagttcccccatactggctggcgagggcggagcaatgcttgggctcggggcaagtgacttcgaattcggggtggacccatccgccgatccagaactggctctggctttgcgcgtttccatggaggaacagcgccagcgccaggaggaggaagctcggagggcagctgccgcatcagctgcggaggcaggcatagctaccacggggaccgaaggtgaacgcgatagcgacgacgcacttctgaagatgactatttctcagcaggaattcggtcgcacaggtttacctgaccttagctctatgacggaggaggagcaaatagcctatgctatgcagatgagcctgcagggcgctgaattcggacaggccgagtctgcagatattgatgcgtcttcagcgatggacacgtctgagcccgcaaaggaagaggacgactacgacgtgatgcaagaccccgagtttctccagagtgtgcttgaaaatcttcccggagttgaccccaataatgaggctattaggaatgcgatgggcagtctggcaagtcaggcgacgaaggacgggaagaaagacaagaaggaggaggacaaaaagtag

SEQ ID NO: 266521 - protein, 104 aa, Artificial Sequence
  derived and/or modified sequence
MGQCRSANAEDAQEFSDVERAIETLIKNFHQYSVEGGKETLTPSELRDLVTQQLPHLMPSNCGLEEKIANLGSCNDSKLEFRSFWELIGEAAKSVKLERPVRGH

SEQ ID NO: 266522 - DNA, 315 bp, Artificial Sequence
  derived and/or modified sequence
atgggtcaatgcagatccgctaacgcagaagatgcccaggaattcagcgacgtggagcgggccattgagacacttatcaagaatttccaccagtacagcgtagagggcggaaaggaaaccttgaccccaagcgagttaagggatctcgtgactcagcagctccctcatcttatgccatcaaattgtggcctcgaagagaaaattgcaaacctgggcagctgtaatgattccaagttagaattcagatcattttgggaattgattggcgaagctgctaaaagcgttaagctcgaacgtcctgtgcgtggacattag

SEQ ID NO: 266523 - DNA, 315 bp, Artificial Sequence
  derived and/or modified sequence
atgggacagtgtagaagcgctaacgccgaggacgctcaggagttcagcgacgtggagcgggcaattgaaactcttatcaagaattttcaccaatactcggtggagggcggaaaggagacactaacaccgtccgagctcagggacctagtgacccagcagctgccacacctgatgccgagtaactgcggattggaggagaagatcgccaatctcggtagttgcaacgattccaaactagaatttcgtagtttctgggagttgattggcgaggcagccaaatcggtgaagttggaacggcctgttcgcgggcactag

SEQ ID NO: 266524 - DNA, 315 bp, Artificial Sequence
  derived and/or modified sequence
atggggcagtgtagatctgctaacgcagaagatgctcaggagttttctgacgtggaaagggctattgagactttgattaagaactttcaccagtattccgttgagggaggtaaggaaaccctgacaccaagcgaactgcgcgacctggtcacccagcagcttccccacttgatgccttcaaattgtgggctggaggagaaaattgccaatttgggaagctgcaacgacagtaagctagagtttcgatccttttgggagttaatcggagaggcagcgaaaagcgtgaagctggaacgccctgtgagaggacattag

SEQ ID NO: 266525 - DNA, 315 bp, Artificial Sequence
  derived and/or modified sequence
atgggtcagtgtagaagcgcaaacgctgaggacgcacaagaattcagcgatgtcgagcgggccattgagacgctcatcaagaatttccaccaatattctgtggagggcggaaaagaaactctgaccccaagtgagctcagggatctggtaactcagcagctgccccacctgatgccttctaactgcggtcttgaagagaagattgctaatttgggctcttgtaatgactccaaacttgagttcaggtccttctgggagttgatcggggaggctgccaaatcagtgaaacttgagcgccctgtgcgcgggcactag

SEQ ID NO: 266526 - DNA, 315 bp, Artificial Sequence
  derived and/or modified sequence
atgggccagtgccgcagcgccaatgcagaagatgcccaggagttcagtgatgtggagcgggccatcgagaccctcatcaagaacttccaccagtacagcgtggagggcggcaaggagaccctgacccccagcgagctgcgggacctggtgacccagcagctgccccacctgatgcccagcaactgtggcctggaggagaagatcgccaacctgggcagctgcaatgacagcaagctggagttccgctccttctgggagctgattggagaggccgccaagtctgtgaagctggagaggcctgtgcggggccactag

SEQ ID NO: 266527 - DNA, 315 bp, Artificial Sequence
  derived and/or modified sequence
atgggccagtgccggagcgccaacgccgaggacgcccaggagttcagcgatgtcgaacgtgccattgagactttgatcaaaaacttccatcagtacagtgtcgaggggggcaaagagactctcactccctcggagctcagagacttggtgacacaacagctccctcacctcatgccttccaactgtgggctcgaagagaagatagccaatctgggatcatgcaatgatagtaagctcgagtttcgtagtttctgggaacttattggagaagctgcaaaaagtgtcaaactcgagcgccccgtgagaggccactag

SEQ ID NO: 266528 - DNA, 315 bp, Artificial Sequence
  derived and/or modified sequence
atgggccagtgccggagcgccaacgccgaggacgcccaggagttctctgacgtcgaacgggctatcgaaactctgatcaaaaacttccatcaatacagcgtcgagggaggaaaggaaactctgaccccttctgaactgagggatctcgtgacacagcagttgccccatttaatgccctcaaactgcggcctggaggagaagattgcaaacttgggatcctgtaatgattccaaactggaatttcgcagtttttgggagctaatcggagaagcggctaaaagcgttaaattggagcgaccagtgagaggtcattag

SEQ ID NO: 266529 - DNA, 315 bp, Artificial Sequence
  derived and/or modified sequence
atgggccagtgccggagcgccaacgccgaggacgcccaggagttcagtgatgtagaaagagctatcgagaccctgataaaaaatttccatcaatactcggtcgagggaggcaaagagacgctgacaccaagtgaactcagggacttagtcacccagcagctacctcacttgatgcccagtaactgcggactggaggagaagattgccaacttgggatcctgcaatgactccaagctggagttcaggagtttctgggaactcattggagaagccgcaaaatcagtgaaattagagcgccccgtgcgtggtcattag

SEQ ID NO: 266530 - DNA, 315 bp, Artificial Sequence
  derived and/or modified sequence
atgggccagtgccggagcgccaacgccgaggacgcccaggagttcagcgacgtggaacgggcgattgaaaccctaatcaagaacttccatcaatattctgtggaaggaggaaaggaaacactgaccccttccgagctgcgcgatctagtgacacagcaactccctcatttgatgccctcaaactgcggcttagaagaaaagatcgcaaaccttggcagctgtaacgactccaaactggagtttcgtagtttttgggagctgatcggcgaggccgcaaaatcagtgaaactggagcgccctgtccgtggtcactag

SEQ ID NO: 266531 - DNA, 315 bp, Artificial Sequence
  derived and/or modified sequence
atgggacagtgccgttcagctaacgcagaagatgctcaggagttttcagacgtggaacgcgctatcgaaactctcatcaagaacttccatcagtatagcgttgagggaggtaaggaaaccctgacacctagtgagttgagagacctggtcactcaacagcttccacatctgatgcctagtaactgtgggctggaggagaagatcgccaacctaggatcttgtaacgactctaagttagagtttcgcagtttttgggagctgatcggcgaagctgccaaatccgtgaaactggagaggccagtccgcggtcactag

SEQ ID NO: 266532 - DNA, 315 bp, Artificial Sequence
  derived and/or modified sequence
atggggcaatgccgctcagccaacgccgaagacgcccaggagtttagtgacgtggagcgcgcaatcgaaactctcatcaaaaatttccatcaatattcggtcgaaggcggaaaagagaccctcacaccctccgagcttagggacttggttacgcaacagctgcctcatctgatgccatcaaactgtgggctggaggaaaagattgcgaacctgggctcctgtaatgacagcaaacttgaatttaggagcttttgggagctcataggggaagccgctaagagcgtcaagctcgagcgcccagtccgaggacactag

SEQ ID NO: 266533 - DNA, 315 bp, Artificial Sequence
  derived and/or modified sequence
atggggcagtgccgtagcgccaatgctgaggatgctcaggagttttctgacgtagaaagggccatcgagaccctcatcaagaatttccatcaatattcagtcgaaggaggtaaggagacactgactccctctgagcttcgtgacctggtaacacagcagctcccccacttgatgccgtctaactgtggtctggaggagaaaatagctaatctgggatcatgtaacgacagcaaactcgaattccgctccttttgggagcttataggcgaggcagccaagagcgtaaagcttgagaggccagttcggggtcactag

SEQ ID NO: 266534 - DNA, 315 bp, Artificial Sequence
  derived and/or modified sequence
atgggccagtgccgcagcgcaaacgccgaagacgctcaggaattctcggatgttgagagagccatcgaaactctcattaagaatttccatcagtacagtgtggagggtgggaaggagaccctcacaccttcggagctgcgggacttggtgacccagcagctgcctcatctgatgccaagcaattgcggcctcgaggagaagatcgccaacctgggcagttgtaacgattcaaaacttgaattccgctccttctgggagctgattggggaggccgctaaaagcgttaaattggagcgaccggtgcggggacactag

SEQ ID NO: 266535 - DNA, 1017 bp, Artificial Sequence
  derived and/or modified sequence
gtctcagcggctgccaacagatcatgagccatcagctcctctggggccagctataggacaacagaactctcaccaaaggaccagacacagtgggcaccatgggacagtgtcggtcagccaacgcagaggatgctcaggaattcagtgatgtggagagggccattgagaccctcatcaagaactttcaccagtactccgtggagggtgggaaggagacgctgaccccttctgagctacgggacctggtcacccagcagctgccccatctcatgccgagcaactgtggcctggaagagaaaattgccaacctgggcagctgcaatgactctaaactggagttcaggagtttctgggagctgattggagaagcggccaagagtgtgaagctggagaggcctgtccgggggcactgagaactccctctggaattcttggggggtgttggggagagactgtgggcctggagataaaacttgtctcctctaccaccaccctgtaccctagcctgcacctgtcctcatctctgcaaagttcagcttccttccccaggtctctgtgcactctgtcttggatgctctggggagctcatgggtggaggagtctccaccagagggaggctcaggggactggttgggccagggatgaatatttgagggataaaaattgtgtaagagccaaagaattggtagtagggggagaacagagaggagctgggctatgggaaatgatttgaataatggagctgggaatatggctggatatctggtactaaaaaagggtctttaagaacctacttcctaatctcttccccaatccaaaccatagctgtctgtccagtgctctcttcctgcctccagctctgccccaggctcctcctagactctgtccctgggctagggcaggggaggagggagagcagggttgggggagaggctgaggagagtgtgacatgtggggagaggaccagctgggtgcttgggcattgacagaatgatggttgttttgtatcatttgatt

SEQ ID NO: 266536 - DNA, 1080 bp, Artificial Sequence
  derived and/or modified sequence
gaaacccaaggcttttcacccaaatatactgcctgctgtccagagggcacacttaggatcatgagccatcagctcctctggggccagctataggacaacagaactctcaccaaaggaccagacacagtgggcaccatgggacagtgtcggtcagccaacgcagaggatgctcaggaattcagtgatgtggagagggccattgagaccctcatcaagaactttcaccagtactccgtggagggtgggaaggagacgctgaccccttctgagctacgggacctggtcacccagcagctgccccatctcatgccgagcaactgtggcctggaagagaaaattgccaacctgggcagctgcaatgactctaaactggagttcaggagtttctgggagctgattggagaagcggccaagagtgtgaagctggagaggcctgtccgggggcactgagaactccctctggaattcttggggggtgttggggagagactgtgggcctggagataaaacttgtctcctctaccaccaccctgtaccctagcctgcacctgtcctcatctctgcaaagttcagcttccttccccaggtctctgtgcactctgtcttggatgctctggggagctcatgggtggaggagtctccaccagagggaggctcaggggactggttgggccagggatgaatatttgagggataaaaattgtgtaagagccaaagaattggtagtagggggagaacagagaggagctgggctatgggaaatgatttgaataatggagctgggaatatggctggatatctggtactaaaaaagggtctttaagaacctacttcctaatctcttccccaatccaaaccatagctgtctgtccagtgctctcttcctgcctccagctctgccccaggctcctcctagactctgtccctgggctagggcaggggaggagggagagcagggttgggggagaggctgaggagagtgtgacatgtggggagaggaccagctgggtgcttgggcattgacagaatgatggttgttttgtatcatttgattaataaaaaaaaatgaaaaaagtgaaa

SEQ ID NO: 266537 - DNA, 1218 bp, Artificial Sequence
  derived and/or modified sequence
ctctgggccgctgaggggagctgaagggaggtcaggcaaacactcactcaatctgcctccctccatcaggctgcccttctctggcttcctcctgatccaagttctctacattcatctctctgcctccaggactggtataagagctgagctcaggtgagctggctcctcctgtcttgtctcagcggctgccaacagatcatgagccatcagctcctctggggccagctataggacaacagaactctcaccaaaggaccagacacagtgggcaccatgggacagtgtcggtcagccaacgcagaggatgctcaggaattcagtgatgtggagagggccattgagaccctcatcaagaactttcaccagtactccgtggagggtgggaaggagacgctgaccccttctgagctacgggacctggtcacccagcagctgccccatctcatgccgagcaactgtggcctggaagagaaaattgccaacctgggcagctgcaatgactctaaactggagttcaggagtttctgggagctgattggagaagcggccaagagtgtgaagctggagaggcctgtccgggggcactgagaactccctctggaattcttggggggtgttggggagagactgtgggcctggagataaaacttgtctcctctaccaccaccctgtaccctagcctgcacctgtcctcatctctgcaaagttcagcttccttccccaggtctctgtgcactctgtcttggatgctctggggagctcatgggtggaggagtctccaccagagggaggctcaggggactggttgggccagggatgaatatttgagggataaaaattgtgtaagagccaaagaattggtagtagggggagaacagagaggagctgggctatgggaaatgatttgaataatggagctgggaatatggctggatatctggtactaaaaaagggtctttaagaacctacttcctaatctcttccccaatccaaaccatagctgtctgtccagtgctctcttcctgcctccagctctgccccaggctcctcctagactctgtccctgggctagggcaggggaggagggagagcagggttgggggagaggctgaggagagtgtgacatgtggggagaggaccagctgggtgcttgggcattgacagaatgatggttgttttgtatcatttgattaataaaaaaaaatgaaaaaagtgaaa

SEQ ID NO: 266538 - DNA, 1025 bp, Artificial Sequence
  derived and/or modified sequence
agatcatgagccatcagctcctctggggccagctataggacaacagaactctcaccaaaggaccagacacagtgggcaccatgggacagtgtcggtcagccaacgcagaggatgctcaggaattcagtgatgtggagagggccattgagaccctcatcaagaactttcaccagtactccgtggagggtgggaaggagacgctgaccccttctgagctacgggacctggtcacccagcagctgccccatctcatgccgagcaactgtggcctggaagagaaaattgccaacctgggcagctgcaatgactctaaactggagttcaggagtttctgggagctgattggagaagcggccaagagtgtgaagctggagaggcctgtccgggggcactgagaactccctctggaattcttggggggtgttggggagagactgtgggcctggagataaaacttgtctcctctaccaccaccctgtaccctagcctgcacctgtcctcatctctgcaaagttcagcttccttccccaggtctctgtgcactctgtcttggatgctctggggagctcatgggtggaggagtctccaccagagggaggctcaggggactggttgggccagggatgaatatttgagggataaaaattgtgtaagagccaaagaattggtagtagggggagaacagagaggagctgggctatgggaaatgatttgaataatggagctgggaatatggctggatatctggtactaaaaaagggtctttaagaacctacttcctaatctcttccccaatccaaaccatagctgtctgtccagtgctctcttcctgcctccagctctgccccaggctcctcctagactctgtccctgggctagggcaggggaggagggagagcagggttgggggagaggctgaggagagtgtgacatgtggggagaggaccagctgggtgcttgggcattgacagaatgatggttgttttgtatcatttgattaataaaaaaaaatgaaaaaagtgaaa

SEQ ID NO: 266539 - DNA, 315 bp, Artificial Sequence
  derived and/or modified sequence
atgggccagtgcagaagcgccaacgccgaggacgcccaggagttcagcgacgtggagagagccatcgagaccctgatcaagaacttccaccagtacagcgtggagggcggcaaggagaccctgacccccagcgagctgagagacctggtgacccagcagctgccccacctgatgcccagcaactgcggcctggaggagaagatcgccaacctgggcagctgcaacgacagcaagctggagttcagaagcttctgggagctgatcggcgaggccgccaagagcgtgaagctggagagacccgtgagaggccactag

SEQ ID NO: 266540 - protein, 1203 aa, Artificial Sequence
  derived and/or modified sequence
MEQAPNMAEPRGPVDHGVQIRFITEPVSGAEMGTLRRGGRRPAKDARASTYGVAVRVQGIAGQPFVVLNSGEKGGDSFGVQIKGANDQGASGALSSDLELPENPYSQVKGFPAPSQSSTSDEEPGAYWNGKLLRSHSQASLAGPGPVDPSNRSNSMLELAPKVASPGSTIDTAPLSSVDSLINKFDSQLGGQARGRTGRRTRMLPPEQRKRSKSLDSRLPRDTFEERERQSTNHWTSSTKYDNHVGTSKQPAQSQNLSPLSGFSRSRQTQDWVLQSFEEPRRSAQDPTMLQFKSTPDLLRDQQEAAPPGSVDHMKATIYGILREGSSESETSVRRKVSLVLEKMQPLVMVSSGSTKAVAGQGELTRKVEELQRKLDEEVKKRQKLEPSQVGLERQLEEKTEECSRLQELLERRKGEAQQSNKELQNMKRLLDQGEDLRHGLETQVMELQNKLKHVQGPEPAKEVLLKDLLETRELLEEVLEGKQRVEEQLRLRERELTALKGALKEEVASRDQEVEHVRQQYQRDTEQLRRSMQDATQDHAVLEAERQKMSALVRGLQRELEETSEETGHWQSMFQKNKEDLRATKQELLQLRMEKEEMEEELGEKIEVLQRELEQARASAGDTRQVEVLKKELLRTQEELKELQAERQSQEVAGRHRDRELEKQLAVLRVEADRGRELEEQNLQLQKTLQQLRQDCEEASKAKMVAEAEATVLGQRRAAVETTLRETQEENDEFRRRILGLEQQLKETRGLVDGGEAVEARLRDKLQRLEAEKQQLEEALNASQEEEGSLAAAKRALEARLEEAQRGLARLGQEQQTLNRALEEEGKQREVLRRGKAELEEQKRLLDRTVDRLNKELEKIGEDSKQALQQLQAQLEDYKEKARREVADAQRQAKDWASEAEKTSGGLSRLQDEIQRLRQALQASQAERDTARLDKELLAQRLQGLEQEAENKKRSQDDRARQLKGLEEKVSRLETELDEEKNTVELLTDRVNRGRDQVDQLRTELMQERSARQDLECDKISLERQNKDLKTRLASSEGFQKPSASLSQLESQNQLLQERLQAEEREKTVLQSTNRKLERKVKELSIQIEDERQHVNDQKDQLSLRVKALKRQVDEAEEEIERLDGLRKKAQREVEEQHEVNEQLQARIKSLEKDSWRKASRSAAESALKNEGLSSDEEFDSVYDPSSIASLLTESNLQTSSC

SEQ ID NO: 266541 - protein, 291 aa, Artificial Sequence
  derived and/or modified sequence
MEQAPNMAEPRGPVDHGVQIRFITEPVSGAEMGTLRRGGRRPAKDARASTYGVAVRVQGIAGQPFVVLNSGEKGGDSFGVQIKGANDQGASGALSSDLELPENPYSQVKGFPAPSQSSTSDEEPGAYWNGKLLRSHSQASLAGPGPVDPSNRSNSMLELAPKVASPGSTIDTAPLSSVDSLINKFDSQLGGQARGRTGRRTRMLPPEQRKRSKSLDSRLPRDTFEERERQSTNHWTSSTKYDNHVGTSKQPAQSQNLSPLSGFSRSRQTQDWVLQSFEEPRRSAQDPTMLQ

SEQ ID NO: 266542 - protein, 170 aa, Artificial Sequence
  derived and/or modified sequence
MEQAPNMAEPRGPVDHGVQIRFITEPVSGAEMGTLRRGGRRPAKDARASTYGVAVRVQGIAGQPFVVLNSGEKGGDSFGVQIKGANDQGASGALSSDLELPENPYSQVKGFPAPSQSSTSDEEPGAYWNGKLLRSHSQASLAGPGPVDPSNRSNSMLELAPKVASPGSTI

SEQ ID NO: 266543 - DNA, 5091 bp, Artificial Sequence
  derived and/or modified sequence
gaggacgagggggagggccggagctgcgcgtgctgctttgcccgagcccgagcccgagcccgagcccgagcccgagcccgagcccgaacgcaagcctgggagcgcggagcccggctagggactcctcctatttatggagcaggcacccaacatggctgagccccggggccccgtagaccatggagtccagattcgcttcatcacagagccagtgagtggtgcagagatgggcactctacgtcgaggtggacgacgcccagctaaggatgcaagagccagtacctacggggttgctgtgcgtgtgcagggaatcgctgggcagccctttgtggtgctcaacagtggggagaaaggcggtgactcctttggggtccaaatcaagggggccaatgaccaaggggcctcaggagctctgagctcagatttggaactccctgagaacccctactctcaggtcaagggatttcctgccccctcgcagagcagcacatctgatgaggagcctggggcctactggaatggaaagctactccgttcccactcccaggcctcactggcaggccctggcccagtggatcctagtaacagaagcaacagcatgctggagctagccccgaaagtggcttccccaggtagcaccattgacactgctcccctgtcttcagtggactcactcatcaacaagtttgacagtcaacttggaggccaggcccggggtcggactggccgccgaacacggatgctaccccctgaacagcgcaaacggagcaagagcctggacagccgcctcccacgggacacctttgaggaacgggagcgccagtccaccaaccactggacctctagcacaaaatatgacaaccatgtgggcacttcgaagcagccagcccagagccagaacctgagtcctctcagtggctttagccgttctcgtcagactcaggactgggtccttcagagttttgaggagccgcggaggagtgcacaggaccccaccatgctgcagttcaaatcaactccagacctccttcgagaccagcaggaggcagccccaccaggcagtgtggaccatatgaaggccaccatctatggcatcctgagggagggaagctcagaaagtgaaacctctgtgaggaggaaggttagtttggtgctggagaagatgcagcctctagtgatggtttcttctggttctactaaggccgtggcagggcagggtgagcttacccgaaaagtggaggagctacagcgaaagctggatgaagaggtgaagaagcggcagaagctagagccatcccaagttgggctggagcggcagctggaggagaaaacagaagagtgcagccgactgcaggagctgctggagaggaggaagggggaggcccagcagagcaacaaggagctccagaacatgaagcgcctcttggaccagggtgaagatttacgacatgggctggagacccaggtgatggagctgcagaacaagctgaaacatgtccagggtcctgagcctgctaaggaggtgttactgaaggacctgttagagacccgggaacttctggaagaggtcttggaggggaaacagcgagtagaggagcagctgaggctgcgggagcgggagttgacagccctgaagggggccctgaaagaggaggtagcctcccgtgaccaggaggtggaacatgtccggcagcagtaccagcgagacacagagcagctccgcaggagcatgcaagatgcaacccaggaccatgcagtgctggaggccgagaggcagaagatgtcagcccttgtgcgagggctgcagagggagctggaggagacttcagaggagacagggcattggcagagtatgttccagaagaacaaggaggatcttagagccaccaagcaggaactcctgcagctgcgaatggagaaggaggagatggaagaggagcttggagagaagatagaggtcttgcagagggaattagagcaggcccgagctagtgctggagatactcgccaggttgaggtgctcaagaaggagctgctccggacacaggaggagcttaaggaactgcaggcagaacggcagagccaggaggtggctgggcgacaccgggaccgggagttggagaagcagctggcggtcctgagggtcgaggctgatcgaggtcgggagctggaagaacagaacctccagctacaaaagaccctccagcaactgcgacaggactgtgaagaggcttccaaggctaagatggtggccgaggcagaggcaacagtgctggggcagcggcgggccgcagtggagacgacgcttcgggagacccaggaggaaaatgacgaattccgccggcgcatcctgggtttggagcagcagctgaaggagactcgaggtctggtggatggtggggaagcggtggaggcacgactacgggacaagctgcagcggctggaggcagagaaacagcagctggaggaggccctgaatgcgtcccaggaagaggaggggagtctggcagcagccaagcgggcactggaggcacgcctagaggaggctcagcgggggctggcccgcctggggcaggagcagcagacactgaaccgggccctggaggaggaagggaagcagcgggaggtgctccggcgaggcaaggctgagctggaggagcagaagcgtttgctggacaggactgtggaccgactgaacaaggagttggagaagatcggggaggactctaagcaagccctgcagcagctccaggcccagctggaggattataaggaaaaggcccggcgggaggtggcagatgcccagcgccaggccaaggattgggccagtgaggctgagaagacctctggaggactgagccgacttcaggatgagatccagaggctgcggcaggccctgcaggcatcccaggctgagcgggacacagcccggctggacaaagagctactggcccagcgactgcaggggctggagcaagaggcagagaacaagaagcgttcccaggacgacagggcccggcagctgaagggtctcgaggaaaaagtctcacggctggaaacagagttagatgaggagaagaacaccgtggagctgctaacagatcgggtgaatcgtggccgggaccaggtggatcagctgaggacagagctcatgcaggaaaggtctgctcggcaggacctggagtgtgacaaaatctccttggagagacagaacaaggacctgaagacccggttggccagctcagaaggcttccagaagcctagtgccagcctctctcagcttgagtcccagaatcagttgttgcaggagcggctacaggctgaagagagggagaagacagttctgcagtctaccaatcgaaaactggagcggaaagttaaagaactatccatccagattgaagacgagcggcagcatgtcaatgaccagaaagaccagctaagcctgagggtgaaggctttgaagcgtcaggtggatgaagcagaagaggaaattgagcgactggacggcctgaggaagaaggcccagcgtgaggtggaggagcagcatgaggtcaatgaacagctccaggcccggatcaagtctctggagaaggactcctggcgcaaagcttcccgctcagctgctgagtcagctctcaaaaacgaagggctgagctcagatgaggaattcgacagtgtctacgatccctcgtccattgcatcactgcttacggagagcaacctacagaccagctcctgttagctcgtggtcctcaaggactcagaaaccaggctcgaggcctatcccagcaagtgctgctctgctctgcccaccctgggttctgcattcctatgggtgacccaattattcagacctaagacagggaggggtcagagtgatggtgataaaaaaaaaaaatcatcagcaataagctgatagatggactttccactgtaggagtggacatttcaagccaactgagccttttcctcaagtgccgacacctccctcatctctcttatagtggaaggatggtcagcattaggctgatggggactgagaaggataggaagggatagaaattgccatgtgtataaagctttattctttagcccttaaccctaaggctcagggaaataccctatgttattgtgctccctggattcctgcaactcattttccttccactctggagcagggtgaggggaatgttatgggtaacagacatgcaggcatggctctacccatttctttgcacaagtatggggcccatgtggtagtccccatacccctccagttcctatatttttgtcttcttcctttcccctctttgccattcctaccttgcatttttcctgtcagtgccttagccaaggcaaggagataaggatgctcttcttgctttttatatctgcacattcatacctctccaaagaccagcttttccccagccagggccctcagccttccctgctgccccagtgattgattgagagagctgttggggtttctctgccaatgacccctgggagagggactttggtagggtcatgataaagtggcgggggtctggtcctgctcagggttttcatccttcctcctctccctcctctgtgactgtggatatggttataaggtggttgcacctgggagccctgacaactggctgcacaaattccaaaagtaaaggtgtcagtccctgtggccttccttggggcttctctgaccacatgtgcccaacttcaataagagaaccaagggaccctcattttctgaggtgcttggctctgattcagggctttgcaaggggttagaagctgactgtaaaaatgggaagaggcaacggaagacatttatttctcctttggattttggggagaaccaagccctggtagggaagaggtaagggggatgattcacctccatatttcctaagcaggttgtatagggagccggtggcaggaggaaggctgttttcacaaatgacttgtaatgtcgtgattaaaaaaattcctatattcttctgcaaatcaaacgttctttcccaatccaatccagccttggttttattttaaattaaatattaaaattacacatttatattgaaa

SEQ ID NO: 266544 - DNA, 1139 bp, Artificial Sequence
  derived and/or modified sequence
agggagctccgaggacgagggggagggccggagctgcgcgtgctgctttgcccgagcccgagcccgagcccgagcccgagcccgagcccgagcccgaacgcaagcctgggagcgcggagcccggctagggtgaagttttgcttttgtcacccaagctggagtgcagtggcgcaatctcggctcactgcaacctccacctcccgggttcaagcaattcttctgcttcagcctcctgagtagctgggattacaggactcctcctatttatggagcaggcacccaacatggctgagccccggggccccgtagaccatggagtccagattcgcttcatcacagagccagtgagtggtgcagagatgggcactctacgtcgaggtggacgacgcccagctaaggatgcaagagccagtacctacggggttgctgtgcgtgtgcagggaatcgctgggcagccctttgtggtgctcaacagtggggagaaaggcggtgactcctttggggtccaaatcaagggggccaatgaccaaggggcctcaggagctctgagctcagatttggaactccctgagaacccctactctcaggtcaagggatttcctgccccctcgcagagcagcacatctgatgaggagcctggggcctactggaatggaaagctactccgttcccactcccaggcctcactggcaggccctggcccagtggatcctagtaacagaagcaacagcatgctggagctagccccgaaagtggcttccccaggtagcaccattgacactgctcccctgtcttcagtggactcactcatcaacaagtttgacagtcaacttggaggccaggcccggggtcggactggccgccgaacacggatgctaccccctgaacagcgcaaacggagcaagagcctggacagccgcctcccacgggacacctttgaggaacgggagcgccagtccaccaaccactggacctctagcacaaaatatgacaaccatgtgggcacttcgaagcagccagcccagagccagaacctgagtcctctcagtggctttagccgttctcgtcagactcaggactgggtccttcagagttttgaggagccgcggaggagtgcacaggaccccaccatgctgcag

SEQ ID NO: 266545 - DNA, 589 bp, Artificial Sequence
  derived and/or modified sequence
cgtcgggggacaacggagatattttctgcagaaagtgacgaaagagcattctggttcctgcagaggactcctcctatttatggagcaggcacccaacatggctgagccccggggccccgtagaccatggagtccagattcgcttcatcacagagccagtgagtggtgcagagatgggcactctacgtcgaggtggacgacgcccagctaaggatgcaagagccagtacctacggggttgctgtgcgtgtgcagggaatcgctgggcagccctttgtggtgctcaacagtggggagaaaggcggtgactcctttggggtccaaatcaagggggccaatgaccaaggggcctcaggagctctgagctcagatttggaactccctgagaacccctactctcaggtcaagggatttcctgccccctcgcagagcagcacatctgatgaggagcctggggcctactggaatggaaagctactccgttcccactcccaggcctcactggcaggccctggcccagtggatcctagtaacagaagcaacagcatgctggagctagccccgaaagtggcttccccaggtagcaccatt

SEQ ID NO: 266546 - DNA, 564 bp, Artificial Sequence
  derived and/or modified sequence
tgggatcagcatccctactttttgagaggctaactctgaggactcctcctatttatggagcaggcacccaacatggctgagccccggggccccgtagaccatggagtccagattcgcttcatcacagagccagtgagtggtgcagagatgggcactctacgtcgaggtggacgacgcccagctaaggatgcaagagccagtacctacggggttgctgtgcgtgtgcagggaatcgctgggcagccctttgtggtgctcaacagtggggagaaaggcggtgactcctttggggtccaaatcaagggggccaatgaccaaggggcctcaggagctctgagctcagatttggaactccctgagaacccctactctcaggtcaagggatttcctgccccctcgcagagcagcacatctgatgaggagcctggggcctactggaatggaaagctactccgttcccactcccaggcctcactggcaggccctggcccagtggatcctagtaacagaagcaacagcatgctggagctagccccgaaagtggcttccccaggtagcaccatt

SEQ ID NO: 266547 - DNA, 3612 bp, Artificial Sequence
  derived and/or modified sequence
atggagcaggcccccaacatggccgagcccagaggccccgtggaccacggcgtgcagatcagattcatcaccgagcccgtgagcggcgccgagatgggcaccctgagaagaggcggcagaagacccgccaaggacgccagagccagcacctacggcgtggccgtgagagtgcagggcatcgccggccagcccttcgtggtgctgaacagcggcgagaagggcggcgacagcttcggcgtgcagatcaagggcgccaacgaccagggcgccagcggcgccctgagcagcgacctggagctgcccgagaacccctacagccaggtgaagggcttccccgcccccagccagagcagcaccagcgacgaggagcccggcgcctactggaacggcaagctgctgagaagccacagccaggccagcctggccggccccggccccgtggaccccagcaacagaagcaacagcatgctggagctggcccccaaggtggccagccccggcagcaccatcgacaccgcccccctgagcagcgtggacagcctgatcaacaagttcgacagccagctgggcggccaggccagaggcagaaccggcagaagaaccagaatgctgccccccgagcagagaaagagaagcaagagcctggacagcagactgcccagagacaccttcgaggagagagagagacagagcaccaaccactggaccagcagcaccaagtacgacaaccacgtgggcaccagcaagcagcccgcccagagccagaacctgagccccctgagcggcttcagcagaagcagacagacccaggactgggtgctgcagagcttcgaggagcccagaagaagcgcccaggaccccaccatgctgcagttcaagagcacccccgacctgctgagagaccagcaggaggccgccccccccggcagcgtggaccacatgaaggccaccatctacggcatcctgagagagggcagcagcgagagcgagaccagcgtgagaagaaaggtgagcctggtgctggagaagatgcagcccctggtgatggtgagcagcggcagcaccaaggccgtggccggccagggcgagctgaccagaaaggtggaggagctgcagagaaagctggacgaggaggtgaagaagagacagaagctggagcccagccaggtgggcctggagagacagctggaggagaagaccgaggagtgcagcagactgcaggagctgctggagagaagaaagggcgaggcccagcagagcaacaaggagctgcagaacatgaagagactgctggaccagggcgaggacctgagacacggcctggagacccaggtgatggagctgcagaacaagctgaagcacgtgcagggccccgagcccgccaaggaggtgctgctgaaggacctgctggagaccagagagctgctggaggaggtgctggagggcaagcagagagtggaggagcagctgagactgagagagagagagctgaccgccctgaagggcgccctgaaggaggaggtggccagcagagaccaggaggtggagcacgtgagacagcagtaccagagagacaccgagcagctgagaagaagcatgcaggacgccacccaggaccacgccgtgctggaggccgagagacagaagatgagcgccctggtgagaggcctgcagagagagctggaggagaccagcgaggagaccggccactggcagagcatgttccagaagaacaaggaggacctgagagccaccaagcaggagctgctgcagctgagaatggagaaggaggagatggaggaggagctgggcgagaagatcgaggtgctgcagagagagctggagcaggccagagccagcgccggcgacaccagacaggtggaggtgctgaagaaggagctgctgagaacccaggaggagctgaaggagctgcaggccgagagacagagccaggaggtggccggcagacacagagacagagagctggagaagcagctggccgtgctgagagtggaggccgacagaggcagagagctggaggagcagaacctgcagctgcagaagaccctgcagcagctgagacaggactgcgaggaggccagcaaggccaagatggtggccgaggccgaggccaccgtgctgggccagagaagagccgccgtggagaccaccctgagagagacccaggaggagaacgacgagttcagaagaagaatcctgggcctggagcagcagctgaaggagaccagaggcctggtggacggcggcgaggccgtggaggccagactgagagacaagctgcagagactggaggccgagaagcagcagctggaggaggccctgaacgccagccaggaggaggagggcagcctggccgccgccaagagagccctggaggccagactggaggaggcccagagaggcctggccagactgggccaggagcagcagaccctgaacagagccctggaggaggagggcaagcagagagaggtgctgagaagaggcaaggccgagctggaggagcagaagagactgctggacagaaccgtggacagactgaacaaggagctggagaagatcggcgaggacagcaagcaggccctgcagcagctgcaggcccagctggaggactacaaggagaaggccagaagagaggtggccgacgcccagagacaggccaaggactgggccagcgaggccgagaagaccagcggcggcctgagcagactgcaggacgagatccagagactgagacaggccctgcaggccagccaggccgagagagacaccgccagactggacaaggagctgctggcccagagactgcagggcctggagcaggaggccgagaacaagaagagaagccaggacgacagagccagacagctgaagggcctggaggagaaggtgagcagactggagaccgagctggacgaggagaagaacaccgtggagctgctgaccgacagagtgaacagaggcagagaccaggtggaccagctgagaaccgagctgatgcaggagagaagcgccagacaggacctggagtgcgacaagatcagcctggagagacagaacaaggacctgaagaccagactggccagcagcgagggcttccagaagcccagcgccagcctgagccagctggagagccagaaccagctgctgcaggagagactgcaggccgaggagagagagaagaccgtgctgcagagcaccaacagaaagctggagagaaaggtgaaggagctgagcatccagatcgaggacgagagacagcacgtgaacgaccagaaggaccagctgagcctgagagtgaaggccctgaagagacaggtggacgaggccgaggaggagatcgagagactggacggcctgagaaagaaggcccagagagaggtggaggagcagcacgaggtgaacgagcagctgcaggccagaatcaagagcctggagaaggacagctggagaaaggccagcagaagcgccgccgagagcgccctgaagaacgagggcctgagcagcgacgaggagttcgacagcgtgtacgaccccagcagcatcgccagcctgctgaccgagagcaacctgcagaccagcagctgctag

SEQ ID NO: 266548 - DNA, 876 bp, Artificial Sequence
  derived and/or modified sequence
atggagcaggcccccaacatggccgagcccagaggccccgtggaccacggcgtgcagatcagattcatcaccgagcccgtgagcggcgccgagatgggcaccctgagaagaggcggcagaagacccgccaaggacgccagagccagcacctacggcgtggccgtgagagtgcagggcatcgccggccagcccttcgtggtgctgaacagcggcgagaagggcggcgacagcttcggcgtgcagatcaagggcgccaacgaccagggcgccagcggcgccctgagcagcgacctggagctgcccgagaacccctacagccaggtgaagggcttccccgcccccagccagagcagcaccagcgacgaggagcccggcgcctactggaacggcaagctgctgagaagccacagccaggccagcctggccggccccggccccgtggaccccagcaacagaagcaacagcatgctggagctggcccccaaggtggccagccccggcagcaccatcgacaccgcccccctgagcagcgtggacagcctgatcaacaagttcgacagccagctgggcggccaggccagaggcagaaccggcagaagaaccagaatgctgccccccgagcagagaaagagaagcaagagcctggacagcagactgcccagagacaccttcgaggagagagagagacagagcaccaaccactggaccagcagcaccaagtacgacaaccacgtgggcaccagcaagcagcccgcccagagccagaacctgagccccctgagcggcttcagcagaagcagacagacccaggactgggtgctgcagagcttcgaggagcccagaagaagcgcccaggaccccaccatgctgcagtag

SEQ ID NO: 266549 - DNA, 513 bp, Artificial Sequence
  derived and/or modified sequence
atggagcaggcccccaacatggccgagcccagaggccccgtggaccacggcgtgcagatcagattcatcaccgagcccgtgagcggcgccgagatgggcaccctgagaagaggcggcagaagacccgccaaggacgccagagccagcacctacggcgtggccgtgagagtgcagggcatcgccggccagcccttcgtggtgctgaacagcggcgagaagggcggcgacagcttcggcgtgcagatcaagggcgccaacgaccagggcgccagcggcgccctgagcagcgacctggagctgcccgagaacccctacagccaggtgaagggcttccccgcccccagccagagcagcaccagcgacgaggagcccggcgcctactggaacggcaagctgctgagaagccacagccaggccagcctggccggccccggccccgtggaccccagcaacagaagcaacagcatgctggagctggcccccaaggtggccagccccggcagcaccatctag

SEQ ID NO: 266550 - DNA, 3612 bp, Artificial Sequence
  derived and/or modified sequence
atggagcaggcgcctaacatggctgagcctcgaggaccagtggatcatggcgtccagattcgatttattactgagccggtctccggcgcggagatggggaccctgcggaggggaggtcgcagaccagccaaagatgcaagggcttcgacctatggtgtggctgtgagggtgcagggcatcgctggccagcccttcgtggtattaaacagtggcgaaaagggaggcgattctttcggcgtccagatcaagggagcaaacgaccaaggcgctagtggtgccttatcctccgacctggagttaccagagaacccttactcacaagtcaaaggtttccccgccccgtctcaatcctcaaccagcgacgaggagcccggtgcctactggaatgggaagttattacgatcacactcccaggctagcttagccgggcctggccccgtggatccgtccaaccgatctaatagcatgttagaacttgcaccgaaggtggcatctcctggttccacaatcgatacagccccactgtctagtgttgattcactcatcaataagttcgattcccagctgggcggtcaggcaagaggacgcaccgggcggcgaacccgaatgctgcctcctgaacagcggaaaagatccaaaagtctggattctaggctgccccgcgacactttcgaagagagagaacggcagagcactaatcactggacttcctccaccaagtacgataatcatgtgggcacaagcaaacagcctgcacagtctcagaatctttcccccctctcggggttctctcgctcaagacagacccaggactgggtcttgcagagcttcgaagaaccaagacgttctgctcaggatccgacaatgctgcagtttaagagtacccccgacttgttacgcgaccagcaagaggccgccccacccgggtctgttgaccatatgaaagcaacgatctacggaatcctgcgagagggttcatcagagagtgaaacaagtgtgcgtaggaaggtgtctttagtcctggagaagatgcagcctctcgtgatggtctcgagcggcagtactaaagcagtggccggacagggggaactcactaggaaggtggaggaacttcaaaggaagctcgatgaagaggtgaaaaagcggcagaagctggagccaagccaggtgggtctcgagagacagctggaggagaaaactgaagagtgttctaggctgcaggagttgttggagaggagaaagggcgaagcccagcagtctaataaggagctacagaatatgaaaagactcttggatcagggcgaagatctgcggcacggcctggagacccaggttatggaactgcagaacaagctgaaacacgtacagggtccggagcccgcaaaggaggtgctccttaaagacctcctggagactcgcgagcttctggaggaagttctggagggaaagcaacgggttgaagaacaattgaggctaagggagagagaattgactgcgctcaagggagccttgaaggaggaggtcgcctccagggaccaagaagtggaacacgtccgacagcagtatcaaagggataccgaacagctcagacgaagcatgcaagatgccacacaggatcatgcagtgctagaggctgaacgccagaaaatgtctgcactggtcaggggattacagcgggagttggaagaaacctcagaggagaccggccattggcagtccatgttccagaagaataaggaagacttgagagccacaaaacaagaactcctgcagctacgcatggaaaaagaggaaatggaagaggagctgggtgagaaaatagaggttcttcagagagaactggaacaagcccgcgcatccgccggggacacacgacaggtcgaggtactgaagaaggagctgttgaggacacaggaagaattgaaggaattgcaggcggaacgccagagtcaggaagtcgcagggcgacaccgtgaccgggagctcgaaaaacagttggcggtgctgagggttgaggccgatagaggcagagaactggaagagcagaatcttcagctccagaaaacgctgcagcaactgcgccaagactgtgaagaagcatcgaaggccaaaatggttgccgaggctgaggcaacggtacttgggcagcggcgggcagcggtggagaccacgttgcgggaaacacaggaggagaatgacgaatttaggaggcggatcttagggttggagcagcagttgaaagagacccgcggcctcgtagacggcggcgaagccgttgaagctcgactgcgggacaaactgcagcgactcgaggctgagaagcagcagctcgaggaggccttaaatgcgagccaggaagaggagggctcacttgccgcagccaaaagggccctggaagccaggcttgaggaagcgcaacggggcctggccagactgggacaagagcagcagaccctgaatcgcgccctcgaagaagaggggaagcaacgcgaagtgcttagaagagggaaggccgagctagaggaacagaagcgactcctcgataggacggtagatagactcaacaaggagctggaaaagatcggggaagactcaaagcaggccttgcagcagctccaggctcagttagaagattacaaagagaaggcccggagggaggtcgcggacgcacagcgacaagccaaggattgggcctcagaggccgagaagacgtccggagggctctccaggctccaagacgaaattcaacgattacgtcaagcgctgcaagcatcacaggctgagagggacactgctagacttgataaggagctattagcccagcgtctacaggggttggagcaagaagcagaaaacaaaaaacgaagccaggatgatcgcgccaggcagctgaagggccttgaggagaaggtgtccaggcttgagactgaacttgacgaggagaagaacacagtggagctgctaaccgaccgcgtgaatcgcggcagggatcaggtggaccagctcagaactgaacttatgcaagagcgcagcgctcgtcaagacctggagtgtgacaaaatctccctggagagacagaacaaggacctcaagactcggttggcttcgtccgagggtttccagaaacccagtgcctctctcagccagctagagtcccagaaccagctgctgcaggagcggttgcaggccgaggagcgagagaaaaccgtgcttcagtctacaaacagaaagctggagcggaaggtcaaggagctgagcatccaaatagaagatgaacgtcagcacgtgaacgatcaaaaggaccagctgtcactacgggtaaaggccttgaaacgacaggtggatgaagcggaggaggagatcgagcgtctggacggcctccgcaagaaagcccagcgggaggtcgaagaacagcacgaggtgaacgaacaactgcaagcgcgcatcaaatccctcgaaaaggatagctggcgtaaagcaagccggtcggccgccgagtccgcattgaaaaacgagggcctgtctagtgacgaagagttcgattccgtttatgacccgagctccattgccagcttgcttacagaatccaatcttcagaccagctcctgctag

SEQ ID NO: 266551 - DNA, 876 bp, Artificial Sequence
  derived and/or modified sequence
atggaacaagcacctaatatggccgaaccaagaggcccggtcgaccatggggtacagattagattcattacggaaccagtttctggggctgaaatgggtacattgcggagaggaggccgtagacctgcaaaggatgcccgtgctagcacatatggagtggcagtccgtgttcaaggcatcgccggtcagccttttgtggttttgaatagtggagagaagggcggtgactccttcggagtccagattaaaggagccaatgaccagggtgcttccggggcactgtcctctgatctcgagctccctgagaacccatatagtcaggtgaaggggtttcctgctccctcccaatcttcaactagcgacgaggagccaggggcttattggaacggtaaactgctgcgcagtcacagccaggcctcactcgccggcccgggccctgtggacccttctaaccgctcaaactccatgctagaattagcccctaaagttgccagccccgggtctacaatagatactgcccccctgtcttccgtcgactctttaattaataaatttgactcccagctgggtgggcaggcccgcgggagaactggacgtcggacccgaatgctgccccctgagcagcgcaagcgtagtaagagtttggacagccgccttcctagagacacattcgaggagcgggagcggcagtctacaaatcattggacatctagtactaaatacgacaatcacgtgggcacctctaagcagccagcgcagtcccagaatctgtctccactcagcggtttctcgcgatctcgtcaaactcaggattgggttttacagtcttttgaagagcctaggaggtctgcacaggatccgacaatgctgcagtag

SEQ ID NO: 266552 - DNA, 513 bp, Artificial Sequence
  derived and/or modified sequence
atggagcaggcgccgaatatggccgagccccggggacccgttgaccatggggtccaaatacggtttataaccgaacctgtctctggagctgaaatgggtacgctgcgccgtggcggcagacgccccgccaaagacgcgagggcaagtacatatggcgtggccgttcgggttcagggcatagccgggcaaccatttgtggtcttgaatagcggagaaaagggcggagatagctttggagtccagataaagggcgcaaacgaccaaggggctagcggtgccttgagctctgatctagagctgccagaaaatccatactctcaggtcaaaggattcccggccccgtctcagagcagcacaagcgatgaagaaccaggcgcgtactggaacggaaaacttctgagaagccatagccaggcctccctggcagggccaggcccagtggacccgtctaataggagcaactctatgcttgaactggctccaaaagtggcttccccaggttcaacaatctag

SEQ ID NO: 266553 - DNA, 513 bp, Artificial Sequence
  derived and/or modified sequence
atggagcaggctccgaatatggccgaaccaaggggacccgtggatcacggcgtgcaaattaggtttataacggagcccgtgtcgggggctgaaatggggacgctgaggcgcggcgggcggcggcccgccaaagacgcccgcgcctccacctacggagtggccgtccgagtccagggaatcgcagggcagcccttcgtcgttcttaattcaggtgagaaaggcggagattctttcggagttcaaattaagggcgccaatgaccagggcgccagcggcgccctctcaagcgacctggaacttccagagaacccttattcccaggtgaaggggtttcccgctccttcgcagtccagcacatccgatgaggagccaggcgcatattggaacgggaagctcctcagatctcattctcaggcttccctcgctgggcccggtcccgtggacccaagcaaccgtagtaattcaatgttagagctggcgcccaaagtggcatcccccggttcaacgatatag

SEQ ID NO: 266554 - DNA, 3612 bp, Artificial Sequence
  derived and/or modified sequence
atggagcaggcccccaacatggccgagccccggggccctgtggaccacggcgtgcagatccgcttcatcacagagcctgtgtctggagctgagatgggcaccctgcggcggggcggccggcggcctgccaaggatgcccgggccagcacctatggagtggccgtgcgggtgcagggcattgctggccagccctttgtggtgctgaacagcggggagaagggcggggacagctttggagtgcagatcaagggggccaatgaccagggcgccagcggggccctgagcagtgacctggagctgcctgagaacccctacagccaggtgaagggcttccctgcccccagccagagcagcaccagtgatgaggagcccggggcctactggaatggcaagctgctgcggagccacagccaggccagcctggccggccctggccctgtggaccccagcaacagaagcaacagcatgctggagctggcccccaaggtggccagccctggcagcaccatcgacacagcccccctgagctctgtggacagcctcatcaacaagtttgacagccagctgggcggccaggcccggggccgcactggaagaaggaccaggatgctgcccccagagcagaggaagaggagcaagagcctggacagccggctgccccgggacacctttgaggagcgggagcggcagagcaccaaccactggaccagcagcaccaagtatgacaaccacgtgggcaccagcaagcagcctgcccagagccagaacctgagccccctgagcggcttcagccgcagccggcagacccaggactgggtgctgcagagctttgaggagcccaggagaagtgcccaggaccccaccatgctgcagttcaagagcaccccagacctgctgcgggaccagcaggaggccgcccctcctggctctgtggaccacatgaaggccaccatctacggcatcctgcgggagggcagcagcgagagcgagacctctgtgcggaggaaggtgtccctggtgctggagaagatgcagcccctggtgatggtgagcagcggcagcaccaaggctgtggccggccagggcgagctgaccaggaaggtggaggagctgcagaggaagctggatgaggaggtgaagaagaggcagaagctggagcccagccaggtgggcctggagcggcagctggaggagaagacagaggagtgcagccggctgcaggagctgctggagaggaggaagggggaggcccagcagagcaacaaggagctgcagaacatgaagaggctgctggaccagggcgaggacctgcggcacggcctggagacccaggtgatggagctgcagaacaagctgaagcacgtgcagggccctgagcccgccaaggaggtgctgctgaaggacctgctggagacccgggagctgctggaggaggtgctggagggcaagcagagggtggaggagcagctgcggctgcgggagcgggagctgacagccctgaagggggccctgaaggaggaggtggccagccgggaccaggaggtggagcacgtgcggcagcagtaccagagggacacagagcagctgcggcgctccatgcaggatgccacccaggaccatgctgtgctggaggccgagcggcagaagatgtctgccctggtgcggggcctgcagcgggagctggaggagaccagcgaggagaccggccactggcagagcatgttccagaagaacaaggaggacctgcgggccaccaagcaggagctgctgcagctgaggatggagaaggaggagatggaggaggagctgggggagaagattgaggtgctgcagcgggagctggagcaggcccgggccagcgctggggacacccggcaggtggaggtgctgaagaaggagctgctgcggacccaggaggagctgaaggagctgcaggccgagcggcagagccaggaggtggccggccgccaccgggaccgggagctggagaagcagctggccgtgctgcgggtggaggccgaccggggccgggagctggaggagcagaacctgcagctgcagaagaccctgcagcagctgcggcaggactgtgaggaggccagcaaggccaagatggtggccgaggccgaggccaccgtgctgggccagaggagagctgctgtggagaccaccctgcgggagacccaggaggagaatgatgagttcagaagacgcatcctgggcctggagcagcagctgaaggagacccggggcctggtggatggaggagaggccgtggaggcccggctgcgggacaagctgcagaggctggaggccgagaagcagcagctggaggaggccctgaatgccagccaggaggaggagggcagcctggccgccgccaagagggccctggaggcccggctggaggaggcccagaggggcctggcccggctgggccaggagcagcagaccctgaacagagccctggaggaggagggcaagcagcgggaggtgctgcggcggggcaaggccgagctggaggagcagaagaggctgctggacagaacagtggaccggctgaacaaggagctggagaagattggagaggacagcaagcaggccctgcagcagctgcaggcccagctggaggactacaaggagaaggcccggcgggaggtggctgatgcccagaggcaggccaaggactgggccagcgaggccgagaagaccagcggcggcctgagccggctgcaggatgagatccagaggctgcggcaggccctgcaggccagccaggccgagcgggacacagcccggctggacaaggagctgctggcccagaggctgcagggcctggagcaggaggccgagaacaagaagaggagccaggatgaccgggcccggcagctgaagggcctggaggagaaggtgtcccggctggagacagagctggatgaggagaagaacacagtggagctgctgacagacagagtgaacagaggccgggaccaggtggaccagctgaggacagagctgatgcaggagaggtctgcccggcaggacctggagtgtgacaagatcagcctggagcggcagaacaaggacctgaagacccggctggccagcagcgagggcttccagaagcccagcgccagcctgagccagctggagagccagaaccagctgctgcaggagcggctgcaggccgaggagcgggagaagacagtgctgcagagcaccaacaggaagctggagaggaaggtgaaggagctgagcatccagattgaagatgagcggcagcacgtgaatgaccagaaggaccagctgagcctgcgggtgaaggccctgaagaggcaggtggatgaagctgaggaggagattgagcggctggatggcctgaggaagaaggcccagcgggaggtggaggagcagcacgaggtgaatgagcagctgcaggcccgcatcaagagcctggagaaggacagctggaggaaggccagccgctctgctgctgagagcgccctgaagaatgaaggcctgagcagtgatgaggagtttgacagcgtgtatgaccccagcagcatcgccagcctgctgacagagagcaacctgcagaccagcagctgctag

SEQ ID NO: 266555 - DNA, 876 bp, Artificial Sequence
  derived and/or modified sequence
atggagcaggcccccaacatggccgagccccggggccctgtggaccacggcgtgcagatccgcttcatcacagagcctgtgtctggagctgagatgggcaccctgcggcggggcggccggcggcctgccaaggatgcccgggccagcacctatggagtggccgtgcgggtgcagggcattgctggccagccctttgtggtgctgaacagcggggagaagggcggggacagctttggagtgcagatcaagggggccaatgaccagggcgccagcggggccctgagcagtgacctggagctgcctgagaacccctacagccaggtgaagggcttccctgcccccagccagagcagcaccagtgatgaggagcccggggcctactggaatggcaagctgctgcggagccacagccaggccagcctggccggccctggccctgtggaccccagcaacagaagcaacagcatgctggagctggcccccaaggtggccagccctggcagcaccatcgacacagcccccctgagctctgtggacagcctcatcaacaagtttgacagccagctgggcggccaggcccggggccgcactggaagaaggaccaggatgctgcccccagagcagaggaagaggagcaagagcctggacagccggctgccccgggacacctttgaggagcgggagcggcagagcaccaaccactggaccagcagcaccaagtatgacaaccacgtgggcaccagcaagcagcctgcccagagccagaacctgagccccctgagcggcttcagccgcagccggcagacccaggactgggtgctgcagagctttgaggagcccaggagaagtgcccaggaccccaccatgctgcagtag

SEQ ID NO: 266556 - DNA, 513 bp, Artificial Sequence
  derived and/or modified sequence
atggagcaggcccccaacatggccgagccccggggccctgtggaccacggcgtgcagatccgcttcatcacagagcctgtgtctggagctgagatgggcaccctgcggcggggcggccggcggcctgccaaggatgcccgggccagcacctatggagtggccgtgcgggtgcagggcattgctggccagccctttgtggtgctgaacagcggggagaagggcggggacagctttggagtgcagatcaagggggccaatgaccagggcgccagcggggccctgagcagtgacctggagctgcctgagaacccctacagccaggtgaagggcttccctgcccccagccagagcagcaccagtgatgaggagcccggggcctactggaatggcaagctgctgcggagccacagccaggccagcctggccggccctggccctgtggaccccagcaacagaagcaacagcatgctggagctggcccccaaggtggccagccctggcagcaccatctag

SEQ ID NO: 266557 - DNA, 3612 bp, Artificial Sequence
  derived and/or modified sequence
atggagcaggcccccaacatggccgagccccggggccccgtggaccacggcgttcagatcaggtttatcaccgagccagtgtccggggcggagatgggaacactgaggcgcggcggacgcagaccggcaaaggatgcgcgggcgtccacttatggcgttgctgtacgggtgcagggcattgccggccagccttttgtggtgctcaattcaggagagaaaggtggcgattctttcggagtgcagatcaagggcgctaacgaccagggtgcctctggggctctgagcagtgatctagagttgcctgaaaatccgtattcccaagttaaaggattccccgctccaagccagagctcaacatcagatgaggagcccggcgcctattggaacggcaagctgctgcggtcccactctcaagctagtttagcaggccccggacccgtcgaccccagtaatcggtcaaacagcatgttggagttggctcccaaagtggccagtcccgggtctacaattgatactgctccgctcagcagcgtggatagcctcatcaacaaattcgatagccagcttggaggacaggccaggggaaggaccggcagaagaacccgcatgctccccccagaacagagaaaaaggtctaagtctttggattccagattgccacgggatacttttgaggaaagagaaagacagtctaccaatcactggacatcttccacaaaatacgacaaccatgttgggacatctaagcagccagcgcagtcacagaatctgtcgccactatcgggttttagtagatctaggcagacacaggattgggtgctacagagtttcgaagagccacgtaggtcagcacaggaccctactatgctgcagtttaagtctacccccgacctgctgagggaccaacaggaggcagcaccgcccggctccgtcgatcatatgaaagcaaccatttatggcatacttcgggaaggctctagcgagtccgagaccagcgtgcgacggaaggttagtctcgttctcgaaaagatgcaacccctagtgatggtctcaagtggatccactaaggcagtcgccggtcagggagaattaacgaggaaagtggaagaactgcagcggaaattggacgaagaggtaaaaaagagacagaaactcgaaccttcccaggttggcctggaacggcagcttgaggagaagactgaggagtgtagcagactgcaggaattactagagagaagaaagggtgaggcgcaacaatctaataaggagctccagaacatgaaaagacttctggaccaaggggaggacctccggcatggccttgaaactcaggtcatggaactgcaaaacaaactgaagcatgtgcaaggacctgaacctgccaaggaagtactcctaaaggacctgttggaaaccagggaactgctggaggaggtactcgaaggaaaacaacgcgtcgaggagcagttgaggctgcgggagcgcgagttgaccgctctgaaaggtgctctcaaagaggaagtagcctctcgagaccaagaagtcgagcatgtcagacagcagtatcagcgcgacactgagcaactgaggagatcaatgcaggatgccacgcaggatcatgccgtgctcgaggcggagagacagaagatgagcgctttggtgagggggctgcaacgcgagctcgaagaaaccagcgaagagacggggcactggcaatctatgttccagaagaataaagaagatctgagagcaactaagcaagagcttctgcaacttcggatggagaaagaggagatggaggaagaactaggggagaaaatcgaggtattgcagcgtgagctggagcaggcccgagcttcggccggggatactagacaagtcgaagtcctgaaaaaggagttgctccgaactcaggaggaactcaaggagttacaggctgagaggcagtcacaagaagtcgcgggccgacatcgggatcgggaactcgaaaagcaactcgccgtgctgcgggtggaagctgaccgaggacgagagttggaagagcagaacctccaactccagaagaccctgcaacagctgcgccaagattgcgaagaagcctcaaaggccaagatggttgctgaggcagaggccaccgtgctggggcagcgtcgtgccgccgtggagactacattacgagagacacaagaggaaaacgacgaattccgtcgcagaatcctgggattagaacagcagctgaaagaaactagagggctagtcgatggcggtgaggctgtagaagcccgcttgcgagacaaactccagaggcttgaggcagagaagcaacagctggaagaagccctgaatgccagccaggaagaggagggctctctggcagccgcgaagagagctctggaagcccgtctagaggaggcccagaggggcctggccagattagggcaggaacagcagacgctgaaccgggctttagaagaggagggaaagcagagggaagtgcttcgtagagggaaagccgaacttgaggagcagaaacgcctgctagacagaaccgtagacagattgaataaagaactggagaagatcggcgaagatagcaaacaggctttgcagcagctgcaagcacagctcgaggactacaaggaaaaggcacggagggaagtcgcggacgcccagaggcaggctaaagattgggccagcgaagccgaaaagacaagcggaggtctgtcgcgactccaggatgagatccagagactgcggcaggcactccaggcctctcaggccgaacgcgatacagctcggctggataaagaactgttagcccaaagactacaagggctcgagcaggaggctgaaaacaaaaaaagatcacaggacgaccgcgcccgccagctgaaaggcctggaagaaaaagtgtcgaggctggaaactgaactagacgaagagaagaacaccgtcgaactcctgacagaccgggtcaatcggggacgagaccaggtcgaccaattacgtactgagttgatgcaagaaagatcagcaaggcaggacctggagtgtgacaagatatccctcgagaggcagaacaaagacctgaaaacgagactggcttccagcgagggttttcagaagccgagcgcaagtttatctcagctggagagccaaaaccagttgttacaagagcgacttcaagcagaggagagagagaagacagtcctgcagtcgactaataggaaactggagaggaaggttaaagaactgagcattcagatcgaggacgaacgacaacacgtcaacgatcaaaaagatcagctcagtcttcgcgtgaaggccctaaagcggcaagttgatgaagccgaagaggagattgagcgactggacgggctgagaaagaaggcccagcgcgaggtagaagagcagcacgaagttaatgagcagctgcaggccaggataaaaagcctggaaaaagactcgtggagaaaagcgtctagatccgcagcggaatccgccctcaagaacgagggactttcttcagacgaagagttcgactctgtctatgaccctagttctatcgcctccctcctcactgaaagcaatcttcagacctcctcatgttag

SEQ ID NO: 266558 - DNA, 876 bp, Artificial Sequence
  derived and/or modified sequence
atggagcaggcccccaacatggccgagccccggggccccgtggaccatggagttcaaattaggtttataactgagcccgtgagcggagcagagatgggcaccttgcgcagaggcggcaggcgacccgctaaagatgcaagggcaagtacctacggagtcgccgttcgggtgcagggaatcgccgggcaacctttcgtcgtgctgaactccggcgagaagggtggcgacagttttggtgttcaaatcaagggcgcaaatgatcagggagccagcggggccctcagcagcgacctagagctgccagaaaatccgtactctcaagtgaaaggcttccccgcaccgtcacagtcttccacaagtgacgaggagccaggtgcatactggaacgggaagctgctgaggtcacactctcaggcttcactggccggccccggacctgtcgatccttccaatagatcgaacagcatgttggaactcgcaccgaaagtggcaagtccaggttcaacaattgacacagcccccctttccagcgtagattccctcattaataaatttgatagtcagcttggcggacaagcccggggaaggacaggaagacggacccgaatgctgcccccagagcagcgaaagcgcagtaagtctctggactcacggttacctcgggatacattcgaagaacgtgagcggcagtcgaccaatcactggacatcatccactaagtatgacaaccatgtggggacctccaaacaaccagcacaaagtcagaacctctcccccctgtcaggtttcagcaggtcacgccagacccaggattgggtcctgcaaagttttgaagagccgagacgttccgcccaagatccaactatgctccagtag

SEQ ID NO: 266559 - DNA, 513 bp, Artificial Sequence
  derived and/or modified sequence
atggagcaggcccccaacatggccgagccccggggccccgtggaccacggagtgcagatccgtttcataaccgagcccgtcagcggcgcagagatggggaccctccgaagaggtggccgacggccagcaaaagatgcaagagcctccacctatggggtagcagtccgcgtgcaaggtatcgccggacagccattcgtcgtcctaaatagcggggagaaaggtggcgactcgtttggagtacagataaaaggggccaatgaccagggtgccagcggcgctctctcaagcgacttggaactgcctgaaaatccgtacagtcaggtcaaaggcttcccagccccctcccaaagctccacttccgatgaagaaccaggagcttattggaacggcaagcttttgagaagtcatagtcaagcatccctggccggtcccggcccggtggatccctccaaccggtctaattctatgctggaactcgcacctaaggtggcgtcccccggctcaacaatttag

SEQ ID NO: 266560 - DNA, 513 bp, Artificial Sequence
  derived and/or modified sequence
atggagcaggcccccaacatggccgagccccggggccccgtggaccacggtgtgcagatccgatttataaccgagcccgtctcaggagccgaaatgggaactcttcggagagggggaagacggcccgcgaaagatgccagagcatcgacttacggggtggccgtccgcgtacagggtatcgccggccagccctttgtagtcctgaacagcggtgagaaagggggagattcctttggggtgcagattaagggagccaacgatcagggtgcctccggagcccttagctcggatcttgagctccctgaaaatccatactcccaggtgaaggggttccctgcacccagtcagtcaagtacatcggatgaagaacctggggcttactggaatggcaaactgctgcggagccattctcaggccagtctggctgggccaggaccggtcgacccgagtaacaggtccaacagcatgcttgaactggccccgaaggttgcctctcccgggtcaacaatttag

SEQ ID NO: 266561 - DNA, 3612 bp, Artificial Sequence
  derived and/or modified sequence
atggagcaggccccaaacatggccgagccccgtggacccgttgaccatggcgttcagatccggtttattaccgagcccgtttctggtgcagaaatggggactctcagacggggagggagaaggcctgctaaggacgcacgtgccagcacttatggggtcgccgtccgcgtccaggggattgcaggacagcctttcgtggttttaaacagtggagaaaagggcggagactcttttggagtccagatcaagggagctaacgaccagggtgcgtccggggcactaagcagcgatttggagctgcccgagaacccttactctcaggtgaaggggttccccgctccctcacagtcttctaccagtgatgaagaaccaggcgcatactggaacggaaagctgctgcggtcccattcccaggcttcactggccggacccggtccagttgacccaagcaaccgatccaactcaatgctggaactggccccaaaagtagcatcacccggtagtactatcgatactgctcccctaagttctgtcgattctctgattaacaagttcgattctcagctcgggggacaggctaggggacggactgggaggagaaccaggatgctcccccctgagcagcgaaaacgctctaaaagtctggattctaggttgccacgtgatacatttgaggagcgagagcggcagagcaccaaccattggactagctcaactaagtacgacaatcacgttggcacttccaaacagcccgcacagtcacagaacctgtcacccctcagtgggtttagccggagccgccagacccaagattgggttctacaatcattcgaagaacctcgacggtcagctcaggatcccactatgctgcagtttaagtccactcctgacctgctgcgcgaccagcaagaagccgcacctccgggatcagttgaccacatgaaggcgaccatctacggcattctcagagagggtagctcagagtctgaaacttctgtccggaggaaagtttcacttgtcctcgaaaaaatgcagcctctggtcatggtctcatctggcagtacaaaggcagtggcaggccagggggagttgacacggaaagtcgaggagctgcagagaaaactcgacgaagaggttaaaaagaggcagaagttggaaccgtcccaggtaggcctggagcgccagcttgaggaaaaaaccgaagagtgtagcagattgcaagagctgctcgaaagaagaaaaggggaggctcagcagtccaataaagagctccagaacatgaagcgtctcctggatcaaggcgaagatcttcgtcatgggctggaaacacaggtcatggagctgcaaaataaactgaaacacgtccagggtcccgagccagcaaaggaagttcttcttaaggacctcctcgagacgcgggaactgctcgaggaggtgctcgaggggaagcaaagagtggaggaacagctgcgcctgagagagagagagctgactgctctcaagggagccctgaaagaggaagtcgcctctcgcgaccaggaggtggagcatgtgcggcagcagtatcagagggacaccgaacagctacggcgttccatgcaggatgccacccaggatcatgcagtcctagaagccgagaggcagaagatgtccgctttagttagaggtctccagagggagcttgaggaaacttcagaagaaactggacactggcagagcatgtttcagaaaaataaagaagacctgcgggcaacaaagcaggaactgctgcaactccggatggagaaggaggagatggaagaggagctgggcgagaaaattgaggtgctgcaacgagaactggagcaggctcgcgcaagtgctggcgacacaagacaggttgaagtgctaaaaaaagaactcctgcgaacacaggaggagctgaaagagctgcaagccgagaggcaaagtcaggaggtggccggtcgacaccgagatagagaattagagaagcagctggcggtgttacgtgtcgaagcagacagagggcgagagctggaggaacagaatctacaactgcagaagacgcttcaacaactgagacaggattgtgaggaagccagtaaagctaaaatggtggccgaagccgaagccaccgtgctcggccagaggcgcgctgcagtggagacaaccctccgcgagacgcaggaggagaacgatgaattccgcagaaggatcctgggcctggagcaacaattaaaagagacccgcggtctggtcgatggaggtgaggcagtggaagctcggttacgtgacaaactccaaagattggaggcagagaaacagcagctggaggaggccctcaacgcttcacaggaggaggagggcagcctggccgcagccaaacgagctctggaggctagactggaggaagcccagcgcggattagcaaggctagggcaggagcagcagactcttaaccgggctctggaggaggaaggtaagcaacgggaggtgctgcgcagggggaaggccgagctcgaagagcaaaagcgcctcctggaccggacagtagatcggctgaataaagaattagagaaaattggggaagattctaaacaggcgcttcaacagcttcaagcacaacttgaggactacaaagaaaaggccaggagggaggtcgcagacgcccagaggcaggccaaagactgggcatccgaggccgagaaaactagtggagggctgagcaggttgcaggacgagattcagagactacgacaggcgctccaggcctcgcaggccgagcgggataccgcgcgactggataaagagctgctggcacagagactccagggtttggaacaggaggccgagaacaaaaagaggtcccaggacgaccgcgctcgccaactgaaggggttggaggaaaaggtttcccggctcgaaaccgagctcgatgaggagaaaaatacagtggaactcctgaccgatagagtgaaccgcggacgcgaccaggtggaccagttgagaactgaactgatgcaggaacgatcagccagacaggatttggaatgcgataagatctctttggagcgccagaataaggaccttaaaacccgtctggcgtcctccgaaggtttccaaaagccctccgcctcacttagtcaactggagtcccagaaccaactcctacaggaaaggctccaggcggaagagcgggaaaaaacagttctccagtccactaatagaaaactggaaaggaaggttaaagaactgagtattcagattgaagacgagaggcagcacgtgaacgaccaaaaggatcaacttagcctgagagtgaaggccttaaagaggcaagtggacgaagctgaagaggaaattgagagacttgatggcttaagaaaaaaggcccagagggaggtggaagagcagcacgaggtgaacgaacagttgcaggcgagaatcaagagtctggagaaggattcctggcggaaggcctcacggtcagcagcagaaagtgcactgaaaaatgaaggactctcctccgacgaggaatttgacagtgtgtacgatcccagcagcatcgctagccttctgactgagtccaatctgcagacatcaagctgttag

SEQ ID NO: 266562 - DNA, 876 bp, Artificial Sequence
  derived and/or modified sequence
atggagcaagcccctaatatggctgagccacgtggacccgttgaccacggcgtgcaaataaggttcatcactgagcctgtgtccggtgccgagatgggcaccttaagacgtggaggtcggcgtcccgctaaggatgcaagagcctctacttatggcgtcgctgtccgagttcagggcattgcaggtcagccctttgttgttttgaatagtggagagaaagggggtgactcatttggcgttcagattaaaggggctaacgaccaaggcgcttcgggggcattgtcaagtgacctcgagcttccagagaatccttattcgcaggttaagggcttccctgcaccaagtcagtcttccacctccgacgaagagcccggtgcatactggaatggcaagctgctccggtcccacagccaagcttccctcgcgggacccggacctgtggacccctccaatcgtagcaactctatgttggaactggctccaaaagtcgcctcccccggaagtaccatagatacagccccattaagcagcgtagactcactgatcaacaagtttgattcgcagctaggcggtcaggcaagggggagaaccgggagaagaacgcgaatgttgcctcctgaacaacgcaagaggagcaagtcccttgactcacggctcccacgggacacattcgaagagcgagaaagacaatcaacgaatcactggacgtcgtccacaaagtacgacaaccatgtggggacctccaaacagcccgctcagtcacaaaatctctctcccctctccggcttcagccgctccaggcagacacaagactgggtgttgcagtccttcgaggaaccaagaaggagtgctcaggaccccactatgttgcagtag

SEQ ID NO: 266563 - DNA, 513 bp, Artificial Sequence
  derived and/or modified sequence
atggagcaggctccgaatatggctgagccccgtggcccagtggaccatggagtgcagatccggttcataacagaacccgtgtctggcgctgagatgggtacattgcgcagagggggacgcagacccgctaaagatgcacgtgccagcacctacggggtggccgttcgagtgcagggaatcgctggccagcccttcgtagtactgaactctggggagaagggcggagactctttcggggtgcagataaagggcgcaaacgatcagggcgcttccggggctctgagcagcgacctggaactgcccgaaaacccctatagtcaagtcaaggggttccctgcaccttctcagtcatcgacctctgatgaggaacctggcgcatattggaacggtaaactgctcagatcacactcacaagcatcccttgctggccctgggcctgtcgatccttccaacagaagtaacagcatgctagaacttgcacctaaggtggctagtccaggcagcacaatttag

SEQ ID NO: 266564 - DNA, 513 bp, Artificial Sequence
  derived and/or modified sequence
atggaacaagctccaaacatggccgagccacgaggacccgtagatcacggagttcagattcggtttataaccgagcccgtctcaggtgccgagatgggaacacttcggaggggtggcagacgcccagccaaagacgcaagagcatccacttacggagtagccgtgagggtgcagggtattgctggacagccgtttgttgtgctgaactccggtgaaaaaggcggagattcctttggcgtgcagatcaaaggcgcaaacgatcagggcgcaagcggggcactcagctccgacttagaattgccagagaacccctatagccaggtcaagggatttccggctcccagccagtcttccaccagtgacgaggagccaggtgcctattggaatggcaaactgttgaggagtcatagtcaggcctcactcgcagggcctgggcctgttgaccctagcaataggagcaattccatgctcgaactcgctcctaaagtggcttcccccggatccacgatctag

SEQ ID NO: 266565 - protein, 1237 aa, Artificial Sequence
  derived and/or modified sequence
MGDMKTPDFDDLLAAFDIPDIDANEAIHSGPEENEGPGGPGKPEPGVGSESEDTAAASAGDGPGVPAQASDHGLPPPDISVVSVIVKNTVCPEQSEALAGGSAGDGAQAAGVTKEGPVGPHRMQNGFGSPEPSLPGTPHSPAPPSGGTWKEKGMEGKTPLDLFAHFGPEPGDHSDPLPPSAPSPTREGALTPPPFPSSFELAQENGPGMQPPVSSPPLGALKQESCSPHHPQVLAQQGSGSSPKATDIPASASPPPVAGVPFFKQSPGHQSPLASPKVPVCQPLKEEDDDEGPVDKSSPGSPQSPSSGAEAADEDSNDSPASSSSRPLKVRIKTIKTSCGNITRTVTQVPSDPDPPAPLAEGAFLAEASLLKLSPATPTSEGPKVVSVQLGDGTRLKGTVLPVATIQNASTAMLMAASVARKAVVLPGGTATSPKMIAKNVLGLVPQALPKADGRAGLGTGGQKVNGASVVMVQPSKTATGPSTGGGTVISRTQSSLVEAFNKILNSKNLLPAYRPNLSPPAEAGLALPPTGYRCLECGDAFSLEKSLARHYDRRSMRIEVTCNHCARRLVFFNKCSLLLHAREHKDKGLVMQCSHLVMRPVALDQMVGQPDITPLLPVAVPPVSGPLALPALGKGEGAITSSAITTVAAEAPVLPLSTEPPAAPATSAYTCFRCLECKEQCRDKAGMAAHFQQLGPPAPGATSNVCPTCPMMLPNRCSFSAHQRMHKNRPPHVCPECGGNFLQANFQTHLREACLHVSRRVGYRCPSCSVVFGGVNSIKSHIQTSHCEVFHKCPICPMAFKSGPSAHAHLYSQHPSFQTQQAKLIYKCAMCDTVFTHKPLLSSHFDQHLLPQRVSVFKCPSCPLLFAQKRTMLEHLKNTHQSGRLEETAGKGAGGALLTPKTEPEELAVSQGGAAPATEESSSSSEEEEVPSSPEPPRPAKRPRRELGSKGLKGGGGGPGGWTCGLCHSWFPERDEYVAHMKKEHGKSVKKFPCRLCERSFCSAPSLRRHVRVNHEGIKRVYPCRYCTEGKRTFSSRLILEKHVQVRHGLQLGAQSPGRGTTLARGSSARAQGPGRKRRQSSDSCSEEPDSTTPPAKSPRGGPGSGGHGPLRYRSSSSTEQSLMMGLRVEDGAQQCLDCGLCFASPGSLSRHRFISHKKRRGVGKASALGLGDGEEEAPPSRSDPDGGDSPLPASGGPLTCKVCGKSCDSPLNLKTHFRTHGMAFIRARQGAVGDN

SEQ ID NO: 266566 - protein, 1103 aa, Artificial Sequence
  derived and/or modified sequence
MGDMKTPDFDDLLAAFDIPDIDANEAIHSGPEENEGPGGPGKPEPGVGSESEDTAAASAGDGPGVPAQASDHGLPPPDISVVSVIVKNTVCPEQSEALAGGSAGDGAQAAGVTKEGPVGPHRMQNGFGSPEPSLPGTPHSPAPPSGGTWKEKGMEGKTPLDLFAHFGPEPGDHSDPLPPSAPSPTREGALTPPPFPSSFELAQENGPGMQPPVSSPPLGALKQESCSPHHPQVLAQQGSGSSPKATDIPASASPPPVAGVPFFKQSPGHQSPLASPKVPVCQPLKEEDDDEGPVDKSSPGSPQSPSSGAEAADEDSNDSPASSSSRPLKVRIKTIKTSCGNITRTVTQVPSDPDPPAPLAEGAFLAEASLLKLSPATPTSEGPKVVSVQLGDGTRLKGTVLPVATIQNASTAMLMAASVARKAVVLPGGTATSPKMIAKNVLGLVPQALPKADGRAGLGTGGQKVNGASVVMVQPSKTATGPSTGGGTVISRTQSSLVEAFNKILNSKNLLPAYRPNLSPPAEAGLALPPTGYRCLECGDAFSLEKSLARHYDRRSMRIEVTCNHCARRLVFFNKCSLLLHAREHKDKGLVMQCSHLVMRPVALDQMVGQPDITPLLPVAVPPVSGPLALPALGKGEGAITSSAITTVAAEAPVLPLSTEPPAAPATSAYTCFRCLECKEQCRDKAGMAAHFQQLGPPAPGATSNVCPTCPMMLPNRCSFSAHQRMHKNRPPHVCPECGGNFLQANFQTHLREACLHVSRRVGYRCPSCSVVFGGVNSIKSHIQTSHCEVFHKCPICPMAFKSGPSAHAHLYSQHPSFQTQQAKLIYKCAMCDTVFTHKPLLSSHFDQHLLPQRVSVFKCPSCPLLFAQKRTMLEHLKNTHQSGRLEETAGKGAGGALLTPKTEPEELAVSQGGAAPATEESSSSSEEEEVPSSPEPPRPAKRPRRELGSKGLKGGGGGPGGWTCGLCHSWFPERDEYVAHMKKEHGKSVKKFPCRLCERSFCSAPSLRRHVRVNHEGIKRVYPCRSKGPGLRAVPLLPSCPLPFQVLHRGKTHLQQPPDPRETCPGPARLAAWGPVPWPGDHLGSGFQCQSPGARSETPPVF

SEQ ID NO: 266567 - DNA, 5378 bp, Artificial Sequence
  derived and/or modified sequence
ggccgcggggagggcggcggtggctgcagcggctggagcggggtagagaccgccgggtctcggcccgcaccaggagcggaacaacctttcagatctgtgtggaccccagaagatccgtgaagaatatgaattgattccatgcggacatgaatgagtccttaaacctagaacatcatgtacatcatcctccttaataatagtattgattatttggttctatgctggggaccggaggggatgagatggtttccaccagaatgctcactgagctctattacccttccctgttccctgtattttttttttttttctgagacagtcttgctctgtcgcccaggtgggagtgcagtggcacgatctcagctcactgcaaactccacctcccaggttcaagcaattcttctgcctcagcctcccgagtagctgggactacaggtgtgtgctgccatgcccagctaatttttgtatttttagtagagacggggtttcactatcttggccaggatggtcttgatctcctgacctcgtgatccgcccgcctctgcctccccaagtgctgggattacaggcgtgagccaccatgcccagccccctatatttcttttttttgagacagggtctcgctctgtccaggctggagtgcagtggcgtgatcttggctcattgaaacctcaacctcatgggttcaggcgattctcctgcctcagcctcctttgtagctgcgattacaggcatgtgccaccacacctgtctagttttttgtatttttagtagagacaaggtttcaccatgttggccaagctggtctcaaactcctgacctcaagtgatccatctgcctcagcctcccaaaacgctgggattacaagcatgagccaccgcacctggccccttccctgtatttctaagaactctcttttcccctgctttctctggattttggagcccaccaaggtctgggatctgccgatatgggggatatgaagacccctgattttgatgacctccttgctgcctttgacatccctgacattgatgcgaatgaagccatccattctgggccagaagaaaatgaggggcctggaggcccagggaagccagaaccaggtgtaggaagtgaatctgaagacacagcagcagcctctgctggggatggccctggagttccagcccaggcctctgaccatggcctgccaccgccagacatttctgtagtcagtgtcattgtcaagaacactgtgtgtcccgagcagtctgaggccctggctggaggctcagcaggagacggggcccaggctgctggggtaactaaagaagggcctgtggggcctcatcgaatgcagaatggttttgggagccctgaaccttccctcccaggaactccccactctcctgctcctcccagtgggggcacctggaaagaaaaaggcatggaaggcaaaactcccttggacctgtttgctcattttggccctgagccaggggaccactcagatccgctgcctccctctgcaccctctcccactcgggagggggctctgaccccgcctcctttcccctcttcctttgagctggcccaggagaatggcccaggcatgcagccacctgtttcttccccaccattgggggccttgaagcaggagagctgcagcccccatcatccccaggtcctagcccaacaaggctcaggctccagccctaaggccacggacatccctgccagtgcctcgcctcccccagttgctggggtgcccttcttcaagcagtctccagggcaccagagccctcttgcctcccccaaagtgcccgtctgtcagcccttgaaggaagaagatgatgatgaggggccagtggacaagtcttccccaggaagtccccagagtccctctagtggggccgaggctgcagatgaggacagcaatgactcccctgcctccagctcctctaggcctcttaaggtgcggatcaagaccattaaaacatcctgcgggaatatcacaaggactgtaactcaggtcccctcagatcctgatccacctgcccccttggctgagggggccttcttggctgaggctagcctcttgaagctgtcccctgcaacacctacttctgagggtccaaaggtggtgagcgtacagttgggtgatggtacaaggctgaaaggcactgtgctgcctgtggccaccatccagaacgccagtactgccatgctgatggcagccagtgtggctcgcaaggctgtggtgctgcctggggggactgccaccagccctaagatgattgctaagaacgtgctaggcctggtgccccaagccctgcctaaggctgacgggcgggcagggctggggactgggggacagaaggtgaatggtgcctcggtggtgatggtgcaaccttcaaagacagctactgggccaagtacagggggcggcacagtgatatcacggacccagtccagcctggtggaggccttcaacaagatcctcaacagcaagaacctgctccctgcctataggccaaacctgagcccaccagctgaggctgggctggccctgcctcccaccggctaccgctgcctggagtgtggggatgccttctcattggagaagagcctggcacggcactatgaccgtcggagcatgcgcatcgaggtcacctgcaaccactgcgcccgccgcctggtcttcttcaacaagtgcagcctgctcctgcatgcacgtgaacacaaggacaaggggctcgtcatgcagtgctcacatttggtcatgaggcctgtagcccttgaccagatggtggggcagccggacatcacaccgctgctgcctgtagctgtcccacctgtctctggacctctggccttgcctgccttgggcaagggtgagggggccatcacctcctctgccattactacagttgctgctgaggcccctgtcctgccgctctccacagagccgcctgctgccccggccacctctgcttacacatgctttcgctgcctggagtgcaaggaacagtgccgggacaaggctggcatggcagctcacttccagcagctcggcccccctgcccctggggccaccagcaatgtgtgcccaacctgccccatgatgctccccaatcgctgcagcttcagcgcccaccagcgcatgcataagaatcgacccccccatgtctgtcctgagtgtgggggcaacttcctgcaagccaattttcagacccatctccgggaggcctgtctgcacgtctctcgccgtgtaggatacaggtgccccagctgttcagtggtgtttgggggtgtgaactccatcaagtcccacatccagacgtcgcactgcgaggttttccacaagtgccccatctgccccatggccttcaagtctgggccaagtgcccatgcccacctctactcccagcatcccagcttccaaactcagcaggccaagctgatctacaagtgcgccatgtgcgacacagtcttcactcacaaacccctcctctcctcacacttcgaccagcacttgctgccccagcgtgtcagtgtctttaagtgcccgtcttgtcctctgctctttgcccaaaaaaggaccatgctggaacatctcaagaacacccatcagtctgggcgcttggaggagactgctgggaaaggggccgggggtgccctgctgacccccaagactgagcctgaggagctggctgtttctcagggaggggcagcccctgctactgaggagtcgtcttcatcttcagaagaggaggaagtacccagctcccctgagcccccccgtccagccaaacggcctcggcgggaactagggagcaaaggcctcaagggtgggggtggggggcctggaggctggacctgtggcctgtgtcactcctggttccctgagcgtgatgaatacgtggcccacatgaagaaggagcatggcaagtcagtgaaaaagttcccctgtcgcctgtgtgagcgctccttctgctccgcccccagcctgaggcgccatgtcagagttaatcacgagggcatcaagcgagtttacccctgcaggtattgcacagagggaaaacgcaccttcagcagccgcctgatcctagagaaacatgtccaggtccggcacggcttgcagcttggggcccagtcccctggccgggggaccaccttggctcggggttccagtgccagagcccaggggccaggtcggaaacgccgccagtcttctgactcttgcagtgaggagcctgacagcacgacaccgccagccaagtcccccaggggcggacctggatctggaggccatggccctctgcgctaccggagcagcagctccacagaacagagcctcatgatggggttgagggtggaggatggtgcccagcagtgcctcgactgtggcttgtgctttgcctcccctggctccctgagccgacaccgtttcatcagccacaagaagagacggggtgtgggtaaagccagtgccctggggctgggggatggggaggaagaggcccctccatcaaggtctgaccccgatggtggagactcacccctgcctgcttctggaggcccactgacctgtaaggtctgtggcaagagctgcgacagccctctaaacctcaagacccacttccgcacgcatggcatggcgttcatcagggctcggcagggggctgttggggacaactagtctccaaggcctgggactgaccagccccttcctcttggagcctggttttccctactgctgcctgatccctcggctggggagttttcattaacattaatattttgttaattcctgtctctccaacctgaagaagaagagcatttgaggattattctagttatttgcaacctccctttgggtttggccctggagtcctagtagagtggaccctccattcctcctttctgagcccaacactaattaattttatgctcctgctgcagaacccccagtgtgggcctgggggtgggaggatgggacttaggtatgcctgctagacaggttcagggaaggactgatgggggtgtcatggatggacacacctctccacaattccttcaggcatggactggaactttcctcctctaggccgggccctgccctagtgcccacccccgcccccgcccccgcccaaccccaactcactggcactcaagccccctacccctgcagtgcctttcacttctttttttccccagaaatccggggcgggggggtggggggttggtagggatgagtcctgtcaagggggccacaggagaggaggggacaggctctcaggaatcctttattcttgtagtaataataatactaacaaacagttggggaactagggagaaaaccagaccattaaaactgtttgtggtcgaatctc

SEQ ID NO: 266568 - DNA, 4556 bp, Artificial Sequence
  derived and/or modified sequence
gagggagtggggaggccgaaccggagagaagcaggaagtagcggcggccgcggggagggcggcggtggctgcagcggctggagcggggtagagaccgccgggtctcggcccgcaccaggagcggaacaagtctgggatctgccgatatgggggatatgaagacccctgattttgatgacctccttgctgcctttgacatccctgacattgatgcgaatgaagccatccattctgggccagaagaaaatgaggggcctggaggcccagggaagccagaaccaggtgtaggaagtgaatctgaagacacagcagcagcctctgctggggatggccctggagttccagcccaggcctctgaccatggcctgccaccgccagacatttctgtagtcagtgtcattgtcaagaacactgtgtgtcccgagcagtctgaggccctggctggaggctcagcaggagacggggcccaggctgctggggtaactaaagaagggcctgtggggcctcatcgaatgcagaatggttttgggagccctgaaccttccctcccaggaactccccactctcctgctcctcccagtgggggcacctggaaagaaaaaggcatggaaggcaaaactcccttggacctgtttgctcattttggccctgagccaggggaccactcagatccgctgcctccctctgcaccctctcccactcgggagggggctctgaccccgcctcctttcccctcttcctttgagctggcccaggagaatggcccaggcatgcagccacctgtttcttccccaccattgggggccttgaagcaggagagctgcagcccccatcatccccaggtcctagcccaacaaggctcaggctccagccctaaggccacggacatccctgccagtgcctcgcctcccccagttgctggggtgcccttcttcaagcagtctccagggcaccagagccctcttgcctcccccaaagtgcccgtctgtcagcccttgaaggaagaagatgatgatgaggggccagtggacaagtcttccccaggaagtccccagagtccctctagtggggccgaggctgcagatgaggacagcaatgactcccctgcctccagctcctctaggcctcttaaggtgcggatcaagaccattaaaacatcctgcgggaatatcacaaggactgtaactcaggtcccctcagatcctgatccacctgcccccttggctgagggggccttcttggctgaggctagcctcttgaagctgtcccctgcaacacctacttctgagggtccaaaggtggtgagcgtacagttgggtgatggtacaaggctgaaaggcactgtgctgcctgtggccaccatccagaacgccagtactgccatgctgatggcagccagtgtggctcgcaaggctgtggtgctgcctggggggactgccaccagccctaagatgattgctaagaacgtgctaggcctggtgccccaagccctgcctaaggctgacgggcgggcagggctggggactgggggacagaaggtgaatggtgcctcggtggtgatggtgcaaccttcaaagacagctactgggccaagtacagggggcggcacagtgatatcacggacccagtccagcctggtggaggccttcaacaagatcctcaacagcaagaacctgctccctgcctataggccaaacctgagcccaccagctgaggctgggctggccctgcctcccaccggctaccgctgcctggagtgtggggatgccttctcattggagaagagcctggcacggcactatgaccgtcggagcatgcgcatcgaggtcacctgcaaccactgcgcccgccgcctggtcttcttcaacaagtgcagcctgctcctgcatgcacgtgaacacaaggacaaggggctcgtcatgcagtgctcacatttggtcatgaggcctgtagcccttgaccagatggtggggcagccggacatcacaccgctgctgcctgtagctgtcccacctgtctctggacctctggccttgcctgccttgggcaagggtgagggggccatcacctcctctgccattactacagttgctgctgaggcccctgtcctgccgctctccacagagccgcctgctgccccggccacctctgcttacacatgctttcgctgcctggagtgcaaggaacagtgccgggacaaggctggcatggcagctcacttccagcagctcggcccccctgcccctggggccaccagcaatgtgtgcccaacctgccccatgatgctccccaatcgctgcagcttcagcgcccaccagcgcatgcataagaatcgacccccccatgtctgtcctgagtgtgggggcaacttcctgcaagccaattttcagacccatctccgggaggcctgtctgcacgtctctcgccgtgtaggatacaggtgccccagctgttcagtggtgtttgggggtgtgaactccatcaagtcccacatccagacgtcgcactgcgaggttttccacaagtgccccatctgccccatggccttcaagtctgggccaagtgcccatgcccacctctactcccagcatcccagcttccaaactcagcaggccaagctgatctacaagtgcgccatgtgcgacacagtcttcactcacaaacccctcctctcctcacacttcgaccagcacttgctgccccagcgtgtcagtgtctttaagtgcccgtcttgtcctctgctctttgcccaaaaaaggaccatgctggaacatctcaagaacacccatcagtctgggcgcttggaggagactgctgggaaaggggccgggggtgccctgctgacccccaagactgagcctgaggagctggctgtttctcagggaggggcagcccctgctactgaggagtcgtcttcatcttcagaagaggaggaagtacccagctcccctgagcccccccgtccagccaaacggcctcggcgggaactagggagcaaaggcctcaagggtgggggtggggggcctggaggctggacctgtggcctgtgtcactcctggttccctgagcgtgatgaatacgtggcccacatgaagaaggagcatggcaagtcagtgaaaaagttcccctgtcgcctgtgtgagcgctccttctgctccgcccccagcctgaggcgccatgtcagagttaatcacgagggcatcaagcgagtttacccctgcaggtattgcacagagggaaaacgcaccttcagcagccgcctgatcctagagaaacatgtccaggtccggcacggcttgcagcttggggcccagtcccctggccgggggaccaccttggctcggggttccagtgccagagcccaggggccaggtcggaaacgccgccagtcttctgactcttgcagtgaggagcctgacagcacgacaccgccagccaagtcccccaggggcggacctggatctggaggccatggccctctgcgctaccggagcagcagctccacagaacagagcctcatgatggggttgagggtggaggatggtgcccagcagtgcctcgactgtggcttgtgctttgcctcccctggctccctgagccgacaccgtttcatcagccacaagaagagacggggtgtgggtaaagccagtgccctggggctgggggatggggaggaagaggcccctccatcaaggtctgaccccgatggtggagactcacccctgcctgcttctggaggcccactgacctgtaaggtctgtggcaagagctgcgacagccctctaaacctcaagacccacttccgcacgcatggcatggcgttcatcagggctcggcagggggctgttggggacaactagtctccaaggcctgggactgaccagccccttcctcttggagcctggttttccctactgctgcctgatccctcggctggggagttttcattaacattaatattttgttaattcctgtctctccaacctgaagaagaagagcatttgaggattattctagttatttgcaacctccctttgggtttggccctggagtcctagtagagtggaccctccattcctcctttctgagcccaacactaattaattttatgctcctgctgcagaacccccagtgtgggcctgggggtgggaggatgggacttaggtatgcctgctagacaggttcagggaaggactgatgggggtgtcatggatggacacacctctccacaattccttcaggcatggactggaactttcctcctctaggccgggccctgccctagtgcccacccccgcccccgcccccgcccaaccccaactcactggcactcaagccccctacccctgcagtgcctttcacttctttttttccccagaaatccggggcgggggggtggggggttggtagggatgagtcctgtcaagggggccacaggagaggaggggacaggctctcaggaatcctttattcttgtagtaataataatactaacaaacagttggggaactagggagaaaaccagaccattaaaactgtttgtggtcgaatctcca

SEQ ID NO: 266569 - DNA, 4568 bp, Artificial Sequence
  derived and/or modified sequence
cgcggggagggcggcggtggctgcagcggctggagcggggtagagaccgccgggtctcggcccgcaccaggagcggaacaagtctgggatctgccgatatgggggatatgaagacccctgattttgatgacctccttgctgcctttgacatccctgacattgatgcgaatgaagccatccattctgggccagaagaaaatgaggggcctggaggcccagggaagccagaaccaggtgtaggaagtgaatctgaagacacagcagcagcctctgctggggatggccctggagttccagcccaggcctctgaccatggcctgccaccgccagacatttctgtagtcagtgtcattgtcaagaacactgtgtgtcccgagcagtctgaggccctggctggaggctcagcaggagacggggcccaggctgctggggtaactaaagaagggcctgtggggcctcatcgaatgcagaatggttttgggagccctgaaccttccctcccaggaactccccactctcctgctcctcccagtgggggcacctggaaagaaaaaggcatggaaggcaaaactcccttggacctgtttgctcattttggccctgagccaggggaccactcagatccgctgcctccctctgcaccctctcccactcgggagggggctctgaccccgcctcctttcccctcttcctttgagctggcccaggagaatggcccaggcatgcagccacctgtttcttccccaccattgggggccttgaagcaggagagctgcagcccccatcatccccaggtcctagcccaacaaggctcaggctccagccctaaggccacggacatccctgccagtgcctcgcctcccccagttgctggggtgcccttcttcaagcagtctccagggcaccagagccctcttgcctcccccaaagtgcccgtctgtcagcccttgaaggaagaagatgatgatgaggggccagtggacaagtcttccccaggaagtccccagagtccctctagtggggccgaggctgcagatgaggacagcaatgactcccctgcctccagctcctctaggcctcttaaggtgcggatcaagaccattaaaacatcctgcgggaatatcacaaggactgtaactcaggtcccctcagatcctgatccacctgcccccttggctgagggggccttcttggctgaggctagcctcttgaagctgtcccctgcaacacctacttctgagggtccaaaggtggtgagcgtacagttgggtgatggtacaaggctgaaaggcactgtgctgcctgtggccaccatccagaacgccagtactgccatgctgatggcagccagtgtggctcgcaaggctgtggtgctgcctggggggactgccaccagccctaagatgattgctaagaacgtgctaggcctggtgccccaagccctgcctaaggctgacgggcgggcagggctggggactgggggacagaaggtgaatggtgcctcggtggtgatggtgcaaccttcaaagacagctactgggccaagtacagggggcggcacagtgatatcacggacccagtccagcctggtggaggccttcaacaagatcctcaacagcaagaacctgctccctgcctataggccaaacctgagcccaccagctgaggctgggctggccctgcctcccaccggctaccgctgcctggagtgtggggatgccttctcattggagaagagcctggcacggcactatgaccgtcggagcatgcgcatcgaggtcacctgcaaccactgcgcccgccgcctggtcttcttcaacaagtgcagcctgctcctgcatgcacgtgaacacaaggacaaggggctcgtcatgcagtgctcacatttggtcatgaggcctgtagcccttgaccagatggtggggcagccggacatcacaccgctgctgcctgtagctgtcccacctgtctctggacctctggccttgcctgccttgggcaagggtgagggggccatcacctcctctgccattactacagttgctgctgaggcccctgtcctgccgctctccacagagccgcctgctgccccggccacctctgcttacacatgctttcgctgcctggagtgcaaggaacagtgccgggacaaggctggcatggcagctcacttccagcagctcggcccccctgcccctggggccaccagcaatgtgtgcccaacctgccccatgatgctccccaatcgctgcagcttcagcgcccaccagcgcatgcataagaatcgacccccccatgtctgtcctgagtgtgggggcaacttcctgcaagccaattttcagacccatctccgggaggcctgtctgcacgtctctcgccgtgtaggatacaggtgccccagctgttcagtggtgtttgggggtgtgaactccatcaagtcccacatccagacgtcgcactgcgaggttttccacaagtgccccatctgccccatggccttcaagtctgggccaagtgcccatgcccacctctactcccagcatcccagcttccaaactcagcaggccaagctgatctacaagtgcgccatgtgcgacacagtcttcactcacaaacccctcctctcctcacacttcgaccagcacttgctgccccagcgtgtcagtgtctttaagtgcccgtcttgtcctctgctctttgcccaaaaaaggaccatgctggaacatctcaagaacacccatcagtctgggcgcttggaggagactgctgggaaaggggccgggggtgccctgctgacccccaagactgagcctgaggagctggctgtttctcagggaggggcagcccctgctactgaggagtcgtcttcatcttcagaagaggaggaagtacccagctcccctgagcccccccgtccagccaaacggcctcggcgggaactagggagcaaaggcctcaagggtgggggtggggggcctggaggctggacctgtggcctgtgtcactcctggttccctgagcgtgatgaatacgtggcccacatgaagaaggagcatggcaagtcagtgaaaaagttcccctgtcgcctgtgtgagcgctccttctgctccgcccccagcctgaggcgccatgtcagagttaatcacgagggcatcaagcgagtttacccctgcagaagcaagggccctggccttcgggctgtgccgctgctgccatcctgtcctctcccatttcaggtattgcacagagggaaaacgcaccttcagcagccgcctgatcctagagaaacatgtccaggtccggcacggcttgcagcttggggcccagtcccctggccgggggaccaccttggctcggggttccagtgccagagcccaggggccaggtcggaaacgccgccagtcttctgactcttgcagtgaggagcctgacagcacgacaccgccagccaagtcccccaggggcggacctggatctggaggccatggccctctgcgctaccggagcagcagctccacagaacagagcctcatgatggggttgagggtggaggatggtgcccagcagtgcctcgactgtggcttgtgctttgcctcccctggctccctgagccgacaccgtttcatcagccacaagaagagacggggtgtgggtaaagccagtgccctggggctgggggatggggaggaagaggcccctccatcaaggtctgaccccgatggtggagactcacccctgcctgcttctggaggcccactgacctgtaaggtctgtggcaagagctgcgacagccctctaaacctcaagacccacttccgcacgcatggcatggcgttcatcagggctcggcagggggctgttggggacaactagtctccaaggcctgggactgaccagccccttcctcttggagcctggttttccctactgctgcctgatccctcggctggggagttttcattaacattaatattttgttaattcctgtctctccaacctgaagaagaagagcatttgaggattattctagttatttgcaacctccctttgggtttggccctggagtcctagtagagtggaccctccattcctcctttctgagcccaacactaattaattttatgctcctgctgcagaacccccagtgtgggcctgggggtgggaggatgggacttaggtatgcctgctagacaggttcagggaaggactgatgggggtgtcatggatggacacacctctccacaattccttcaggcatggactggaactttcctcctctaggccgggccctgccctagtgcccacccccgcccccgcccccgcccaaccccaactcactggcactcaagccccctacccctgcagtgcctttcacttctttttttccccagaaatccggggcgggggggtggggggttggtagggatgagtcctgtcaagggggccacaggagaggaggggacaggctctcaggaatcctttattcttgtagtaataataatactaacaaacagttggggaactagggagaaaaccagaccattaaaactgtttgtggtcgaatctcc

SEQ ID NO: 266570 - DNA, 1575 bp, Artificial Sequence
  derived and/or modified sequence
atggagttccccttcccaaagccggatatgatcactagactcgagggtgaggaagaaagccagaactctgatgagtggcagctgcagggaggtactagtgccgagaacgaggagagtgacgtcaaacccccggactggcccaatccgatgaatgccaccagtcaatttcctcagcctcaacatttcgattcttttggcctgcgccttcctagagacatcaccgagctgcccgaatggagcgaaggatatcctttttatatggccatgggatttcctggatatgatctcagcgctgatgacatagctggaaaatttcagttctctcgtggcatgcggcggagttatgacgccggttttaaattgatggttgttgaatacgcagaatccactaacaactgtcaggcagccaaacagtttggagtcctggagaaaaatgtcagggattggcgcaaagtgaaaccccagctgcagaacgctcacgctatgagaagggccttcagggggcccaagaacgggcggttcgcgttggtagatcaacgggttgcagagtatgttaggtatatgcaggctaaaggtgaccccatcacccgtgaggctatgcagcttaaggccttggagatcgctcaggagatgaacattcccgaaaaggggtttaaagccagcctcggatggtgtcgccgtatgatgaggcgctatgacctctctcttcggcacaaggtgcccgtgcctcagcatctcccagaagatctgaccgagaagttagtgacttatcagcggagtgtgctggcactaagacgagctcatgactacgaggttgctcaaatgggaaacgccgacgaaacccccatctgtttagaggtgcctagtcgtgtgaccgtggacaaccagggggagaagcctgtgttggttaagactccaggccgcgaaaaactcaaaattacggccatgctcggagtgctagccgacggtcggaaactgccgccttacataattctgaggggaacgtacatcccacctgggaaattcccctcaggtatggagattcgctgtcatcgatatggctggatgactgaagacttaatgcaggactggctggaagtcgtgtggcgaagaagaacaggcgccgtcccgaaacagagaggcatgttgatcttaaatggtttcaggggccatgctacagattccgtcaaaaactccatggagtccatgaacaccgacatggtcatcatacccggcggcctgacaagccagctgcaggtgttggatgtcgtggtatataagccacttaatgactccgttagagcccaatactccaactggctcctggcgggcaatttggcgctaagccccaccggcaacgctaagaagcctccacttggcctgttcttggaatgggtgatggttgcctggaactctatctccagcgaatctatcgtgcagggcttcaagaagtgtcatataagcagcaacttggaggaggaagatgatgtgctttgggagatagagagtgagctgccaggcggaggagaacctccgaaagactgcgatactgaatccatggctgaaagtaattag

SEQ ID NO: 266571 - DNA, 2168 bp, Artificial Sequence
  derived and/or modified sequence
agctccgggccggaccctccctcctcccaccacgtgtcctccccgctccctcccgaggggccgcgcgcacgggaggacggagaggcggaaaggatggcgctgtgacagccgggccggagccctcgcgtccccaccccgcgccctggccgctgggcccggcgagatggagtccacagcctaccctctcaatttgagcctgaaagaagaggaagaggaagaagagattcagagccgggaactagaggacggcccggcagacatgcagaaagtacgaatctgctctgagggcggatggaattcccattccctaagccagacatgatcacccgtttggaaggggaggaggagtctcagaattctgacgagtggcagctccaaggaggcacctctgcagaaaatgaagaatctgacgtaaagcctccagactggccaaacccaatgaatgctacctcccagtttcctcagcctcagcactttgacagctttggcctccgtctgcctcgggatatcacagagctgcccgagtggagtgaggggtaccccttctacatggccatgggcttcccagggtatgacctctcggctgatgacatagctgggaagtttcagttcagccggggcatgcgccgcagttacgacgcagggttcaagctgatggtagtggaatatgctgagagtaccaacaactgccaggctgccaagcagtttggagtattggaaaaaaacgttcgagactggcgcaaagtgaagccacagcttcaaaacgcccacgccatgcggcgggcattccgaggccccaagaatgggaggtttgctctggtggaccagcgtgtggccgaatatgtcagatacatgcaggccaaaggggaccccatcacccgggaggcgatgcagctgaaagctctcgaaatcgcccaggaaatgaacattccagagaaagggttcaaggcaagcttgggttggtgtcgaagaatgatgagaaggtatgacctgtctctgaggcataaagtgcccgtgccccagcacctgccggaagacctgactgagaaactcgtcacttaccagcgcagtgtcctggctctgcgcagggcgcatgactatgaggtagctcagatggggaatgcagatgagacgcccatttgtttagaggtgccatcacgggtaactgttgataaccagggcgaaaagcctgtcttggtcaagacaccaggcagggaaaaactgaaaatcacagcaatgcttggtgtcttggctgatgggaggaagttaccaccgtacatcattttgaggggaacatatatccccccggggaagtttcccagtgggatggaaattcgctgccaccggtatgggtggatgactgaagacttgatgcaggactggttggaagtggtgtggagacggaggacaggagcagtgcccaagcagcgagggatgctgatcttgaatggcttccggggccatgccacagattccgtgaagaactccatggaaagcatgaacactgacatggtgatcatcccagggggtctgacctcacagcttcaggtgctggatgtcgtggtctacaagccactgaatgacagtgtgcgggcccagtactccaactggcttctggctgggaacctggcgctgagcccaaccgggaatgctaagaagccacccctgggcctctttctggagtgggtcatggtcgcgtggaatagcatctcaagtgagtccatcgtccaagggttcaagaagtgccatatctccagcaacttggaggaggaagacgatgtcctgtgggaaatcgagagtgagttgccaggaggaggagaaccaccaaaagattgtgacaccgaaagcatggctgagagcaactgaagggaaagggaaaggtaaccactcaggagtagatactcagtgcctttgctgacatgtctgtgttctacaaacaccttctctccattatttttctgtttttaagttcccttagagcctacagtgcagtagtgtagatcaggggtccccaacccccaggtcacggaccatactggtccatggcctgtcaggaactgggctgcacagcaggaggtgagcggcaggtgagcaagcattaccacctgagctccgcccgctgtcacagcagcggcattagattctcataggagcacaaaccctgttgt

SEQ ID NO: 266572 - DNA, 1575 bp, Artificial Sequence
  derived and/or modified sequence
atggagttccccttccccaagccagacatgatcacccggctggagggggaggaggagagccagaacagtgatgagtggcagctgcagggcggcaccagcgcagaaaatgaggagagtgatgtgaagcccccagactggcccaaccccatgaatgccaccagccagttcccccagccccagcactttgacagctttggcctgcggctgccccgggacatcacagagctgcctgagtggagcgagggctaccccttctacatggccatgggcttccctggctatgacctgtctgcagatgacattgctgggaagttccagttcagccggggcatgaggaggagctatgatgctggcttcaagctgatggtggtggagtatgcagagagcaccaacaactgccaggccgccaagcagtttggagtgctggagaagaatgtgcgggactggaggaaggtgaagccccagctgcagaatgcccacgccatgagaagagccttccggggccccaagaatggccgctttgccctggtggaccagagggtggccgagtatgtgcgctacatgcaggccaagggggaccccatcacccgggaggccatgcagctgaaggccctggagatcgcccaggagatgaacatccctgagaagggcttcaaggccagcctgggctggtgcaggaggatgatgagaagatatgacctgagcctgcggcacaaggtgcctgtgccccagcacctgcctgaggacctgacagagaagctggtgacctaccagaggtctgtgctggccctgcggcgggcccatgactatgaggtggcccagatgggaaatgctgatgagacccccatctgcctggaggtgcccagccgggtgacagtggacaaccagggcgagaagcctgtgctggtgaagaccccaggccgggagaagctgaagatcacagccatgctgggcgtgctggctgatggcaggaagctgcccccctacatcatcctgcggggcacctacatccccccaggcaagttccccagcggcatggagatccgctgccacagatatggctggatgacagaggacctgatgcaggactggctggaggtggtgtggaggagaagaactggagctgtgcccaagcagaggggcatgctgatcctgaatggcttccggggccacgccacagattctgtgaagaacagcatggagagcatgaacacagacatggtgatcatccctgggggcctgaccagccagctgcaggtgctggatgtggtggtgtacaagcccctgaatgacagcgtgcgggcccagtacagcaactggctgctggccggcaacctggccctgagccccactggaaatgccaagaagccacccctgggcctcttcctggagtgggtgatggtggcctggaacagcatcagcagcgagagcatcgtgcagggcttcaagaagtgccacatcagcagcaacctggaggaggaggatgatgtgctgtgggagattgaaagtgagctgcccggcggcggggagccccccaaggactgtgacacagagagcatggccgagagcaactag

SEQ ID NO: 266573 - DNA, 1575 bp, Artificial Sequence
  derived and/or modified sequence
atggagttccccttccccaagcccgacatgatcacccggctggagggcgaggaggagtcccagaactccgatgagtggcagctgcagggcgggacatctgctgagaatgaggagagtgatgtgaagccgccggactggcccaatcccatgaacgctacatcccagttcccacaaccacaacacttcgacagctttgggcttagactccccagagacataaccgagctgccggaatggagcgaggggtatcctttctacatggccatgggtttcccaggctatgatctgtctgcagatgatatcgccggcaagtttcagttttcacggggcatgaggagatcatacgacgcagggtttaagctgatggtggtagaatacgcagaatcaacaaacaattgccaagcggctaagcagtttggtgtcttagaaaaaaacgtcagggactggcgtaaagttaagccacagctgcagaacgcacatgcgatgcgccgagccttccggggcccaaagaacggaaggtttgccttggtggatcagagagtggccgagtatgtgagatacatgcaggcaaaaggcgaccccataacgcgcgaagcgatgcagctgaaagccctggagatagcgcaggagatgaatatcccggaaaaggggttcaaggcttccttgggatggtgcagaaggatgatgcggcggtacgatctcagcctccgacataaagtgccagtgcctcagcatctccccgaagaccttactgaaaagctcgtgacgtatcaaagatcagtactggccttacgacgagcccatgattatgaagtggcacaaatgggaaatgccgacgaaacacccatatgcttggaggtcccaagtagggtaaccgttgacaaccagggggaaaagccagtactggtcaagacgcccggacgggaaaagttgaaaatcacagcaatgttgggcgttctggccgacggacgtaaacttcccccgtacatcatcctgagggggacttacatccctccgggcaagttcccaagcgggatggaaatacgctgccacagatatggatggatgactgaggaccttatgcaagactggctcgaagtggtgtggcggagaagaacgggcgcggtgcccaagcagcgggggatgttaatcctgaatggttttcgtggtcatgccaccgactcagtgaagaatagcatggagagtatgaatactgacatggtgattatcccaggaggattaacctcacagctgcaagtcctcgatgtggttgtgtataagccattaaacgactcagtgagagcccagtactccaattggctgctggccgggaatctggccttgtcaccaaccggtaacgccaagaaaccaccactgggcctattccttgagtgggtgatggtggcatggaactctatttcctccgaatccattgttcaaggctttaagaagtgtcacatctcttccaatttagaggaggaggacgacgtgctgtgggagattgaaagtgaattgcctgggggtggcgaacctcccaaggattgtgacacagagtcaatggctgagtccaattag

SEQ ID NO: 266574 - DNA, 1575 bp, Artificial Sequence
  derived and/or modified sequence
atggagtttccctttcccaagcccgatatgataacacgacttgagggggaggaagaaagtcagaacagcgacgagtggcagctgcaggggggaacctcagccgagaatgaggagagcgatgtgaagcctcctgattggccaaatcctatgaacgccacgagccagtttcctcagccccagcactttgacagcttcggcctcagactccctagggacattaccgagctgcccgaatggagcgaaggctaccccttctacatggctatggggttcccagggtacgatctcagtgctgatgatatcgccggaaagtttcagtttagtaggggaatgcggaggtcatatgatgccggattcaagctgatggttgttgagtatgccgagtctactaataattgtcaggccgctaaacagtttggcgtgcttgaaaagaacgtgagggactggagaaaagtcaagccacagctgcaaaatgcccacgctatgagaagggctttcaggggcccaaaaaatggcaggttcgctctggtggatcaaagggttgccgaatatgttagatacatgcaggcaaagggggatccaattactagagaggctatgcagctgaaagccctagaaatagcccaagaaatgaatatccctgaaaaaggattcaaagcttccctgggttggtgccggaggatgatgcgtaggtacgatctgagtctacgccacaaagtcccagtaccccaacacctacctgaggatttaaccgagaaactcgtgacttaccagagatccgtcctggcattgagaagagcccatgattacgaggttgcacagatgggaaatgctgacgaaaccccaatatgcctggaggttccttcaagggtgactgtggacaaccagggtgagaaaccggtgttggttaaaacgccaggaagggagaagctcaaaataacagccatgctcggtgtgctcgcagacggaaggaagctgccaccatacattattctccgcggtacctacatcccgccaggcaaatttccttcaggcatggaaattcgctgccacagatacgggtggatgaccgaggacttgatgcaggactggctggaagttgtctggagacgccgaacaggggctgtgcctaaacaacgtggcatgcttatcctaaacggattccgtgggcacgccacagactccgtcaagaatagcatggagagcatgaacacagatatggtgattatccctggaggactgacgtcccagctgcaagtgctggacgttgtcgtgtataaacctctcaacgacagcgtgagggcccagtatagcaattggctgttggccggtaacctcgccctctcacctacaggaaatgcgaagaagcccccactgggactatttctggaatgggtaatggtcgcatggaactcgatcagtagcgagagcatcgtgcagggcttcaaaaagtgtcacatatcttccaatctagaggaggaagatgatgtcctgtgggagattgaatcagaacttccaggtgggggtgagcccccaaaggattgcgacaccgagtccatggcagaatccaattag

SEQ ID NO: 266575 - DNA, 1575 bp, Artificial Sequence
  derived and/or modified sequence
atggagttccccttccccaagcccgacatgatcaccagactggagggcgaggaggagagccagaacagcgacgagtggcagctgcagggcggcaccagcgccgagaacgaggagagcgacgtgaagccccccgactggcccaaccccatgaacgccaccagccagttcccccagccccagcacttcgacagcttcggcctgagactgcccagagacatcaccgagctgcccgagtggagcgagggctaccccttctacatggccatgggcttccccggctacgacctgagcgccgacgacatcgccggcaagttccagttcagcagaggcatgagaagaagctacgacgccggcttcaagctgatggtggtggagtacgccgagagcaccaacaactgccaggccgccaagcagttcggcgtgctggagaagaacgtgagagactggagaaaggtgaagccccagctgcagaacgcccacgccatgagaagagccttcagaggccccaagaacggcagattcgccctggtggaccagagagtggccgagtacgtgagatacatgcaggccaagggcgaccccatcaccagagaggccatgcagctgaaggccctggagatcgcccaggagatgaacatccccgagaagggcttcaaggccagcctgggctggtgcagaagaatgatgagaagatacgacctgagcctgagacacaaggtgcccgtgccccagcacctgcccgaggacctgaccgagaagctggtgacctaccagagaagcgtgctggccctgagaagagcccacgactacgaggtggcccagatgggcaacgccgacgagacccccatctgcctggaggtgcccagcagagtgaccgtggacaaccagggcgagaagcccgtgctggtgaagacccccggcagagagaagctgaagatcaccgccatgctgggcgtgctggccgacggcagaaagctgcccccctacatcatcctgagaggcacctacatcccccccggcaagttccccagcggcatggagatcagatgccacagatacggctggatgaccgaggacctgatgcaggactggctggaggtggtgtggagaagaagaaccggcgccgtgcccaagcagagaggcatgctgatcctgaacggcttcagaggccacgccaccgacagcgtgaagaacagcatggagagcatgaacaccgacatggtgatcatccccggcggcctgaccagccagctgcaggtgctggacgtggtggtgtacaagcccctgaacgacagcgtgagagcccagtacagcaactggctgctggccggcaacctggccctgagccccaccggcaacgccaagaagccccccctgggcctgttcctggagtgggtgatggtggcctggaacagcatcagcagcgagagcatcgtgcagggcttcaagaagtgccacatcagcagcaacctggaggaggaggacgacgtgctgtgggagatcgagagcgagctgcccggcggcggcgagccccccaaggactgcgacaccgagagcatggccgagagcaactag

SEQ ID NO: 266576 - protein, 652 aa, Artificial Sequence
  derived and/or modified sequence
MESRDHNNPQEGPTSSSGRRAAVEDNHLLIKAVQNEDVDLVQQLLEGGANVNFQEEEGGWTPLHNAVQMSREDIVELLLRHGADPVLRKKNGATPFILAAIAGSVKLLKLFLSKGADVNECDFYGFTAFMEAAVYGKVKALKFLYKRGANVNLRRKTKEDQERLRKGGATALMDAAEKGHVEVLKILLDEMGADVNACDNMGRNALIHALLSSDDSDVEAITHLLLDHGADVNVRGERGKTPLILAVEKKHLGLVQRLLEQEHIEINDTDSDGKTALLLAVELKLKKIAELLCKRGASTDCGDLVMTARRNYDHSLVKVLLSHGAKEDFHPPAEDWKPQSSHWGAALKDLHRIYRPMIGKLKFFIDEKYKIADTSEGGIYLGFYEKQEVAVKTFCEGSPRAQREVSCLQSSRENSHLVTFYGSESHRGHLFVCVTLCEQTLEACLDVHRGEDVENEEDEFARNVLSSIFKAVQELHLSCGYTHQDLQPQNILIDSKKAAHLADFDKSIKWAGDPQEVKRDLEDLGRLVLYVVKKGSISFEDLKAQSNEEVVQLSPDEETKDLIHRLFHPGEHVRDCLSDLLGHPFFWTWESRYRTLRNVGNESDIKTRKSESEILRLLQPGPSEHSKSFDKWTTKMSKLRHRQIIFPTTQNQ

SEQ ID NO: 266577 - protein, 154 aa, Artificial Sequence
  derived and/or modified sequence
MIGKLKFFIDEKYKIADTSEGGIYLGFYEKQEVAVKTFCEGSPRAQREVSCLQSSRENSHLVTFYGSESHRGHLFVCVTLCEQTLEACLDVHRGEDVENEEDEFARNVLSSIFKAVQELHLSCGYTHQDLQPQNILIGPWTAGPLCGKEGKHLI

SEQ ID NO: 266578 - DNA, 1959 bp, Artificial Sequence
  derived and/or modified sequence
atggagtcccgcgaccataacaacccacaggagggccctacgtcctcctcaggcaggcgcgcggccgtcgaggacaatcatttgctgatcaaggctgtgcaaaatgaggatgttgatttggtgcaacaattgctggaaggcggcgccaatgttaactttcaagaagaagagggtggatggactcctctccacaacgccgtacagatgagtagggaagacatcgtcgagctccttctaagacatggcgccgaccccgtgttacggaagaaaaacggagccacaccatttatcctggctgccatcgcgggctccgtgaaactgcttaaactgtttttaagcaaaggtgctgacgttaacgagtgcgacttttatggcttcaccgctttcatggaggccgccgtgtatggtaaagttaaagccctgaaattcctatacaaaaggggcgctaacgtcaacttgcgaaggaagactaaggaagaccaggaaagactacggaaaggcggcgcgactgctctgatggacgcagccgagaaggggcacgtcgaggtgcttaagatcctgctggacgaaatgggtgctgatgttaacgcctgtgataatatgggaaggaatgcactcatccacgccttgctgtcctccgatgattcagacgtcgaagccataacccacctgctgttagaccatggagccgatgttaatgtgcgcggcgaacgcgggaaaacacccctgatcttagctgtcgagaaaaagcacctggggctggtgcagcgcttgttggagcaggaacatatagaaatcaacgacacagactctgatgggaaaaccgctctgttgctggcagtggagttgaaactgaagaagatcgccgaacttctatgcaagcgcggagctagtactgactgtggagacctggtgatgactgcacggaggaactacgaccattcactggttaaggtgctgctgtcccacggcgctaaggaagattttcatccaccggccgaggattggaagccccaatcctcccactggggcgctgccctgaaggaccttcaccgaatttacaggcccatgataggtaagcttaaattttttatcgatgaaaaatacaaaattgcagatacatccgaaggtgggatctatctggggttctacgagaaacaggaggttgctgtgaaaactttctgcgagggctctccccgtgcccaaagggaagtatcctgccttcaaagttcacgagagaatagtcacttggttactttctatggcagcgaaagccaccgagggcatttgtttgtttgcgtgacactgtgtgaacagaccctcgaagcctgcttggatgttcaccgcggtgaagatgtggagaacgaagaagatgaattcgccaggaacgtgctgtccagtattttcaaagccgtgcaagagttacacctgagctgcggttatactcaccaggatctgcagccccagaatattctgatagactccaagaaggccgcccatctggctgactttgacaagtccataaagtgggcaggtgatcctcaggaggtaaaacgcgaccttgaagatctggggcgactcgttttatacgtggttaagaagggttccatttcctttgaggacctcaaggcccaatcaaacgaagaggtggttcaattgtctcccgatgaggagaccaaggatctgatccaccggcttttccacccaggggaacatgttagggactgtctgtcagacctacttggccacccctttttctggacttgggagagccgataccgtaccctccgcaacgtgggaaatgagtctgatataaagacacgcaagtctgagtctgagatcctgcggctgttgcagccaggcccaagcgaacatagcaagtctttcgacaagtggaccactaagatgagtaagctgaggcaccgccaaattatattcccaacaacacagaatcagtag

SEQ ID NO: 266579 - DNA, 465 bp, Artificial Sequence
  derived and/or modified sequence
atgatagggaaattgaaattctttattgacgagaaatacaaaattgctgatacttctgagggtggcatttacctgggcttctatgagaagcaggaagttgccgtcaaaacattttgtgagggcagccctagggcacagagggaagtctcttgcctgcagagttcccgagagaacagccacctggtcaccttttacggaagcgaaagtcacagaggccacctgttcgtttgtgtgacgttatgtgaacagacactggaggcttgcttggatgtgcacaggggtgaggacgtagagaacgaagaagatgagttcgctagaaacgtgctgtcctccatctttaaagccgtgcaagaactccatctgagctgtggatatacgcatcaggatctccagccacagaatatactcatcgggccttggaccgcgggcccattgtgcggcaaggaggggaaacacctgatctag

SEQ ID NO: 266580 - DNA, 1959 bp, Artificial Sequence
  derived and/or modified sequence
atggagagccgggaccacaacaacccccaggagggccccaccagcagcagtggaagaagagctgctgtggaggacaaccacctgctgatcaaggctgtgcagaatgaagatgtggacctggtgcagcagctgctggagggcggggccaacgtgaacttccaggaggaggagggcggctggacccccctgcacaatgctgtgcagatgagccgggaggacatcgtggagctgctgctgcggcatggagctgaccctgtgctgaggaagaagaatggagccacccccttcatcctggccgccatcgccggctctgtgaagctgctgaagctgttcctgagcaaaggagcagatgtgaatgaatgtgacttctacggcttcaccgccttcatggaggccgctgtgtatggcaaggtgaaggccctgaagttcctgtacaagagaggagccaacgtgaacctgcggaggaagaccaaggaggaccaggagcggctgaggaagggcggggccacagccctgatggatgctgctgagaagggccacgtggaggtgctgaagatcctgctggatgagatgggcgcagatgtgaatgcctgtgacaacatgggcagaaatgccctgatccacgccctgctgagcagtgatgacagtgatgtggaggccatcacccacctgctgctggaccacggggctgatgtgaatgtgcggggggagcggggcaagacccccctcatcctggccgtggagaagaagcacctgggcctggtgcagaggctgctggagcaggagcacatcgagatcaatgacacagacagtgatggcaagacagccctgctgctggccgtggagctgaagctgaagaagattgctgagctgctgtgcaagagaggagccagcacagactgtggggacctggtgatgacagcccggaggaactatgaccacagcctggtgaaggtgctgctgagccatggagccaaggaggacttccaccccccagctgaggactggaagccccagagcagccactggggcgccgccctgaaggacctgcaccgcatctaccggcccatgattggcaagctgaagttcttcattgatgagaagtacaagattgctgacaccagcgagggcggcatctacctgggcttctatgagaagcaggaggtggccgtgaagaccttctgtgagggcagcccccgggcccagcgggaggtgtcctgcctgcagagcagccgggagaacagccacctggtgaccttctacggcagcgagagccaccggggccacctgtttgtgtgtgtgaccctgtgtgagcagaccctggaggcctgcctggatgtgcacagaggagaagatgtggagaatgaagaagatgaatttgccagaaatgtgctgagcagcatcttcaaggctgtgcaggagctgcacctgagctgtggctacacccaccaggacctgcagccccagaacatcctgattgacagcaagaaggccgcccacctggccgactttgacaagagcatcaagtgggccggggacccccaggaggtgaagagggacctggaggacctgggccgcctggtgctgtatgtggtgaagaagggcagcatcagctttgaggacctgaaggcccagagcaatgaggaggtggtgcagctgagcccagatgaggagaccaaggacctgatccacaggctcttccaccctggagagcacgtgcgggactgcctgagtgacctgctgggccaccccttcttctggacctgggagagccgctaccgcaccctgagaaatgtgggcaatgaaagtgacatcaagaccaggaagtctgagagcgagatcctgcggctgctgcagcccggccccagcgagcacagcaagagctttgacaagtggaccaccaagatgagcaagctgcggcaccggcagatcatcttccccaccacccagaaccagtag

SEQ ID NO: 266581 - DNA, 465 bp, Artificial Sequence
  derived and/or modified sequence
atgattggcaagctgaagttcttcattgatgagaagtacaagattgctgacaccagcgagggcggcatctacctgggcttctatgagaagcaggaggtggccgtgaagaccttctgtgagggcagcccccgggcccagcgggaggtgtcctgcctgcagagcagccgggagaacagccacctggtgaccttctacggcagcgagagccaccggggccacctgtttgtgtgtgtgaccctgtgtgagcagaccctggaggcctgcctggatgtgcacagaggagaagatgtggagaatgaagaagatgaatttgccagaaatgtgctgagcagcatcttcaaggctgtgcaggagctgcacctgagctgtggctacacccaccaggacctgcagccccagaacatcctgattggcccctggacagctggccccctgtgtgggaaggagggcaagcacctgatctag

SEQ ID NO: 266582 - DNA, 1959 bp, Artificial Sequence
  derived and/or modified sequence
atggagagccgggaccacaacaacccccaggagggccccaccagctcttcaggccgaagggccgccgtggaggacaaccatttgctgatcaaagccgtgcagaacgaagacgtcgatctggtccaacagctcctggagggtggggctaacgttaattttcaagaggaagaaggggggtggacacctcttcacaacgcagtgcagatgtcccgggaggacatcgttgagcttctactgaggcacggggctgaccctgtactgcgcaaaaagaacggtgcaaccccctttatactggcagccattgcaggatctgttaagctactcaagcttttcctcagtaagggcgctgacgtgaacgagtgtgacttttatggctttactgcgttcatggaggcagctgtgtacggcaaagtcaaggccctcaagtttttgtataagagaggagctaatgtaaacctgcggaggaagactaaggaagatcaggagcgactaagaaaaggcggagctaccgccctgatggacgctgcagaaaagggacatgttgaagttctgaaaatcctccttgacgagatgggagccgatgtgaatgcttgcgacaatatgggcagaaacgccctcatccacgccctcctgagtagtgacgatagcgatgtcgaagctatcacgcacttactgctggatcatggcgctgacgtgaatgtaaggggagaaagagggaaaacacccctgattctggcagtcgagaagaagcatctgggtcttgtgcagaggctgctggaacaggaacatatcgagatcaacgatacagactctgacggcaaaaccgcactactgctcgctgtagagcttaagcttaagaagattgcggagctactctgcaagaggggggccagtaccgactgtggcgacctggtcatgactgcacgtagaaattacgatcactcactcgtgaaagttctgctgtctcacggcgctaaagaggacttccatccgccagcagaagattggaaaccccagtcttcgcactggggcgcagctctcaaggatttgcaccgtatttatcggcccatgattggcaagctgaagttctttattgatgagaagtataaaattgcagatacatctgaagggggaatctatctgggattttatgagaagcaggaggttgctgtgaaaactttttgcgagggtagtccgagagctcagcgtgaagtgtcatgcctgcaatctagtcgtgagaacagccacttggtcactttttacggatctgagtcccatcgggggcatttattcgtgtgtgtgactctatgtgaacaaacactggaggcatgcctggacgtacatcggggggaagatgttgaaaacgaagaagatgagttcgctcggaacgtgttgtcttccatttttaaggctgtgcaagaactccatctctcatgtggatatacccaccaggatttacagccacagaacatccttatcgactccaaaaaagctgcgcatttggctgactttgacaaaagcattaaatgggcaggcgatccccaggaggtgaagcgggacctggaggacttaggacggctggtcttgtacgtcgtgaagaaagggagcatttcattcgaagacctgaaggcccagtctaacgaagaagttgtgcagctgtctcctgacgaggagaccaaggacctgattcatcggctctttcacccaggagagcatgttcgagattgcctgagcgatcttttggggcatccgtttttttggacctgggaaagtagataccgcactttaaggaacgtaggcaatgagtcggatatcaaaacccgtaagtcagaaagcgaaattctgcggcttcttcaacctgggccgtcagagcatagcaaaagctttgataaatggaccaccaaaatgtcaaagctcaggcatcgccagataatttttcctacaacacagaaccagtag

SEQ ID NO: 266583 - DNA, 465 bp, Artificial Sequence
  derived and/or modified sequence
atgatcggcaagctgaagttcttcatcgacgagaagtacaagatcgccgatacaagtgagggcggcatttatcttgggttctatgagaaacaggaggtcgccgttaaaaccttttgcgaaggctcacccagggcgcagagagaggtttcctgtttgcagtcgagccgagaaaactcacatttggttacattctacgggagtgaatctcacaggggccatttattcgtgtgcgtaacactctgcgaacagactttagaagcttgtttggacgtgcaccggggtgaagacgttgaaaacgaggaggatgagttcgccagaaacgtgctgagttccattttcaaggccgtacaggagttgcacctgtcttgtggatacacccaccaggatctccagcctcagaatatcctgatcggcccctggaccgctggccccctgtgtggtaaagagggaaagcacctcatctag

SEQ ID NO: 266584 - DNA, 1959 bp, Artificial Sequence
  derived and/or modified sequence
atggaatctagggatcataacaatcctcaggaggggcctacgagttctagcggacgcagggcagctgtcgaagataatcatctcctgatcaaggcggtccagaatgaggatgtggatttggtgcaacaactgctggagggcggagctaacgttaacttccaggaagaagagggaggctggacgcctttacataatgctgtgcagatgtccagggaggacattgtggagctattgctgaggcacggcgcagaccctgtgctgcgcaagaaaaatggggctacccccttcattcttgctgcaattgcaggctctgtgaagctgcttaagttattcctgtccaagggagccgatgtcaacgaatgcgacttctacggatttaccgcatttatggaagcggctgtttatggtaaggtgaaagcattgaaatttctttacaaaagaggggctaacgtcaatcttagacggaaaaccaaagaggatcaggagagactgcgaaaaggaggagctacggctttaatggatgccgcagagaaggggcacgtggaagtgcttaaaattctgcttgacgaaatgggcgcagacgtgaatgcttgcgataatatgggcagaaacgcattaatccacgccctgttgtcctcagatgactctgacgtggaggcgattacacatctgctcctcgaccatggtgctgatgtgaacgtgcgaggcgaaagaggaaagacccctctaatacttgctgttgagaagaaacatttaggtcttgttcaaagactccttgaacaagagcatattgagatcaacgatacggatagtgacggaaaaaccgcgctgctgctcgctgtggagttgaaactgaagaaaatcgccgagcttctttgtaagcgtggggcatctaccgactgcggcgatcttgtcatgaccgcccgtagaaattacgatcatagtttggtcaaagtgctgttatcccatggagctaaagaagactttcatccccctgccgaggattggaaaccgcagagctcacactggggggcagctctaaaggacctacaccggatttatcggccaatgatcggtaagctgaaattttttatagatgagaaatacaaaattgcagacacaagcgaaggcggaatctatctggggttctatgagaaacaagaggttgcagtgaaaactttctgtgagggaagtccccgtgcccagagggaggtgtcctgcctccaatcctctagagagaatagtcatttggtgacgttctacggctccgaatctcaccgcggtcatctattcgtctgcgtcactctatgcgagcagaccctcgaagcctgtcttgacgtacatagaggtgaagatgtggagaatgaggaggacgaatttgcacggaatgtgctctcttcaatatttaaggcagtgcaagagttacacttgagctgcggctacacccatcaggacctgcagcctcagaacattcttatagacagcaaaaaggccgctcacttggccgacttcgacaagtccatcaagtgggccggtgacccgcaagaagtgaagcgggacttggaagaccttgggcgtcttgtattgtatgtggtgaagaagggttcaatctcctttgaggatctgaaagctcagagtaacgaagaagtcgtgcagctgtctcccgatgaggaaactaaggatctgattcacagactgttccatcccggtgaacatgtccgagattgcctctccgaccttttgggacatcccttcttttggacatgggagtctagatatcgaacactgcgaaacgtcggaaatgagtctgacatcaagacacgcaagtcagagagcgaaatcctccgcctcttgcagccaggcccttccgaacacagtaagtcctttgacaaatggacaacaaaaatgtccaaactcaggcacagacagatcatatttcccacgacccagaaccagtag

SEQ ID NO: 266585 - DNA, 465 bp, Artificial Sequence
  derived and/or modified sequence
atgattggaaaacttaagtttttcatcgacgagaagtacaaaatcgccgacacatcagagggaggtatctatctgggcttttatgagaaacaggaggtggcggtgaaaacattttgtgaaggaagccctcgagcccagcgcgaggtgtcctgtcttcagtcttctcgtgagaacagtcatcttgtaaccttttacgggtccgagagtcaccgcggacatttgttcgtgtgtgtgactctgtgcgagcagacgctggaagcgtgcttagacgttcaccgaggagaggacgtggagaatgaagaagatgagttcgcccgtaatgtgctttccagtatcttcaaggctgtgcaggagttacacctttcttgtggctacacacatcaggatcttcaaccgcagaacattctcatcggcccttggaccgccggtcctctctgcggaaaggaaggcaagcatctgatttag

SEQ ID NO: 266586 - DNA, 4046 bp, Artificial Sequence
  derived and/or modified sequence
gacgcagcaggaggaaactgctcgggctgcaagcagtcttccaggctttgcggctgccaaaggaataattgagacgtctgagttgagcaggtggaatgtcagaagactgagaacattgttccttcttcatactgctgctctgttgccagagaatcccaatttacactcaaagcttctttgattaagtgctaggagataaatttgcattttctcaaggaaaaggctaaaagtggtagcaggtggcatttaccgtcatggagagcagggatcataacaacccccaggagggacccacgtcctccagcggtagaagggctgcagtggaagacaatcacttgctgattaaagctgttcaaaacgaagatgttgacctggtccagcaattgctggaaggtggagccaatgttaatttccaggaagaggaagggggctggacacctctgcataacgcagtacaaatgagcagggaggacattgtggaacttctgcttcgtcatggtgctgaccctgttctgaggaagaagaatggggccacgccttttatcctcgcagcgattgcggggagcgtgaagctgctgaaacttttcctttctaaaggagcagatgtcaatgagtgtgatttttatggcttcacagccttcatggaagccgctgtgtatggtaaggtcaaagccctaaaattcctttataagagaggagcaaatgtgaatttgaggcgaaagacaaaggaggatcaagagcggctgaggaaaggaggggccacagctctcatggacgctgctgaaaaaggacacgtagaggtcttgaagattctccttgatgagatgggggcagatgtaaacgcctgtgacaatatgggcagaaatgccttgatccatgctctcctgagctctgacgatagtgatgtggaggctattacgcatctgctgctggaccatggggctgatgtcaatgtgaggggagaaagagggaagactcccctgatcctggcagtggagaagaagcacttgggtttggtgcagaggcttctggagcaagagcacatagagattaatgacacagacagtgatggcaaaacagcactgctgcttgctgttgaactcaaactgaagaaaatcgccgagttgctgtgcaaacgtggagccagtacagattgtggggatcttgttatgacagcgaggcggaattatgaccattcccttgtgaaggttcttctctctcatggagccaaagaagattttcaccctcctgctgaagactggaagcctcagagctcacactggggggcagccctgaaggatctccacagaatataccgccctatgattggcaaactcaagttctttattgatgaaaaatacaaaattgctgatacttcagaaggaggcatctacctggggttctatgagaagcaagaagtagctgtgaagacgttctgtgagggcagcccacgtgcacagcgggaagtctcttgtctgcaaagcagccgagagaacagtcacttggtgacattctatgggagtgagagccacaggggccacttgtttgtgtgtgtcaccctctgtgagcagactctggaagcgtgtttggatgtgcacagaggggaagatgtggaaaatgaggaagatgaatttgcccgaaatgtcctgtcatctatatttaaggctgttcaagaactacacttgtcctgtggatacacccaccaggatctgcaaccacaaaacatcttaatagattctaagaaagctgctcacctggcagattttgataagagcatcaagtgggctggagatccacaggaagtcaagagagatctagaggaccttggacggctggtcctctatgtggtaaagaagggaagcatctcatttgaggatctgaaagctcaaagtaatgaagaggtggttcaactttctccagatgaggaaactaaggacctcattcatcgtctcttccatcctggggaacatgtgagggactgtctgagtgacctgctgggtcatcccttcttttggacttgggagagccgctataggacgcttcggaatgtgggaaatgaatccgacatcaaaacacgaaaatctgaaagtgagatcctcagactactgcaacctgggccttctgaacattccaaaagttttgacaagtggacgactaagatgagcaagctgaggcacagacaaataatttttccaactacacagaaccagtaaggggtgcaccaggatttgaagctgggaaggatggctgcagaggccatgtgcttaagccacaccactacatgaagctgtgatggcatcaagtctaccaactcatttactcactgaggaaattgaggctcagagaccacactcaaattactcatgctggacagtcagagattggcagacctggaaagaggaacttgttcttttatttcccaatttattggttcttttccctaaattccatgggcttatattgaattttgatagtcttcaggttttaacttcaagttttaccttttaattcccattttacactttgtttttctgttgacttgcccattttcatggtcacacaattaattttgtcagcataggtctggagcccaagttttccagcttgtatgactgtattggttcttgacttgccccatcctgccacacatacgtgcttggcgtttctcacgggtgttctgcacagagtgcacctggccagtctcagcagcatcctcactagcattgctctttcatcagttactcttcctaagtgacccactggattcttgactgttgcatcttgatctcgtagcccaaactctttctaaatatgagagccatctatggctctgtatctatgagggtgacaagcacagacaaagaggatgacattactgtgatatgaaaggagttgccctgggacacctgcaggcaaggagaagcaagtaaccttgtttaaaatataaattttagagggtactagtatagttttgttacatggatatattgtgtagtggtaaagttgggcttttagtgtaaccattacctgaataacgcacattgtacccattaagtaatttctcatccctctccctccaaccctcccacctttccaagtctccaattatattattccactctgtacatccatgtgtacacattattgagctcccacttataagagagaacatgtgatatttgactttctgtttgtaagtcatttcacttaaaataatggcctccagttccgtccatgtggccacaaaagacatgatttcattcttcttttttatggctgaaatggcccagacacattttctttatccaatcatctgttgatggacacttaggtggattccatatctttgctattgtgaatagtgctgtagtaaacatatgagtgccggtatctttttgatataagatttcttgggctgagtgcagtggctcacacctgtaatcccagcactttgggaggccgagatgggtggatcatttgaggtcaggagtttaagaccagcctggccaacatggcaaaaccctgtctctactaaaaatacaaaacttagccaagcattgtggcacacgtctgtaatcccagctacttgggcggctgaggcatgagaattgcttcagcctgtgaagcagaggttacagctttattttggcagatactcagtacattcttttctctgcatcctcatcaacatctgttactttttgactttttaatagtagcccctagtataagatgatatctcattggttttaatttgcatttctctgatgattagtgatgttaagcattttttcatatgctttttggcaatttgtacgtcttcttttgagaaatgtctattcttgtcatttgcccactttttaatggtgttattattttttattgttaagttgtttgagttccttgtaaattctggatatcaatcctctgttggatgcatagtttgcaaatattttttttcccatgctgcaggttgtttgttcactctgtttatttcttttgctgcgcagaagtttttagtttaattaaaccccatctgtttcttt

SEQ ID NO: 266587 - DNA, 2348 bp, Artificial Sequence
  derived and/or modified sequence
tttgcggctgccaaaggaataattgagacgtctgagttgagcaggtggaatgtcagaagactgagaacattgttccttcttcatactgctgctctgttgccagagaatcccaatttacactcaaagcttctttgattaagtgctaggagataaatttgcattttctcaaggaaaaggctaaaagtggtagcaggtggcatttaccgtcatggagagcagggatcataacaacccccaggagggacccacgtcctccagcggtagaagggctgcagtggaagacaatcacttgctgattaaagctgttcaaaacgaagatgttgacctggtccagcaattgctggaaggtggagccaatgttaatttccaggaagaggaagggggctggacacctctgcataacgcagtacaaatgagcagggaggacattgtggaacttctgcttcgtcatggtgctgaccctgttctgaggaagaagaatggggccacgccttttatcctcgcagcgattgcggggagcgtgaagctgctgaaacttttcctttctaaaggagcagatgtcaatgagtgtgatttttatggcttcacagccttcatggaagccgctgtgtatggtaaggtcaaagccctaaaattcctttataagagaggagcaaatgtgaatttgaggcgaaagacaaaggaggatcaagagcggctgaggaaaggaggggccacagctctcatggacgctgctgaaaaaggacacgtagaggtcttgaagattctccttgatgagatgggggcagatgtaaacgcctgtgacaatatgggcagaaatgccttgatccatgctctcctgagctctgacgatagtgatgtggaggctattacgcatctgctgctggaccatggggctgatgtcaatgtgaggggagaaagagggaagactcccctgatcctggcagtggagaagaagcacttgggtttggtgcagaggcttctggagcaagagcacatagagattaatgacacagacagtgatggcaaaacagcactgctgcttgctgttgaactcaaactgaagaaaatcgccgagttgctgtgcaaacgtggagccagtacagattgtggggatcttgttatgacagcgaggcggaattatgaccattcccttgtgaaggttcttctctctcatggagccaaagaagattttcaccctcctgctgaagactggaagcctcagagctcacactggggggcagccctgaaggatctccacagaatataccgccctatgattggcaaactcaagttctttattgatgaaaaatacaaaattgctgatacttcagaaggaggcatctacctggggttctatgagaagcaagaagtagctgtgaagacgttctgtgagggcagcccacgtgcacagcgggaagtctcttgtctgcaaagcagccgagagaacagtcacttggtgacattctatgggagtgagagccacaggggccacttgtttgtgtgtgtcaccctctgtgagcagactctggaagcgtgtttggatgtgcacagaggggaagatgtggaaaatgaggaagatgaatttgcccgaaatgtcctgtcatctatatttaaggctgttcaagaactacacttgtcctgtggatacacccaccaggatctgcaaccacaaaacatcttaataggaccttggacggctggtcctctatgtggtaaagaagggaagcatctcatttgaggatctgaaagctcaaagtaatgaagaggtggttcaactttctccagatgaggaaactaaggacctcattcatcgtctcttccatcctggggaacatgtgagggactgtctgagtgacctgctgggtcatcccttcttttggacttgggagagccgctataggacgcttcggaatgtgggaaatgaatccgacatcaaaacacgaaaatctgaaagtgagatcctcagactactgcaacctgggccttctgaacattccaaaagttttgacaagtggacgactaagattaatgaatgtgttatgaaaaaaatgaataagttttatgaaaaaagaggcaatttctaccagaacactgtgggtgatctgctaaagttcatccggaatttgggagaacacattgatgaagaaaagcataaaaagatgaaattaaaaattggagacccttccctgtattttcagaagacatttccagatctggtgatctatgtctacacaaaactacagaacacagaatatagaaagcatttcccccaaacccacagtccaaacaagcctcagtgtgatggagctggtggggccagtgggttggccagccctgggtgctga

SEQ ID NO: 266588 - DNA, 1959 bp, Artificial Sequence
  derived and/or modified sequence
atggagagcagagaccacaacaacccccaggagggccccaccagcagcagcggcagaagagccgccgtggaggacaaccacctgctgatcaaggccgtgcagaacgaggacgtggacctggtgcagcagctgctggagggcggcgccaacgtgaacttccaggaggaggagggcggctggacccccctgcacaacgccgtgcagatgagcagagaggacatcgtggagctgctgctgagacacggcgccgaccccgtgctgagaaagaagaacggcgccacccccttcatcctggccgccatcgccggcagcgtgaagctgctgaagctgttcctgagcaagggcgccgacgtgaacgagtgcgacttctacggcttcaccgccttcatggaggccgccgtgtacggcaaggtgaaggccctgaagttcctgtacaagagaggcgccaacgtgaacctgagaagaaagaccaaggaggaccaggagagactgagaaagggcggcgccaccgccctgatggacgccgccgagaagggccacgtggaggtgctgaagatcctgctggacgagatgggcgccgacgtgaacgcctgcgacaacatgggcagaaacgccctgatccacgccctgctgagcagcgacgacagcgacgtggaggccatcacccacctgctgctggaccacggcgccgacgtgaacgtgagaggcgagagaggcaagacccccctgatcctggccgtggagaagaagcacctgggcctggtgcagagactgctggagcaggagcacatcgagatcaacgacaccgacagcgacggcaagaccgccctgctgctggccgtggagctgaagctgaagaagatcgccgagctgctgtgcaagagaggcgccagcaccgactgcggcgacctggtgatgaccgccagaagaaactacgaccacagcctggtgaaggtgctgctgagccacggcgccaaggaggacttccacccccccgccgaggactggaagccccagagcagccactggggcgccgccctgaaggacctgcacagaatctacagacccatgatcggcaagctgaagttcttcatcgacgagaagtacaagatcgccgacaccagcgagggcggcatctacctgggcttctacgagaagcaggaggtggccgtgaagaccttctgcgagggcagccccagagcccagagagaggtgagctgcctgcagagcagcagagagaacagccacctggtgaccttctacggcagcgagagccacagaggccacctgttcgtgtgcgtgaccctgtgcgagcagaccctggaggcctgcctggacgtgcacagaggcgaggacgtggagaacgaggaggacgagttcgccagaaacgtgctgagcagcatcttcaaggccgtgcaggagctgcacctgagctgcggctacacccaccaggacctgcagccccagaacatcctgatcgacagcaagaaggccgcccacctggccgacttcgacaagagcatcaagtgggccggcgacccccaggaggtgaagagagacctggaggacctgggcagactggtgctgtacgtggtgaagaagggcagcatcagcttcgaggacctgaaggcccagagcaacgaggaggtggtgcagctgagccccgacgaggagaccaaggacctgatccacagactgttccaccccggcgagcacgtgagagactgcctgagcgacctgctgggccaccccttcttctggacctgggagagcagatacagaaccctgagaaacgtgggcaacgagagcgacatcaagaccagaaagagcgagagcgagatcctgagactgctgcagcccggccccagcgagcacagcaagagcttcgacaagtggaccaccaagatgagcaagctgagacacagacagatcatcttccccaccacccagaaccagtag

SEQ ID NO: 266589 - DNA, 465 bp, Artificial Sequence
  derived and/or modified sequence
atgatcggcaagctgaagttcttcatcgacgagaagtacaagatcgccgacaccagcgagggcggcatctacctgggcttctacgagaagcaggaggtggccgtgaagaccttctgcgagggcagccccagagcccagagagaggtgagctgcctgcagagcagcagagagaacagccacctggtgaccttctacggcagcgagagccacagaggccacctgttcgtgtgcgtgaccctgtgcgagcagaccctggaggcctgcctggacgtgcacagaggcgaggacgtggagaacgaggaggacgagttcgccagaaacgtgctgagcagcatcttcaaggccgtgcaggagctgcacctgagctgcggctacacccaccaggacctgcagccccagaacatcctgatcggcccctggaccgccggccccctgtgcggcaaggagggcaagcacctgatctag

SEQ ID NO: 266590 - protein, 264 aa, Artificial Sequence
  derived and/or modified sequence
MSQAVQTNGTQPLSKTWELSLYELQRTPQEAITDGLEIVVSPRSLHSELMCPICLDMLKNTMTTKECLHRFCADCIITALRSGLQRGKKQQIENGSGAEDNGDSSHCSNASTHSNQEAGPSNKRTKTSDDSGLELDNNNAAMAIDPVMDGASEIELVFRPHPTLMEKDDSAQTRYIKTSGNATVDHLSKYLAVRLALEELRSKGESNQMNLDTASEKQYTIYIATASGQFTVLNGSFSLELVSEKYWKVNKPMELYYAPTKEHK

SEQ ID NO: 266591 - DNA, 795 bp, Artificial Sequence
  derived and/or modified sequence
atgtcacaggcagtacagaccaacggaactcagcccctgtctaaaacttgggagctaagtctatatgagcttcagcgtacaccacaggaggccatcaccgacggactggagatagtggtgtcacccagaagcctccatagcgagctgatgtgtcccatttgcttagacatgctcaagaatacaatgactacgaaggagtgtttgcacaggttctgcgccgactgcatcatcaccgctcttcggagtggccttcaaaggggaaagaagcaacagatcgaaaacggttctggcgcggaggacaatggcgattcttctcattgctcaaatgcctcaactcattctaaccaggaggccgggccatctaataagaggactaaaacatccgacgacagcgggcttgagctggataataataatgccgccatggcaattgatccagtgatggacggcgccagcgaaatcgagctcgtgttcagaccccatcccacacttatggagaaggatgactccgctcaaacaagatacattaaaacatcgggtaatgcgaccgtggatcacttgtccaagtacttggcagtgcggctcgcgttggaagagctgaggagtaagggtgagagtaaccagatgaacctcgataccgcctcagagaagcagtataccatttacatcgccacggcgagcggacaatttacagtcctgaacggaagcttctctcttgaactggtaagcgaaaagtattggaaggtgaataagcctatggaactgtactacgcccctactaaggagcataagtag

SEQ ID NO: 266592 - DNA, 795 bp, Artificial Sequence
  derived and/or modified sequence
atgagccaggccgtgcagaccaacggcacccagcccctgagcaagacctgggagctgagcctgtatgagctgcagaggaccccccaggaggccatcacagatggcctggagatcgtggtgagccccaggagcctgcacagcgagctgatgtgccccatctgcctggacatgctgaagaacaccatgaccaccaaggagtgcctgcaccgcttctgtgccgactgcatcatcacagccctgcggagcggcctgcagaggggcaagaagcagcagattgaaaatggcagcggggctgaagataatggagacagcagccactgcagcaatgccagcacccacagcaaccaggaggccggccccagcaacaagaggaccaagaccagtgatgattctggcctggagctggacaacaacaatgctgccatggccatcgaccctgtgatggatggagccagcgagattgagctggtgttccggccccaccccaccctgatggagaaggatgacagcgcccagacccgctacatcaagaccagcggaaatgccaccgtggaccacctgagcaagtacctggccgtgcggctggccctggaggagctgcggagcaaaggagagagcaaccagatgaacctggacacagccagcgagaagcagtacaccatctacatcgccacagccagcggccagttcaccgtgctgaatggcagcttcagcctggagctggtgtctgagaagtactggaaggtgaacaagcccatggagctgtactatgcccccaccaaggagcacaagtag

SEQ ID NO: 266593 - DNA, 795 bp, Artificial Sequence
  derived and/or modified sequence
atgagccaggccgtgcagaccaacggcacccagcccctgagcaagacatgggagttgtctctctatgaattgcaaagaacacctcaagaggcaattactgacggtctggagatcgttgtgagccctcgaagtctgcatagcgaactcatgtgccccatctgcctcgatatgctgaagaataccatgacaacgaaggaatgcctgcaccgcttctgcgcggactgcattattacggccctgaggtccggcctgcagagggggaagaagcagcagatcgagaacgggtcaggagcagaggacaacggagattcaagccattgctctaacgcatcaacccactctaaccaggaagctgggccatctaacaagcggaccaagacatccgatgacagcggtctcgagttagataacaacaacgccgcgatggcgattgaccccgtgatggatggggcctcagaaatagaactcgtgttccgcccacaccctactctgatggaaaaggatgactccgcccagacgaggtatataaaaaccagtgggaatgctacagtggatcatctgagcaagtacctggcagtacgtctggctttagaggaactcagatccaaaggagagagcaaccagatgaacctcgacacggcctctgagaagcagtacaccatttacatcgctaccgcgagtggacagttcaccgtgctgaacggatctttttccctggaattggtgagtgagaagtattggaaagtgaacaaacccatggaactgtactacgccccaaccaaagagcacaagtag

SEQ ID NO: 266594 - DNA, 795 bp, Artificial Sequence
  derived and/or modified sequence
atgagtcaggctgtgcagactaatggcacacaaccactgtctaaaacctgggaactgagcctttatgagttgcaacgcaccccccaggaagctatcaccgacggtttagagattgtcgtgagtcctaggtccctccacagcgaactcatgtgcccaatctgcctcgacatgctcaagaatactatgacgaccaaggaatgtttacacagattttgcgctgattgcatcatcaccgctttgcgctctggcttgcagcgagggaaaaaacagcaaatagaaaacggatccggagcagaagacaatggtgattcctcccactgcagcaatgccagtacacacagcaatcaggaggctggccctagcaataaaaggacaaagacatctgatgactctgggctcgagctcgataacaacaatgccgcaatggccattgacccggtgatggatggggcatcagagatcgaattggtctttcggcctcatcctactctgatggaaaaggatgactcggcacagacacgctacattaagacaagcggaaacgcaacggtggatcatctttcaaaatacctcgccgtgaggctagccctggaggagctgaggagcaagggggaatcaaatcagatgaatctcgacaccgctagcgaaaaacaatacaccatttatatcgctaccgcaagcgggcagtttaccgtgcttaacgggtccttctctcttgaactggtttctgagaagtattggaaggttaataagcccatggaactgtattatgccccaaccaaagaacacaaatag

SEQ ID NO: 266595 - DNA, 1677 bp, Artificial Sequence
  derived and/or modified sequence
cccgagctccattgcggaagctgaggctcgccatattgtgcggcggcgccggcgtccgcggcagctgataccagagtcttgctccggccgcggccagcggagccctgggctggggcaggagccgcaatgtctcaggctgtgcagacaaacggaactcaaccattaagcaaaacatgggaactcagtttatatgagttacaacgaacacctcaggaggcaataacagatggcttagaaattgtggtttcacctcgaagtctacacagtgaattaatgtgcccaatttgtttggatatgttgaagaacaccatgactacaaaggagtgtttacatcgtttttgtgcagactgcatcatcacagcccttagaagtggactgcagcgaggcaagaaacaacagattgaaaatggtagtggagcagaagataatggtgacagttcacactgcagtaatgcatccacacatagcaatcaggaagcaggccctagtaacaaacggaccaaaacatctgatgattctgggctagagcttgataataacaatgcagcaatggcaattgatccagtaatggatggtgctagtgaaattgaattagtattcaggcctcatcccacacttatggaaaaagatgacagtgcacagacgagatacataaagacttctggtaacgccactgttgatcacttatccaagtatctggctgtgaggttagctttagaagaacttcgaagcaaaggtgaatcaaaccagatgaaccttgatacagccagtgagaagcagtataccatttatatagcaacagccagtggccagttcactgtattaaatggctctttttctttggaattggtcagtgagaaatactggaaagtgaacaaacccatggaactttattacgcacctacaaaggagcacaaatgagcctttaaaaaccaattctgagactgaacttttttatagcctatttctttaatattaaagatgtactggcattacttttatggacagatcttggatatgttgttcaattttctttctgagccagactagtttacgctattcaaatcttttcccctttatttaagatttcctttttggaagggactgcaattattcagtatttttttctttcctttaaaaaaatatatctgaagtttcttgtgtttttttttttccccacaaagtgtgtttccacttggagcaccattttgacccaggaatttttcatagtttctgtattcttataagattcagttggctgtccttttcctgctcccctcaaaagatttttagtcatacagaatgttaaatattatgtattctgactttttttttcccccggagtcttgtatatttatagttttctatataaactgtagtatcttcatgaagacccaaggctcaaatttactgtccttaaaaacaattctcataggattattcttttcatggtattttcttccataatatctcattttaaaaagaagttctttatgaacttagtgtccattgtcatgcaatgtttttttttttccattctttttccctgtaattttggaatttctggtcctgggaagaatcaaacaaaatcttaagttctatgagaacttggttcattgacatattctgctgaagaaagaaaaattaaattggtagtaaaatatagtcttcaagtat

SEQ ID NO: 266596 - DNA, 795 bp, Artificial Sequence
  derived and/or modified sequence
atgagccaggccgtgcagaccaacggcacccagcccctgagcaagacctgggagctgagcctgtacgagctgcagagaaccccccaggaggccatcaccgacggcctggagatcgtggtgagccccagaagcctgcacagcgagctgatgtgccccatctgcctggacatgctgaagaacaccatgaccaccaaggagtgcctgcacagattctgcgccgactgcatcatcaccgccctgagaagcggcctgcagagaggcaagaagcagcagatcgagaacggcagcggcgccgaggacaacggcgacagcagccactgcagcaacgccagcacccacagcaaccaggaggccggccccagcaacaagagaaccaagaccagcgacgacagcggcctggagctggacaacaacaacgccgccatggccatcgaccccgtgatggacggcgccagcgagatcgagctggtgttcagaccccaccccaccctgatggagaaggacgacagcgcccagaccagatacatcaagaccagcggcaacgccaccgtggaccacctgagcaagtacctggccgtgagactggccctggaggagctgagaagcaagggcgagagcaaccagatgaacctggacaccgccagcgagaagcagtacaccatctacatcgccaccgccagcggccagttcaccgtgctgaacggcagcttcagcctggagctggtgagcgagaagtactggaaggtgaacaagcccatggagctgtactacgcccccaccaaggagcacaagtag

SEQ ID NO: 266597 - protein, 344 aa, Artificial Sequence
  derived and/or modified sequence
MTCCSCTSLSALLDFWAEVCWLAPEQTAGKKKPFVYTQGQAVLNRAFFPCFDTPAVKYKYSALIEVPDGFTAVMSASTWEKRGPNKFFFQMCQPIPSYLIALAIGDLVSAEVGPRSRVWAEPCLIDAAKEEYNGVIEEFLATGEKLFGPYVWGRYDLLFMPPSFPFGGMENPCLTFVTPCLLAGDRSLADVIIHEISHSWFGNLVTNANWGEFWLNEGFTMYAQRRISTILFGAAYTCLEAATGRALLRQHMDITGEENPLNKLRVKIEPGVDPDDTYNETPYEKGFCFVSYLAHLVGDQDQFDSFLKAYVHEFKFRSILADDFLDFYLEYFPELKKKRVDIIP

SEQ ID NO: 266598 - DNA, 1035 bp, Artificial Sequence
  derived and/or modified sequence
atgacttgttgctcctgtacctcactctccgccctcctcgatttttgggcggaagtctgctggctcgcgcccgagcaaacagccggaaaaaagaaaccttttgtatacacccaaggacaggccgtgcttaaccgggcattcttcccgtgcttcgatacacctgccgtgaagtataagtattcagccttaattgaggtacctgacggatttaccgcagttatgtctgcctcaacatgggaaaaacgaggtcccaataaattcttttttcagatgtgccagcccattccttcatatctcattgccctggcgatcggggatttggtttcagcggaggtgggacctcgatccagggtgtgggctgaaccatgcctgattgatgccgccaaggaggagtacaacggggtgattgaggagttcctagccactggcgagaagttatttggtccatacgtgtggggacggtatgatctgctgttcatgcctccctcctttcccttcggcgggatggagaacccctgcctgacttttgtaaccccttgtctgcttgccggtgacaggtctttggcagacgtaattattcacgaaatctcccactcttggttcggcaatttggtgacaaacgccaattggggcgagttctggctgaatgaaggctttacaatgtatgctcagaggcggatcagcactattctcttcggagcggcgtatacctgtctagaggccgcgaccggtcgagcactcctgagacagcatatggacatcaccggcgaggaaaacccccttaataagttacgcgtgaagatcgagccaggcgtggatccagacgacacgtacaacgagaccccatatgaaaagggcttctgcttcgtctcttacttggcccaccttgtgggagatcaggatcagttcgacagtttcctaaaagcttatgttcacgaatttaagtttagatcaatcctggctgatgacttcctggacttctacctcgagtatttccctgagctgaaaaaaaaaagggttgatatcattccatag

SEQ ID NO: 266599 - DNA, 1035 bp, Artificial Sequence
  derived and/or modified sequence
atgacctgctgcagctgcaccagcctgagcgccctgctggacttctgggccgaggtgtgctggctggcccctgagcagacagctgggaagaagaagccctttgtgtacacccagggccaggccgtgctgaacagagccttcttcccctgctttgacaccccagctgtgaagtacaagtacagcgccctgattgaggtgcctgatggcttcaccgctgtgatgtctgccagcacctgggagaagaggggccccaacaagttcttcttccagatgtgccagcccatccccagctacctgattgccctggccatcggggacctggtgtctgctgaggtgggccccaggagccgggtgtgggccgagccctgcctgattgatgctgccaaggaggagtacaatggagtcatcgaggagttcctggccaccggggagaagctgtttggcccctacgtgtggggccgctatgacctgctcttcatgcctccttccttcccctttggaggcatggagaacccctgcctgacctttgtgaccccctgcctgctggccggggacaggagcctggctgatgtgatcatccacgagatcagccacagctggtttggaaacctggtgaccaatgccaactggggcgagttctggctgaatgaaggcttcaccatgtatgcccagaggcgcatcagcaccatcctgtttggagctgcctacacctgcctggaggccgccaccggccgggccctgctgcggcagcacatggacatcactggagaggagaaccccctgaacaagctgcgggtgaagattgagcccggggtggaccctgatgacacctacaatgagaccccctatgagaagggcttctgctttgtgtcctacctggcccacctggtgggggaccaggaccagtttgacagcttcctgaaggcctacgtgcatgagttcaagttccgcagcatcctggctgatgacttcctggacttctacctggagtacttccctgagctgaagaagaagagggtggacatcatcccctag

SEQ ID NO: 266600 - DNA, 1035 bp, Artificial Sequence
  derived and/or modified sequence
atgacctgctgcagctgcaccagcctgagcgccctgctggacttctgggctgaagtgtgttggctggctccagagcagactgctgggaaaaaaaagccatttgtgtatactcagggacaggcagtcctcaaccgagcattctttccatgcttcgacacgccagcagtgaaatacaagtacagcgcgctaatagaagtcccagatggctttaccgccgtgatgagtgcgtccacctgggagaaacggggacctaacaaatttttctttcagatgtgtcagcctattccatcgtatctgatagcgttggcaatcggagacctcgtaagtgccgaggttgggcctcgatcacgagtctgggcagagccatgtctgatagatgctgccaaagaagagtacaatggtgtgattgaagagttcttagccacaggtgagaagctgtttggtccatatgtgtggggcagatacgatcttttgtttatgcctcccagtttcccatttggtggcatggaaaacccgtgcctgacctttgtgacaccctgcctgttagcaggcgatagatcactggctgacgtgatcattcacgagatttcccacagttggttcgggaatttggttactaatgctaactggggcgagttctggcttaatgaaggcttcacaatgtatgcccagcggcgcatttctacaattctcttcggtgccgcatatacttgtcttgaagccgctacagggcgcgcactgctcagacagcacatggacattacgggggaagaaaaccccctgaataaactacgcgtgaagatcgagcctggagtggatcccgacgatacttacaacgaaacaccatatgaaaaggggttttgttttgtatcatatctcgcccacctggtaggagatcaggatcagttcgatagctttctcaaagcttatgttcacgagtttaagttccggtccatcttagcagacgactttttggatttttaccttgaatacttccccgaactgaaaaagaagagagtggatattataccatag

SEQ ID NO: 266601 - DNA, 1035 bp, Artificial Sequence
  derived and/or modified sequence
atgacctgctgttcctgcacaagcttgtctgctctgctagacttctgggctgaagtctgctggctggccccagagcagacagccggtaaaaagaaaccctttgtgtacacacagggtcaggccgtcctcaaccgtgcatttttcccatgcttcgatacacctgcagtgaagtacaaatactcagccctgattgaggtccctgacggctttacagctgtgatgtcagcgtcaacgtgggaaaaaagaggacctaacaaatttttcttccagatgtgccagcctatcccctcttatctgattgccttagctatcggagacctggtgagcgcagaagtgggacctaggagccgggtgtgggctgaaccgtgccttattgatgccgctaaagaggaatacaacggggtgatagaagaatttttagcaaccggcgagaaacttttcggtccctatgtgtggggcagatatgacttgctcttcatgccacccagctttcctttcggcggaatggagaatccttgccttacatttgtgaccccatgtctcttggccggagacaggtccctcgcagatgttataattcacgaaattagtcatagctggtttggcaatctggtaaccaacgctaactggggtgaattttggcttaacgagggcttcaccatgtatgcccagcggaggattagtacaatcctgttcggagccgcttacacttgcctggaggcggctaccggaagagctttgctgcgtcagcatatggacataaccggggaagagaatcccctgaataaactgagggtcaagatagagcctggggtggatcccgacgacacttataatgagacaccgtatgaaaaagggttctgtttcgtgtcctatttggcacacttggtgggggaccaggaccaatttgatagcttccttaaggcttacgtgcacgaattcaagttcaggtcgatcctggccgacgattttttggacttctatctagaatatttccctgagcttaagaaaaagagggtggacatcattccctag

SEQ ID NO: 266602 - DNA, 1166 bp, Artificial Sequence
  derived and/or modified sequence
gccactgggcggtgcatccttcaccctttccgtccttccgcgtctcctccctggccctggaggcttgtccagattgcgccgcattcccgctcatcgcacactgccgtttctaacattttccgtggctttctagatgacctgttgttcatgcacttcacttagtgccctcttggacttttgggccgaggtttgctggttggctcccgagcagacagcaggaaagaagaagcccttcgtgtacacccagggccaggctgtcctaaaccgggccttcttcccttgcttcgacacgcctgctgttaaatacaagtattcagctcttattgaggtcccagatggcttcacagctgtgatgagtgctagcacctgggagaagagaggtccaaataagttcttcttccagatgtgtcagcccatcccctcctatctgatagctttggccatcggagatctggtttcggctgaagttggacccaggagccgggtgtgggctgagccctgcctgattgatgctgccaaggaggagtacaacggggtgatagaagaatttttggcaacaggagagaagctttttggaccttatgtttggggaaggtatgacttgctcttcatgccaccgtcctttccatttggaggaatggagaacccttgtctgacctttgtcaccccctgcctgctagctggggaccgctccttggcagatgtcatcatccatgagatctcccacagttggtttgggaacctggtcaccaacgccaactggggtgaattctggctcaatgaaggtttcaccatgtacgcccagaggaggatctccaccatcctctttggcgctgcgtacacctgcttggaggctgcaacggggcgggctctgctgcgtcagcacatggacatcactggagaggaaaacccactcaacaagctccgcgtgaagattgaaccaggcgttgacccggacgacacctataatgagaccccctacgagaaaggtttctgctttgtttcatacctggcccacttggtgggtgatcaggatcagtttgacagttttctcaaggcctatgtgcatgaattcaaattccgaagcatcttagccgatgactttctggacttctacttggaatatttccctgagcttaagaaaaagagagtggatatcattccag

SEQ ID NO: 266603 - DNA, 1035 bp, Artificial Sequence
  derived and/or modified sequence
atgacctgctgcagctgcaccagcctgagcgccctgctggacttctgggccgaggtgtgctggctggcccccgagcagaccgccggcaagaagaagcccttcgtgtacacccagggccaggccgtgctgaacagagccttcttcccctgcttcgacacccccgccgtgaagtacaagtacagcgccctgatcgaggtgcccgacggcttcaccgccgtgatgagcgccagcacctgggagaagagaggccccaacaagttcttcttccagatgtgccagcccatccccagctacctgatcgccctggccatcggcgacctggtgagcgccgaggtgggccccagaagcagagtgtgggccgagccctgcctgatcgacgccgccaaggaggagtacaacggcgtgatcgaggagttcctggccaccggcgagaagctgttcggcccctacgtgtggggcagatacgacctgctgttcatgccccccagcttccccttcggcggcatggagaacccctgcctgaccttcgtgaccccctgcctgctggccggcgacagaagcctggccgacgtgatcatccacgagatcagccacagctggttcggcaacctggtgaccaacgccaactggggcgagttctggctgaacgagggcttcaccatgtacgcccagagaagaatcagcaccatcctgttcggcgccgcctacacctgcctggaggccgccaccggcagagccctgctgagacagcacatggacatcaccggcgaggagaaccccctgaacaagctgagagtgaagatcgagcccggcgtggaccccgacgacacctacaacgagaccccctacgagaagggcttctgcttcgtgagctacctggcccacctggtgggcgaccaggaccagttcgacagcttcctgaaggcctacgtgcacgagttcaagttcagaagcatcctggccgacgacttcctggacttctacctggagtacttccccgagctgaagaagaagagagtggacatcatcccctag

SEQ ID NO: 266604 - DNA, 507 bp, Artificial Sequence
  derived and/or modified sequence
ctgatcgatgccgcaaaggaggaatataacggtgtgatcgaagagttcctggccactggagagaagctgtttggcccatacgtgtgggggagatacgatttactctttatgcccccttcatttcccttcgggggcatggagaacccatgcctaacattcgtgacaccatgccttttggcaggggacagatccttagcagacgtgattattcatgaaatctctcattcatggtttggcaacctagttaccaatgcaaactggggggagttctggctcaacgaaggctttactatgtacgctcagagacggatctcaaccatcctgtttggcgtggacccggatgacacctataacgaaaccccctatgagaaggggttttgcttcgtgtcttacctggcgcatcttgtgggggaccaagatcagttcgactctttcctgaaggcatacgtgcacgagtttaagtttcgttccatcctggctgacgacttcctggacttttatctgtag

SEQ ID NO: 266605 - DNA, 507 bp, Artificial Sequence
  derived and/or modified sequence
ctcattgatgctgccaaggaggagtacaacggggtgattgaggagttcctggccactggagagaagctgtttggcccctacgtgtggggccgctatgacctgctcttcatgccacccagcttcccctttggaggcatggagaacccctgcctgacctttgtgaccccctgcctgctggccggggacaggagcctggctgatgtgatcatccacgagatcagccacagctggtttggaaacctggtgaccaatgccaactggggcgagttctggctgaatgaaggcttcaccatgtatgcccagaggcgcatcagcaccatcctgtttggagtggaccctgatgacacctacaatgagaccccctatgagaagggcttctgctttgtgtcctacctggcccacctggtgggggaccaggaccagtttgacagcttcctgaaggcctacgtgcatgagttcaagttccgcagcatcctggctgatgacttcctggacttctacctgtag

SEQ ID NO: 266606 - DNA, 507 bp, Artificial Sequence
  derived and/or modified sequence
ctgatcgacgccgccaaggaggagtacaacggcgtgatcgaggagttcttggctactggcgagaaactgttcggaccatatgtctggggtaggtacgacttactctttatgcccccctcctttcctttcggagggatggaaaacccctgcctaaccttcgtgaccccttgcctcctcgcaggcgaccgcagtctggctgatgtaattatccacgagatcagccatagctggttcggcaacctggtgactaatgctaattggggagaattttggctgaacgagggcttcactatgtacgcccagcggcgaatcagcaccatactgtttggagttgacccagacgatacctacaatgagactccttatgaaaagggcttctgttttgtctcttatcttgctcatttggtgggcgaccaggaccagtttgactccttcctgaaagcctacgtacacgaattcaaatttcgctccattttggcggatgacttccttgacttttatctgtag

SEQ ID NO: 266607 - DNA, 507 bp, Artificial Sequence
  derived and/or modified sequence
ctgattgatgccgcaaaggaggagtataacggcgttattgaggaatttctggctactggcgagaaactgtttgggccatacgtctggggcagatatgacctcctgttcatgcctccctccttcccttttgggggaatggagaacccctgccttacatttgtgaccccatgcttacttgcaggcgaccgcagcctggcagatgtgatcattcatgagataagccacagctggtttggtaatttggttaccaacgccaattggggcgaattctggcttaacgaagggtttacaatgtacgcgcagaggcgaatttcaaccatactattcggagtagacccagatgacacttacaacgagaccccatacgagaagggtttctgcttcgtgagttaccttgcccatttagtgggcgaccaggaccaattcgacagctttctgaaggcctatgtgcacgaattcaagtttcggtctattttggcagatgactttcttgacttctacttatag

SEQ ID NO: 266608 - DNA, 505 bp, Artificial Sequence
  derived and/or modified sequence
ctgattgatgctgccaaggaggagtacaacggggtgatagaagaatttttggcaacaggagagaagctttttggaccttatgtttggggaaggtatgacttgctcttcatgccaccgtcctttccatttggaggaatggagaacccttgtctgacctttgtcaccccctgcctgctagctggggaccgctccttggcagatgtcatcatccatgagatctcccacagttggtttgggaacctggtcaccaacgccaactggggtgaattctggctcaatgaaggtttcaccatgtacgcccagaggaggatctccaccatcctctttggcgttgacccggacgacacctataatgagaccccctacgagaaaggtttctgctttgtttcatacctggcccacttggtgggtgatcaggatcagtttgacagttttctcaaggcctatgtgcatgaattcaaattccgaagcatcttagccgatgactttctggacttctacttgg

SEQ ID NO: 266609 - DNA, 507 bp, Artificial Sequence
  derived and/or modified sequence
ctgatcgacgccgccaaggaggagtacaacggcgtgatcgaggagttcctggccaccggcgagaagctgttcggcccctacgtgtggggcagatacgacctgctgttcatgccccccagcttccccttcggcggcatggagaacccctgcctgaccttcgtgaccccctgcctgctggccggcgacagaagcctggccgacgtgatcatccacgagatcagccacagctggttcggcaacctggtgaccaacgccaactggggcgagttctggctgaacgagggcttcaccatgtacgcccagagaagaatcagcaccatcctgttcggcgtggaccccgacgacacctacaacgagaccccctacgagaagggcttctgcttcgtgagctacctggcccacctggtgggcgaccaggaccagttcgacagcttcctgaaggcctacgtgcacgagttcaagttcagaagcatcctggccgacgacttcctggacttctacctgtag

SEQ ID NO: 266610 - protein, 790 aa, Artificial Sequence
  derived and/or modified sequence
MANCQIAILYQRFQRVVFGISQLLCFSALISELTNQKEVAAWTYHYSTKAYSWNISRKYCQNRYTDLVAIQNKNEIDYLNKVLPYYSSYYWIGIRKNNKTWTWVGTKKALTNEAENWADNEPNNKRNNEDCVEIYIKSPSAPGKWNDEHCLKKKHALCYTASCQDMSCSKQGECLETIGNYTCSCYPGFYGPECEYVRECGELELPQHVLMNCSHPLGNFSFNSQCSFHCTDGYQVNGPSKLECLASGIWTNKPPQCLAAQCPPLKIPERGNMTCLHSAKAFQHQSSCSFSCEEGFALVGPEVVQCTASGVWTAPAPVCKAVQCQHLEAPSEGTMDCVHPLTAFAYGSSCKFECQPGYRVRGLDMLRCIDSGHWSAPLPTCEAISCEPLESPVHGSMDCSPSLRAFQYDTNCSFRCAEGFMLRGADIVRCDNLGQWTAPAPVCQALQCQDLPVPNEARVNCSHPFGAFRYQSVCSFTCNEGLLLVGASVLQCLATGNWNSVPPECQAIPCTPLLSPQNGTMTCVQPLGSSSYKSTCQFICDEGYSLSGPERLDCTRSGRWTDSPPMCEAIKCPELFAPEQGSLDCSDTRGEFNVGSTCHFSCDNGFKLEGPNNVECTTSGRWSATPPTCKGIASLPTPGVQCPALTTPGQGTMYCRHHPGTFGFNTTCYFGCNAGFTLIGDSTLSCRPSGQWTAVTPACRAVKCSELHVNKPIAMNCSNLWGNFSYGSICSFHCLEGQLLNGSAQTACQENGHWSTTVPTCQDDGKCPLNPHSHLGTYGVFTNAAFDPSP

SEQ ID NO: 266611 - DNA, 2373 bp, Artificial Sequence
  derived and/or modified sequence
atggctaactgtcaaatagctattctgtaccagaggttccaaagagttgtctttggcatctctcagctactgtgttttagcgccctgataagtgagttgactaaccagaaagaggtcgcagcatggacctaccattacagcaccaaggcctacagttggaacatcagtcgaaagtattgtcagaataggtatacggatcttgttgctattcagaacaaaaacgagatcgactatttaaacaaggtgctcccctattactctagttattactggatcgggatcaggaagaataataaaacctggacctgggtgggtaccaagaaagcattaacaaacgaggcggagaattgggccgataacgagcctaataacaaaaggaacaatgaggattgtgtagagatctacatcaagtcaccctcggccccagggaagtggaacgacgagcattgcttgaaaaagaaacacgctctttgctacaccgcatcgtgccaggatatgtcttgttctaaacagggagaatgtctcgaaaccatcgggaattacacttgctcttgttatcctggcttctatgggcctgagtgcgagtacgtcagggaatgtggcgagctcgaattgcctcagcacgttctgatgaattgtagccatcccctcggaaacttttcctttaacagtcagtgctcattccactgtactgatgggtatcaggtaaatggacctagcaagttggagtgcctggccagcggtatttggacgaacaagccacctcagtgcctagcagcacaatgtccacctctgaaaatccccgagcgcggtaatatgacctgtcttcacagtgccaaagcctttcaacaccaatcatcatgcagtttttcctgcgaggagggttttgctttggtggggcctgaagtggtccagtgtacagcttccggagtgtggacggcgcccgcaccagtttgtaaggcagtgcaatgccaacacttggaggcgccttccgaaggaaccatggattgtgtccatccactaacagctttcgcttacggaagcagctgtaaatttgaatgccaaccaggctatcgggtccgaggcttagacatgctccgctgcatagatagcggacactggtctgccccgctgcccacgtgcgaggccatatcctgtgaaccccttgagtctccagtacacgggtctatggactgtagcccttcactccgagctttccagtacgatacaaattgtagcttccggtgcgcagagggcttcatgctgaggggcgcggacattgtaagatgtgacaatctgggacaatggacggccccggctcccgtgtgccaagcattgcaatgccaggatttgcccgtgcccaacgaggctcgggtgaactgcagccacccatttggtgcttttcgatatcagtcggtctgcagcttcacatgtaacgagggactcctacttgtcggcgcatcagtgcttcagtgtctagctaccggtaattggaacagtgtgcccccggagtgtcaggcaatcccatgcaccccattgctgtcccctcagaatggcacaatgacatgtgtgcagcctcttggtagttcctcctacaagtccacctgtcagttcatttgtgacgagggctattctctgagtgggcctgagcgcctcgattgcacacggagtggccgctggactgattccccgcccatgtgcgaggccatcaagtgcccagagcttttcgccccagagcagggctcactggattgttccgacacccggggagagttcaatgttggttctacttgccatttcagctgcgataacgggttcaaacttgaaggtcccaacaacgtagaatgtactacatccggccgctggtcggccaccccgcccacttgtaagggaatagccagcttacctacccccggagtacaatgcccagctctaacgacccccggtcaagggaccatgtattgccggcaccatcccggcacattcgggttcaacacgacttgctattttgggtgcaatgccggctttaccttaataggagactcaactctgtcttgtcggccttctggccagtggactgctgtgacaccagcatgcagggcagtaaaatgttccgaattacacgtgaataaaccaattgctatgaattgttccaacctgtgggggaacttctcctacggctctatttgtagcttccattgcctggaaggacagctgctgaatggatcagcacagactgcttgccaggagaacggccattggagcactaccgtcccgacttgtcaggacgatggcaagtgtcccctgaatccacactcacatctggggacatatggagtcttcacaaatgcggcgttcgatcccagcccatag

SEQ ID NO: 266612 - DNA, 2373 bp, Artificial Sequence
  derived and/or modified sequence
atggccaactgccagatcgccatcctgtaccagcgcttccagagggtggtgtttggcatcagccagctgctgtgcttcagcgccctgatcagcgagctgaccaaccagaaggaggtggccgcctggacctaccactacagcaccaaggcctacagctggaacatcagcaggaagtactgccagaaccgctacacagacctggtggccatccagaacaagaatgaaattgactacctgaacaaggtgctgccctactacagcagctactactggattggcatcaggaagaacaacaagacctggacctgggtgggcaccaagaaggccctgaccaatgaagctgagaactgggccgacaatgagcccaacaacaagaggaacaatgaagactgtgtggagatctacatcaagagccccagcgcccctgggaagtggaatgatgagcactgcctgaagaagaagcacgccctgtgctacacagccagctgccaggacatgagctgcagcaagcagggagaatgtctggagaccatcggcaactacacctgcagctgctacccaggcttctacggcccagaatgtgaatatgtgagagaatgtggggagctggagctgccccagcacgtgctgatgaactgcagccaccccctgggcaacttctccttcaacagccagtgcagcttccactgcacagatggctaccaggtgaatggccccagcaagctggagtgcctggccagcggcatctggaccaacaagccaccccagtgcctggccgcccagtgcccccccctgaagatccctgagcggggcaacatgacctgcctgcacagcgccaaggccttccagcaccagagcagctgcagcttcagctgtgaggagggctttgccctggtgggccctgaggtggtgcagtgcacagccagcggcgtgtggacagccccagcccctgtgtgcaaggctgtgcagtgccagcacctggaggcccccagcgagggcaccatggactgtgtgcaccccctgacagcctttgcctacggcagcagctgcaagtttgagtgccagcccggctacagagtgcggggcctggacatgctgcgctgcattgattctggccactggagcgcccccctgcccacctgtgaggccatcagctgtgagcccctggagagccctgtgcacggctccatggactgcagccccagcctgcgggccttccagtatgacaccaactgcagcttccgctgtgccgagggcttcatgctgcggggagctgacatcgtgcgctgtgacaacctgggccagtggacagccccagcccctgtgtgccaggccctgcagtgccaggacctgcctgtgcccaatgaggcccgggtgaactgcagccacccctttggagccttccgctaccagagcgtgtgcagcttcacctgcaatgaaggcctgctgctggtgggcgcctctgtgctgcagtgcctggccactggaaactggaacagcgtgcccccagagtgccaggccatcccctgcacccccctgctgagcccccagaatggcaccatgacctgtgtgcagcccctgggcagcagcagctacaagagcacctgccagttcatctgtgatgagggctacagcctgagcggccctgagcggctggactgcaccaggagcggccgctggacagacagcccccccatgtgtgaggccatcaagtgcccagagctgtttgcccctgagcagggcagcctggactgcagcgacaccagaggagagttcaacgtgggcagcacctgccacttcagctgtgacaatggcttcaagctggagggccccaacaacgtggagtgcaccaccagcggccgctggagcgccaccccacccacctgcaagggcatcgccagcctgcccaccccaggagtgcagtgcccagccctgaccaccccaggccagggcaccatgtactgccgccaccaccctggcaccttcggcttcaacaccacctgctacttcggctgcaatgccggcttcaccctgattggagacagcaccctgagctgccggcccagcggccagtggacagctgtgaccccagcctgcagagctgtgaagtgcagcgagctgcacgtgaacaagcccatcgccatgaactgcagcaacctgtggggcaacttctcctatggcagcatctgcagcttccactgcctggagggccagctgctgaatggaagtgcccagacagcctgccaggagaatggccactggagcaccaccgtgcccacctgccaggatgatggcaagtgccccctgaacccccacagccacctgggcacctacggcgtcttcaccaatgctgcctttgaccccagcccctag

SEQ ID NO: 266613 - DNA, 2373 bp, Artificial Sequence
  derived and/or modified sequence
atggccaactgccagatcgccatcctgtaccagcggttccagcgggtggtcttcgggatcagccagttgctctgtttttcagctctgattagcgaactgaccaaccaaaaagaggtagccgcctggacctaccattacagcacaaaagcatactcttggaatataagccgtaagtattgtcagaatcggtacactgacctcgtcgcgattcagaacaagaacgaaatcgactacttgaacaaggtgctcccctactactcgtcatactactggatcggcattaggaagaataacaagacttggacttgggtcggcaccaagaaggccctcacgaacgaagcagagaactgggccgataacgagcccaacaacaagaggaataacgaggactgtgtggagatatacattaagtcccctagcgcccccggcaagtggaatgatgagcactgtcttaaaaagaagcatgccctgtgttataccgctagctgtcaagacatgagctgctctaaacagggagagtgcctcgagaccattggtaattatacatgctcctgctatcctgggttctatgggccagaatgtgaatacgtgagggaatgtggcgaactcgaactgcctcagcacgttctgatgaactgctcgcatcctctggggaacttttcctttaatagccaatgttcatttcactgcacagatgggtatcaggtaaatgggcctagtaaattggaatgcctggcgtcaggtatttggacgaacaaaccacctcagtgtctggccgctcagtgtccacctcttaaaatccccgagaggggaaatatgacctgcctgcattctgccaaggcctttcagcaccagtcctcctgttccttctcttgcgaggaagggtttgcccttgttgggcccgaagtggtccagtgcaccgcgagtggggtgtggacagccccggccccagtctgtaaagctgtgcagtgtcagcatctggaagccccttcagaaggaacaatggactgtgtccatcctctgaccgctttcgcctacggctcctcctgcaagttcgagtgccagcccggataccgcgttcgggggctcgacatgctgcgatgcatcgattccggtcattggtccgcacccctgcccacttgtgaagccatctcatgcgagccacttgagtctcccgtccacggttcgatggattgctcaccctccctgcgggctttccagtatgacactaattgcagctttagatgcgcagaaggatttatgctacgcggagccgatattgtacggtgtgataatttaggacagtggactgcccctgcccccgtgtgccaagccctgcagtgtcaggatctaccagtgccaaatgaggcacgcgtaaattgttcccacccttttggggcctttcgttaccagtcagtgtgcagttttacttgtaacgaaggcctgcttctcgttggagcatccgtgctgcaatgcctggccaccggaaactggaattctgttcccccggagtgccaggccatcccatgcacccccctcctatccccgcagaacggaaccatgacttgcgtgcagcctctgggatctagttcgtataaaagtacatgtcagtttatttgtgatgagggatactctctcagtggccctgaacgactcgattgtaccagaagcgggagatggaccgactctccacccatgtgtgaggccatcaaatgtccagaactttttgcccccgaacaaggaagcctggattgtagtgacacacgcggcgagttcaatgtgggatccacgtgccacttctcctgtgacaacggtttcaaacttgagggtcccaacaacgtggagtgcactacttccgggcgctggtctgctaccccgcctacctgcaaagggatagctagtcttcctacaccgggggttcagtgcccagctttaactactccaggacaggggactatgtactgtcgtcatcaccccgggacattcgggttcaacactacctgttatttcggatgcaacgcaggctttacactcattggagacagcacactcagttgccggccgagcggccagtggaccgccgtgacgcccgcgtgcagagctgtcaagtgttctgagcttcacgtgaacaaaccaattgcaatgaactgctccaacctgtggggaaatttcagttatggatccatctgtagttttcattgcctggagggacaactgctgaacggaagtgcacagacagcctgtcaggagaacggccactggtcgactaccgtgcccacctgtcaagatgatggcaaatgcccactgaacccccactcacatttggggacttacggggttttcacaaacgccgcctttgaccctagcccctag

SEQ ID NO: 266614 - DNA, 2373 bp, Artificial Sequence
  derived and/or modified sequence
atggccaactgtcagattgctattttatatcaacgcttccagagagtggtgttcgggatctctcagttactctgctttagcgccctcatcagcgagctaaccaatcagaaagaagtggctgcctggacctaccactacagcacaaaggcctattcctggaatatcagccgcaagtattgtcagaataggtacacggatctcgtggccattcaaaacaagaatgagatcgattacctcaacaaggtcttgccatactatagttcatattactggatcgggattaggaaaaataacaagacgtggacttgggtcggtactaaaaaagcccttaccaacgaggcggagaactgggctgacaacgagcccaataacaagaggaacaatgaggattgtgtggaaatttatattaaaagccctagcgccccaggaaaatggaatgatgagcactgtctgaagaaaaaacatgcactctgttacaccgcgagctgtcaggacatgtcatgctctaaacagggcgagtgtctggaaacaatcggtaactatacatgcagctgttatcctgggttttacggacccgaatgcgagtatgttcgtgaatgtggtgagcttgagctaccccaacacgtgctgatgaattgttctcatcctctgggtaacttttccttcaattctcagtgttccttccattgcaccgacggataccaagtaaacggcccttccaagctggagtgtctagctagcggcatctggacgaacaaaccccctcagtgcctcgcagctcagtgtcccccactgaagattcccgagagaggaaacatgacttgcttacattccgcgaaagccttccagcaccagagctcatgcagcttctcgtgtgaggagggttttgctctggtgggcccagaggtagtgcaatgtactgcctctggcgtgtggacggcacccgctccggtgtgtaaagccgtacagtgtcagcatctggaggccccttctgagggcactatggactgcgtccaccctctaaccgcctttgcttatggcagcagctgcaaattcgagtgtcagcctgggtaccgggtccgagggcttgatatgctaagatgcatcgattccggccattggtccgcaccactgcccacctgcgaggcgatatcttgcgagccgctcgagtcccccgtgcacggctccatggactgcagcccttctctgagagcttttcaatatgacactaactgtagcttccgatgcgccgagggtttcatgcttagaggagcagacatcgtgagatgcgacaacctgggccagtggacagcccctgctccagtttgtcaggcactccagtgtcaggatttgcctgttccaaacgaggctcgtgtgaattgtagtcatcccttcggtgcttttaggtaccagagcgtgtgttcatttacatgcaacgagggccttttattggtcggcgcatctgtcttgcaatgtctggcgaccgggaattggaatagcgtgccaccagagtgccaggctataccatgcacacctcttctgagtcctcagaacgggaccatgacctgtgtgcagccactgggtagttcctcgtacaaatccacctgccaatttatttgcgacgaaggctattccttatctgggcctgagcgactggattgtaccaggtccgggaggtggactgacagtcctcctatgtgtgaggccatcaaatgcccggagctctttgcccctgagcagggctccttggattgctcagacaccagaggcgaattcaacgtcggctccacctgccattttagctgtgacaatggcttcaagctggagggacccaataacgttgagtgcaccaccagcggacgatggagcgccaccccacccacctgcaaaggcattgcctctttgccaacacctggcgtccagtgcccagcccttactacaccaggacaggggacaatgtattgtcgacaccacccgggtacatttggcttcaatactacctgttacttcggctgcaacgctgggttcaccttgattggggactccacgttgtcgtgccggccatccggtcagtggaccgccgtcactcctgcctgtagggcagtgaaatgtagcgagctccacgttaacaagcccatagccatgaactgcagcaatttgtggggaaacttctcatacggaagcatctgctcctttcactgtcttgaaggccaactcctgaatgggagtgcccagacggcttgccaagagaacgggcattggtctactactgtgcccacctgtcaagacgatggcaagtgtccgctgaaccctcatagccatctcgggacctacggagtttttaccaacgctgcatttgacccaagcccttag

SEQ ID NO: 266615 - DNA, 3049 bp, Artificial Sequence
  derived and/or modified sequence
ggcagtgagactgtaagcagtctgggttgggcagaaggcagaaaaccagcagagtcacagaggagatggccaactgccaaatagccatcttgtaccagagattccagagagtggtctttggaatttcccaactcctttgcttcagtgccctgatctctgaactaacaaaccagaaagaagtggcagcatggacttatcattacagcacaaaagcatactcatggaatatttcccgtaaatactgccagaatcgctacacagacttagtggccatccagaataaaaatgaaattgattacctcaataaggtcctaccctactacagctcctactactggattgggatccgaaagaacaataagacatggacatgggtgggaaccaaaaaggctctcaccaacgaggctgagaactgggctgataatgaacctaacaacaaaaggaacaacgaggactgcgtggagatatacatcaagagtccgtcagcccctggcaagtggaatgatgagcactgcttgaagaaaaagcacgcattgtgttacacagcctcctgccaggacatgtcctgcagcaaacaaggagagtgcctcgagaccatcgggaactacacctgctcctgttaccctggattctatgggccagaatgtgaatacgtgagagagtgtggagaacttgagctccctcaacacgtgctcatgaactgcagccaccctctgggaaacttctcttttaactcgcagtgcagcttccactgcactgacgggtaccaagtaaatgggcccagcaagctggaatgcttggcttctggaatctggacaaataagcctccacagtgtttagctgcccagtgcccacccctgaagattcctgaacgaggaaacatgacctgccttcattctgcaaaagcattccagcatcagtctagctgcagcttcagttgtgaagagggatttgcattagttggaccggaagtggtgcaatgcacagcctcgggggtatggacagccccagccccagtgtgtaaagctgtgcagtgtcagcacctggaagcccccagtgaaggaaccatggactgtgttcatccgctcactgcttttgcctatggctccagctgtaaatttgagtgccagcccggctacagagtgaggggcttggacatgctccgctgcattgactctggacactggtctgcacccttgccaacctgtgaggctatttcgtgtgagccgctggagagtcctgtccacggaagcatggattgctctccatccttgagagcgtttcagtatgacaccaactgtagcttccgctgtgctgaaggtttcatgctgagaggagccgatatagttcggtgtgataacttgggacagtggacagcaccagccccagtctgtcaagctttgcagtgccaggatctcccagttccaaatgaggcccgggtgaactgctcccaccccttcggtgcctttaggtaccagtcagtctgcagcttcacctgcaatgaaggcttgctcctggtgggagcaagtgtgctacagtgcttggctactggaaactggaattctgttcctccagaatgccaagccattccctgcacacctttgctaagccctcagaatggaacaatgacctgtgttcaacctcttggaagttccagttataaatccacatgtcaattcatctgtgacgagggatattctttgtctggaccagaaagattggattgtactcgatcgggacgctggacagactccccaccaatgtgtgaagccatcaagtgcccagaactctttgccccagagcagggcagcctggattgttctgacactcgtggagaattcaatgttggctccacctgccatttctcttgtgacaacggctttaagctggaggggcccaataatgtggaatgcacaacttctggaagatggtcagctactccaccaacctgcaaaggcatagcatcacttcctactccaggggtgcaatgtccagccctcaccactcctgggcagggaaccatgtactgtaggcatcatccgggaacctttggttttaataccacttgttactttggctgcaacgctggattcacactcataggagacagcactctcagctgcagaccttcaggacaatggacagcagtaactccagcatgcagagctgtgaaatgctcagaactacatgttaataagccaatagcgatgaactgctccaacctctggggaaacttcagttatggatcaatctgctctttccattgtctagagggccagttacttaatggctctgcacaaacagcatgccaagagaatggccactggtcaactaccgtgccaacctgccaagatgatgggaaatgccccttgaatcctcacagccacctaggaacatatggagtttttacaaacgctgcatttgacccgagtccttaaggtttccataaacacccatgaatcaaagacatggaattaccttagattagctctggaccagcctgttggacccgctctggaccaaccctgtttcctgagtttgggattgtggtacaatctcaaattctcaacctaccaccccttcctgtcccacctcttctcttcctgtaacacaagccacagaagccaggagcaaatgtttctgcagtagtctctgtgctttgactcacctgttacttgaaataccagtgaaccaaagagactggagcatctgactcacaagaagaccagactgtggagaaataaaaatacctctttattttttgattgaaggaaggttttctccactttgttggaaagcaggtggcatctctaattggaagaaattcctgtagcatcttctggagtctccagtggttgctgttgatgaggcctcttggacctctgctctgaggcttccagagagtcctctggatggcaccagaggctgcagaaggccaagaatcaagctagaaggccacatgtcaccgtggaccttcctgccaccagtcactgtccctcaaatgacccaaagaccaatattcaaatgcgtaattaaaagaattttcccc

SEQ ID NO: 266616 - DNA, 2373 bp, Artificial Sequence
  derived and/or modified sequence
atggccaactgccagatcgccatcctgtaccagagattccagagagtggtgttcggcatcagccagctgctgtgcttcagcgccctgatcagcgagctgaccaaccagaaggaggtggccgcctggacctaccactacagcaccaaggcctacagctggaacatcagcagaaagtactgccagaacagatacaccgacctggtggccatccagaacaagaacgagatcgactacctgaacaaggtgctgccctactacagcagctactactggatcggcatcagaaagaacaacaagacctggacctgggtgggcaccaagaaggccctgaccaacgaggccgagaactgggccgacaacgagcccaacaacaagagaaacaacgaggactgcgtggagatctacatcaagagccccagcgcccccggcaagtggaacgacgagcactgcctgaagaagaagcacgccctgtgctacaccgccagctgccaggacatgagctgcagcaagcagggcgagtgcctggagaccatcggcaactacacctgcagctgctaccccggcttctacggccccgagtgcgagtacgtgagagagtgcggcgagctggagctgccccagcacgtgctgatgaactgcagccaccccctgggcaacttcagcttcaacagccagtgcagcttccactgcaccgacggctaccaggtgaacggccccagcaagctggagtgcctggccagcggcatctggaccaacaagcccccccagtgcctggccgcccagtgcccccccctgaagatccccgagagaggcaacatgacctgcctgcacagcgccaaggccttccagcaccagagcagctgcagcttcagctgcgaggagggcttcgccctggtgggccccgaggtggtgcagtgcaccgccagcggcgtgtggaccgcccccgcccccgtgtgcaaggccgtgcagtgccagcacctggaggcccccagcgagggcaccatggactgcgtgcaccccctgaccgccttcgcctacggcagcagctgcaagttcgagtgccagcccggctacagagtgagaggcctggacatgctgagatgcatcgacagcggccactggagcgcccccctgcccacctgcgaggccatcagctgcgagcccctggagagccccgtgcacggcagcatggactgcagccccagcctgagagccttccagtacgacaccaactgcagcttcagatgcgccgagggcttcatgctgagaggcgccgacatcgtgagatgcgacaacctgggccagtggaccgcccccgcccccgtgtgccaggccctgcagtgccaggacctgcccgtgcccaacgaggccagagtgaactgcagccaccccttcggcgccttcagataccagagcgtgtgcagcttcacctgcaacgagggcctgctgctggtgggcgccagcgtgctgcagtgcctggccaccggcaactggaacagcgtgccccccgagtgccaggccatcccctgcacccccctgctgagcccccagaacggcaccatgacctgcgtgcagcccctgggcagcagcagctacaagagcacctgccagttcatctgcgacgagggctacagcctgagcggccccgagagactggactgcaccagaagcggcagatggaccgacagcccccccatgtgcgaggccatcaagtgccccgagctgttcgcccccgagcagggcagcctggactgcagcgacaccagaggcgagttcaacgtgggcagcacctgccacttcagctgcgacaacggcttcaagctggagggccccaacaacgtggagtgcaccaccagcggcagatggagcgccaccccccccacctgcaagggcatcgccagcctgcccacccccggcgtgcagtgccccgccctgaccacccccggccagggcaccatgtactgcagacaccaccccggcaccttcggcttcaacaccacctgctacttcggctgcaacgccggcttcaccctgatcggcgacagcaccctgagctgcagacccagcggccagtggaccgccgtgacccccgcctgcagagccgtgaagtgcagcgagctgcacgtgaacaagcccatcgccatgaactgcagcaacctgtggggcaacttcagctacggcagcatctgcagcttccactgcctggagggccagctgctgaacggcagcgcccagaccgcctgccaggagaacggccactggagcaccaccgtgcccacctgccaggacgacggcaagtgccccctgaacccccacagccacctgggcacctacggcgtgttcaccaacgccgccttcgaccccagcccctag

SEQ ID NO: 266617 - protein, 768 aa, Artificial Sequence
  derived and/or modified sequence
MANCQIAILYQRFQRVVFGISQLLCFSALISELTNQKEVAAWTYHYSTKAYSWNISRKYCQNRYTDLVAIQNKNEIDYLNKVLPYYSSYYWIGIRKNNKTWTWVGTKKALTNEAENWADNEPNNKRNNEDCVEIYIKSPSAPGKWNDEHCLKKKHALCYTASCQDMSCSKQGECLETIGNYTCSCYPGFYGPECEYVRECGELELPQHVLMNCSHPLGNFSFNSQCSFHCTDGYQVNGPSKLECLASGIWTNKPPQCLAAQCPPLKIPERGNMTCLHSAKAFQHQSSCSFSCEEGFALVGPEVVQCTASGVWTAPAPVCKAISCEPLESPVHGSMDCSPSLRAFQYDTNCSFRCAEGFMLRGADIVRCDNLGQWTAPAPVCQALQCQDLPVPNEARVNCSHPFGAFRYQSVCSFTCNEGLLLVGASVLQCLATGNWNSVPPECQAIPCTPLLSPQNGTMTCVQPLGSSSYKSTCQFICDEGYSLSGPERLDCTRSGRWTDSPPMCEAIKCPELFAPEQGSLDCSDTRGEFNVGSTCHFSCDNGFKLEGPNNVECTTSGRWSATPPTCKGIASLPTPGVQCPALTTPGQGTMYCRHHPGTFGFNTTCYFGCNAGFTLIGDSTLSCRPSGQWTAVTPACRAVKCSELHVNKPIAMNCSNLWGNFSYGSICSFHCLEGQLLNGSAQTACQENGHWSTTVPTCQAGPLTIQEALTYFGGAVASTIGLIMGGTLLALLRKRFRQKDDGKCPLNPHSHLGTYGVFTNAAFDPSP

SEQ ID NO: 266618 - protein, 768 aa, Artificial Sequence
  derived and/or modified sequence
MANCQIAILYQRFQRVVFGISQLLCFSALISELTNQKEVAAWTYHYSTKAYSWNISRKYCQNRYTDLVAIQNKNEIDYLNKVLPYYSSYYWIGIRKNNKTWTWVGTKKALTNEAENWADNEPNNKRNNEDCVEIYIKSPSAPGKWNDEHCLKKKHALCYTASCQDMSCSKQGECLETIGNYTCSCYPGFYGPECEYVRECGELELPQHVLMNCSHPLGNFSFNSQCSFHCTDGYQVNGPSKLECLASGIWTNKPPQCLAVQCQHLEAPSEGTMDCVHPLTAFAYGSSCKFECQPGYRVRGLDMLRCIDSGHWSAPLPTCEAISCEPLESPVHGSMDCSPSLRAFQYDTNCSFRCAEGFMLRGADIVRCDNLGQWTAPAPVCQALQCQDLPVPNEARVNCSHPFGAFRYQSVCSFTCNEGLLLVGASVLQCLATGNWNSVPPECQAIPCTPLLSPQNGTMTCVQPLGSSSYKSTCQFICDEGYSLSGPERLDCTRSGRWTDSPPMCEAIKCPELFAPEQGSLDCSDTRGEFNVGSTCHFSCDNGFKLEGPNNVECTTSGRWSATPPTCKGIASLPTPGVQCPALTTPGQGTMYCRHHPGTFGFNTTCYFGCNAGFTLIGDSTLSCRPSGQWTAVTPACRAVKCSELHVNKPIAMNCSNLWGNFSYGSICSFHCLEGQLLNGSAQTACQENGHWSTTVPTCQAGPLTIQEALTYFGGAVASTIGLIMGGTLLALLRKRFRQKDDGKCPLNPHSHLGTYGVFTNAAFDPSP

SEQ ID NO: 266619 - protein, 646 aa, Artificial Sequence
  derived and/or modified sequence
MANCQIAILYQRFQRVVFGISQLLCFSALISELTNQKEVAAWTYHYSTKAYSWNISRKYCQNRYTDLVAIQNKNEIDYLNKVLPYYSSYYWIGIRKNNKTWTWVGTKKALTNEAENWADNEPNNKRNNEDCVEIYIKSPSAPGKWNDEHCLKKKHALCYTASCQDMSCSKQGECLETIGNYTCSCYPGFYGPECEYVRECGELELPQHVLMNCSHPLGNFSFNSQCSFHCTDGYQVNGPSKLECLASGIWTNKPPQCLAAQCPPLKIPERGNMTCLHSAKAFQHQSSCSFSCEEGFALVGPEVVQCTASGVWTAPAPVCKAISCEPLESPVHGSMDCSPSLRAFQYDTNCSFRCAEGFMLRGADIVRCDNLGQWTAPAPVCQALQCQDLPVPNEARVNCSHPFGAFRYQSVCSFTCNEGLLLVGASVLQCLATGNWNSVPPECQGKSIASLPTPGVQCPALTTPGQGTMYCRHHPGTFGFNTTCYFGCNAGFTLIGDSTLSCRPSGQWTAVTPACRAVKCSELHVNKPIAMNCSNLWGNFSYGSICSFHCLEGQLLNGSAQTACQENGHWSTTVPTCQAGPLTIQEALTYFGGAVASTIGLIMGGTLLALLRKRFRQKDDGKCPLNPHSHLGTYGVFTNAAFDPSP

SEQ ID NO: 266620 - protein, 646 aa, Artificial Sequence
  derived and/or modified sequence
  misc_feature (1)..(1): Xaa can be any naturally occurring amino acid
XANCQIAILYQRFQRVVFGISQLLCFSALISELTNQKEVAAWTYHYSTKAYSWNISRKYCQNRYTDLVAIQNKNEIDYLNKVLPYYSSYYWIGIRKNNKTWTWVGTKKALTNEAENWADNEPNNKRNNEDCVEIYIKSPSAPGKWNDEHCLKKKHALCYTASCQDMSCSKQGECLETIGNYTCSCYPGFYGPECEYVRECGELELPQHVLMNCSHPLGNFSFNSQCSFHCTDGYQVNGPSKLECLASGIWTNKPPQCLAAQCPPLKIPERGNMTCLHSAKAFQHQSSCSFSCEEGFALVGPEVVQCTASGVWTAPAPVCKAISCEPLESPVHGSMDCSPSLRAFQYDTNCSFRCAEGFMLRGADIVRCDNLGQWTAPAPVCQALQCQDLPVPNEARVNCSHPFGAFRYQSVCSFTCNEGLLLVGASVLQCLATGNWNSVPPECQGKSIASLPTPGVQCPALTTPGQGTMYCRHHPGTFGFNTTCYFGCNAGFTLIGDSTLSCRPSGQWTAVTPACRAVKCSELHVNKPIAMNCSNLWGNFSYGSICSFHCLEGQLLNGSAQTACQENGHWSTTVPTCQAGPLTIQEALTYFGGAVASTIGLIMGGTLLALLRKRFRQKDDGKCPLNPHSHLGTYGVFTNAAFDPSP

SEQ ID NO: 266621 - protein, 753 aa, Artificial Sequence
  derived and/or modified sequence
VVFGISQLLCFSALISELTNQKEVAAWTYHYSTKAYSWNISRKYCQNRYTDLVAIQNKNEIDYLNKVLPYYSSYYWIGIRKNNKTWTWVGTKKALTNEAENWADNEPNNKRNNEDCVEIYIKSPSAPGKWNDEHCLKKKHALCYTASCQDMSCSKQGECLETIGNYTCSCYPGFYGPECEYVRECGELELPQHVLMNCSHPLGNFSFNSQCSFHCTDGYQVNGPSKLECLASGIWTNKPPQCLAAQCPPLKIPERGNMTCLHSAKAFQHQSSCSFSCEEGFALVGPEVVQCTASGVWTAPAPVCKAISCEPLESPVHGSMDCSPSLRAFQYDTNCSFRCAEGFMLRGADIVRCDNLGQWTAPAPVCQALQCQDLPVPNEARVNCSHPFGAFRYQSVCSFTCNEGLLLVGASVLQCLATGNWNSVPPECQAIPCTPLLSPQNGTMTCVQPLGSSSYKSTCQFICDEGYSLSGPERLDCTRSGRWTDSPPMCEAIKCPELFAPEQGSLDCSDTRGEFNVGSTCHFSCDNGFKLEGPNNVECTTSGRWSATPPTCKGIASLPTPGVQCPALTTPGQGTMYCRHHPGTFGFNTTCYFGCNAGFTLIGDSTLSCRPSGQWTAVTPACRAVKCSELHVNKPIAMNCSNLWGNFSYGSICSFHCLEGQLLNGSAQTACQENGHWSTTVPTCQAGPLTIQEALTYFGGAVASTIGLIMGGTLLALLRKRFRQKDDGKCPLNPHSHLGTYGVFTNAAFDPSP

SEQ ID NO: 266622 - DNA, 2307 bp, Artificial Sequence
  derived and/or modified sequence
atggcgaactgccagattgccatcctgtatcaacgttttcaaagggtggttttcggaatcagccagctgctgtgtttctctgccctcatcagcgagctgacaaaccagaaagaagttgctgcttggacttaccactactctacgaaagcatactcttggaatatcagtagaaaatactgccaaaaccgttatacagacttggtagccatccagaataagaatgaaatcgattacctgaataaagttctaccatactacagttcatactattggatcgggattagaaagaacaacaaaacctggacttgggttggaaccaagaaggctttaacaaatgaagccgaaaactgggccgacaatgaacctaacaacaagagaaataacgaagactgcgtcgagatttacattaaatccccctccgcgccaggcaagtggaatgatgagcattgcctgaaaaaaaagcacgccctgtgctatacggccagttgccaagacatgtcttgtagcaagcagggagaatgtctggagacaataggaaattatacatgctcttgttacccaggtttctatggccccgagtgcgagtatgtccgcgaatgcggagagctagagctgccccagcacgtgctgatgaactgtagccacccccttggcaacttttcttttaacagccaatgctctttccactgcactgacggctaccaagttaacggtcctagcaagcttgaatgcctggcctccgggatttggactaacaaaccgcctcaatgcctggctgcccagtgtcctccactgaagatccccgagcggggcaatatgacatgcctgcacagcgcgaaggccttccagcaccagtccagttgctcattttcctgtgaggagggtttcgccctcgtcggtcccgaggtagtgcagtgtacagcgagcggagtgtggacagctcccgcaccggtatgcaaagcgatcagctgtgagcccctggagtctcccgtccacggaagcatggattgcagcccatccctccgggctttccaatacgacacaaattgttccttccgatgcgctgaagggttcatgctgagaggcgcagatattgtcagatgcgacaacctcggtcagtggacagcccccgctcctgtgtgccaggctctgcagtgtcaggacttacctgtccctaacgaggcccgcgtgaattgctcccaccctttcggcgccttccgctaccaatctgtgtgttccttcacctgtaacgagggacttctactcgtcggggcttcagtccttcagtgccttgcgaccggcaattggaacagcgtcccaccggaatgccaggcaattccctgcactccactcctaagtcctcagaatggcaccatgacatgcgtgcagcctctgggaagctcctcttacaaatcaacctgtcaattcatctgcgatgagggatatagtttgagcgggcccgagagattggattgtacacgctcaggaagatggacagacagtccccctatgtgcgaggcaatcaagtgtcccgagctcttcgccccagagcaaggatcgctggattgttcggatacaaggggtgaatttaatgtgggcagcacatgtcatttcagctgcgacaatgggtttaaacttgagggacccaacaatgtcgaatgtactacctcaggtaggtggtcggctaccccccctacctgcaagggaatcgcctctctgccaactccaggggtgcagtgtccagcactgaccacgccaggacaaggtacaatgtactgtaggcaccacccaggcacatttggctttaacactacttgttactttggctgcaatgccggcttcaccctcatcggagactcaacactgtcctgccgcccttccggacagtggaccgcggtcacccccgcttgccgagcagtcaagtgttccgaactgcacgtcaataaaccaattgcaatgaactgttcgaatctttgggggaacttcagctatggctccatctgctcgttccactgtctagagggtcagctgttgaacggaagtgcacaaaccgcctgccaggaaaacggccactggagtacaactgtgcctacatgtcaggcgggaccactaactattcaggaggcgttgacatattttggaggcgcagtagccagcaccatcgggctcattatgggcggcaccctactggctctcctgagaaaaaggttccgacagaaggatgacggcaaatgccctctcaacccacatagccatcttggtacctacggagtctttacaaacgctgcctttgatccgtccccttag

SEQ ID NO: 266623 - DNA, 2307 bp, Artificial Sequence
  derived and/or modified sequence
atggcgaactgccaaattgccatactctaccagaggtttcagagggtcgtatttggaataagccagcttctttgcttctctgccttgattagcgagctcacaaatcagaaagaagtggctgcctggacataccattacagcacaaaagcctactcgtggaatataagcagaaagtactgccagaataggtatacagacctggttgcgattcaaaacaagaatgagattgattatttgaataaggtgttaccatactactccagctattactggatcggcatcaggaaaaataataaaacctggacatgggtggggaccaagaaggcactgaccaacgaggcagagaattgggccgataatgaacccaacaataaaaggaacaacgaggattgcgtagagatctatattaagagtcccagcgcaccagggaagtggaatgatgagcattgtttgaaaaaaaagcatgcactgtgctatactgcatcctgtcaggatatgagttgctcaaagcaaggtgagtgtttagaaactatcggcaactacacttgttcatgttacccaggcttctacggacccgagtgtgagtacgtccgagaatgcggtgagttagaacttcctcaacacgtgctcatgaactgttctcaccctctggggaattttagcttcaattctcagtgctcattccactgcactgacggctaccaggtgaatggcccgagcaagctcgaatgtctggccagtggaatatggactaataaaccccctcagtgtctggccgttcagtgccagcacctagaggctcccagcgaaggcacaatggattgcgtccacccactgaccgctttcgcttatggatcaagttgtaagttcgaatgccagccagggtaccgagttcgtggccttgacatgctgcggtgcattgatagcggacactggagcgctccactgccaacttgcgaggctatcagctgcgaaccacttgagagccctgtgcacgggtctatggattgtagcccttcgctccgtgcatttcaatacgataccaactgctcatttcggtgtgcagaaggttttatgttacgtggagccgatatcgtgagatgtgacaatctgggacagtggactgctccagcacccgtatgtcaggcgctccagtgccaggacctgcccgtccccaatgaagccagggtgaattgttcccatccgtttggagcgtttcgctaccaatcggtgtgctcattcacctgtaatgagggacttttactagtgggagcgtctgtattgcagtgtcttgcgactggcaactggaactccgtccctcccgaatgccaggcgatcccatgcactccattgctctcccctcagaacggtactatgacctgtgtccagcccctggggtcgagctcctacaagagcacatgccagttcatatgtgacgaagggtactctctttccggcccggagcggctcgactgtacaagatccgggcgctggaccgactctcctcccatgtgcgaagcaatcaagtgtcccgaactttttgcacccgaacaaggctctctcgattgctccgacacacgaggagaattcaacgttgggtctacctgccatttttcatgcgataacggctttaagcttgaggggccgaataacgtggagtgtacgacaagcggcaggtggtcagcaactccccctacctgcaaaggcatcgcaagcctccctacccccggagtgcagtgccccgccttaacaacccctgggcaggggacaatgtactgccggcaccaccctggaactttcgggttcaacactacatgctacttcggatgcaacgccggctttacactcataggcgactccacactgtcatgccgtcctagtggtcagtggactgcagtcactcccgcttgcagagcagtaaagtgctcggagctgcacgtgaataagcccatcgcgatgaattgttctaatctgtgggggaatttctcgtacggtagcatatgctctttccactgtctcgaggggcagctgttgaacggctctgcccaaaccgcctgccaggagaatgggcattggtcaacaactgtgcctacctgccaagccggccctctgacaattcaggaagccttaacgtacttcggcggcgcggtagctagtacaattggcctaattatgggaggtacccttctggctctcctgcggaaacgcttcaggcagaaggacgacgggaaatgtcccctgaatcctcactcgcatctgggaacttacggcgtgttcaccaacgcggccttcgacccatctccatag

SEQ ID NO: 266624 - DNA, 1941 bp, Artificial Sequence
  derived and/or modified sequence
atggccaactgtcagattgcgattttgtatcagagattccaacgggtggtgttcggcatctcccagttactgtgtttctctgctctcatatccgaactgaccaaccagaaggaagtagccgcttggacttaccattatagcaccaaggcgtacagctggaacataagccgcaaatactgtcaaaatcggtacaccgatctggtggcgattcagaacaagaacgaaatcgattatttaaacaaagtgctgccatactactccagctactattggatcgggatcaggaagaataataaaacttggacgtgggtgggaaccaagaaggcgcttaccaatgaggccgaaaactgggccgacaatgaaccaaacaacaaacgaaataatgaagattgcgtggagatctatattaaatcgccttcagcccctgggaaatggaacgatgaacactgcctgaagaaaaagcatgccctctgctatacagccagttgccaagacatgtcgtgttcaaagcagggagaatgtctcgagaccatcggaaactacacatgtagctgttacccggggttttacggaccagagtgtgaatatgtgcgggagtgcggagaacttgaattgccacagcacgtgctcatgaattgcagccaccccctcgggaattttagtttcaactctcagtgctccttccactgcaccgacggttaccaggtgaatggcccttccaaattagaatgtttggcatcaggcatatggacaaataagccacctcagtgcttggcggctcagtgtccgccgcttaaaattcctgagaggggaaacatgacgtgcctgcatagtgctaaagctttccagcaccagtcatcctgtagtttctcctgcgaagagggcttcgctctcgtagggcccgaagtggtgcagtgcaccgcgagcggggtttggacagctcccgccccagtctgtaaggccatatcatgcgagcccctggagtccccagtgcatggcagcatggattgctctcctagccttcgcgcatttcagtacgacacaaactgttccttcagatgcgccgagggatttatgttgaggggcgccgatattgtgcggtgtgacaacttgggccagtggaccgctccggcccccgtctgtcaggcactgcaatgtcaggatctgcctgtgcccaatgaagcaagagtcaactgctctcaccctttcggtgccttccggtaccagagtgtctgcagcttcacctgcaatgaaggcttactcttggtgggtgcatccgtcctgcaatgtttagcaaccggaaattggaacagtgtcccaccggagtgtcagggcaagtctatagcctcactgcccacaccaggggtgcagtgccccgccctgacaactccagggcagggtaccatgtattgcaggcaccaccccggaacctttggatttaatactacatgctactttggatgcaatgccggctttaccctgattggcgactctaccttatcttgtcggccctcaggtcagtggaccgcagtgacacctgcttgcagggccgtgaaatgctcagagctgcacgtcaacaaacccattgccatgaattgctcaaacctgtgggggaactttagttatggttcgatctgctcatttcactgcctcgagggacagctgcttaatggcagtgcccagacagcttgccaggagaacggtcactggtctactaccgtccctacttgtcaagcaggtccactgaccattcaggaggccctaacatacttcgggggagcagtggcctccaccattggcctcatcatgggcggtacactgcttgcacttcttagaaagcggtttcggcagaaggatgatggcaaatgtccactaaatccccacagccaccttggcacctacggcgtgtttactaacgccgctttcgatcctagcccatag

SEQ ID NO: 266625 - DNA, 1941 bp, Artificial Sequence
  derived and/or modified sequence
atggccaattgtcaaatcgccatactttaccagcggtttcaacgcgtagtgtttgggatttcccaactgttgtgtttcagcgccctgatctctgagctcaccaaccagaaggaagtggccgcttggacctatcattactccacaaaggcatatagttggaacatctccaggaaatactgccagaaccgatacactgacctggtggccatccagaacaaaaacgagatagactatcttaacaaggtgctcccttattatagctcctactactggatcggcattcgcaagaacaataagacatggacttgggtcgggacaaagaaggcccttactaacgaagccgaaaactgggccgataatgagccgaacaataagcgaaataatgaggattgcgtcgaaatctacatcaagagcccttccgcacctggtaaatggaacgacgaacattgtctgaagaaaaagcacgctctatgttatacagctagctgtcaagacatgtcctgcagcaaacagggagagtgcctggaaaccatcggcaattacacatgctcttgctatcctgggttctatggccccgagtgtgagtatgttcgggagtgcggggagttggaactgccacagcatgtactcatgaattgctcacaccccctgggaaacttcagctttaattcacagtgtagtttccattgtaccgacggctaccaagtaaacggccccagcaagcttgagtgtctggcaagtggcatttggacaaataaacctccccagtgcttagctgcccagtgccctccattgaagatacccgagcgggggaacatgacctgtctgcactccgcaaaggcatttcagcaccagtctagctgcagcttttcttgcgaagaaggatttgccctggtggggccggaagtggtccagtgcaccgccagcggcgtgtggacagcgcctgcacccgtgtgtaaggctatcagctgtgagccccttgaaagccccgttcatggtagcatggattgttctccttccctccgagccttccagtatgacaccaactgctccttccgctgcgctgaggggtttatgctgcggggagcagatattgtaagatgcgataacctgggccagtggacagcccctgctcctgtgtgccaggccttgcagtgccaggacctgcctgtgccaaatgaggccagggtcaattgcagccatccctttggggctttccgttatcagtcagtctgtagcttcacctgcaatgaggggctgcttctggtcggcgcctccgttcttcagtgcctagctacgggaaactggaactccgtaccgccagagtgccagggaaaatcgattgcttcgctgcctacaccaggtgtgcagtgtcccgccctgacaacacccgggcagggcacgatgtactgccgtcatcacccaggcacgttcggattcaatactacttgttatttcggatgtaacgcaggtttcacactgatcggcgattcaaccctttcctgccgacccagcggccagtggactgccgtgacaccagcttgcagagctgtaaaatgcagcgagctgcatgtgaataaacccattgccatgaactgcagtaacttatggggcaacttcagttacggctccatttgtagtttccattgtctcgaaggccagctcctgaatggctccgcccagactgcatgccaggagaatggccattggagtacaacagttcctacatgtcaggccggacctctgacgattcaggaggcacttacctactttggaggcgctgtcgcgagtacgataggcttgatcatgggcggcaccctactagccctgctcaggaagaggtttcgccaaaaagacgacggaaaatgcccattgaacccgcattctcacctgggaacctatggagttttcaccaatgccgctttcgatccttctccttag

SEQ ID NO: 266626 - DNA, 2307 bp, Artificial Sequence
  derived and/or modified sequence
atggccaactgtcagatcgcaatactctaccagaggtttcagcgggtggtatttggcatttcccaactcctatgcttttccgcactaattagcgaattgactaatcaaaaggaagttgctgcctggacttatcattactctacgaaagcctatagttggaatatcagcagaaagtactgtcaaaacaggtacacagatttggtggccatccagaacaagaatgagatcgattacctcaataaagtcctgccttactattcttcatattattggatcggcattcgtaagaacaataagacgtggacctgggtggggaccaagaaggcattgactaatgaggctgagaattgggccgacaacgagcccaacaataagagaaacaatgaagattgcgtggaaatctacatcaagtcgccaagcgctcctggcaagtggaacgacgaacattgtctcaaaaagaagcacgccctctgctacacagccagttgtcaagacatgagttgttccaaacaaggtgaatgccttgagacaatcgggaattacacatgtagctgttaccctggcttctatggccctgaatgtgaatatgtgagagagtgcggcgaactggagctgcctcagcacgtgttgatgaactgttcccacccacttggcaacttctcttttaattcccagtgttcgtttcactgcactgatggctatcaagttaatggaccctcaaagctggagtgtctcgcatccgggatttggactaacaagccaccgcagtgtttggccgtccagtgccagcatttggaggccccatccgagggcacaatggactgtgtacaccccctgactgctttcgcatacgggtctagttgcaaatttgagtgtcaacccgggtaccgtgttcggggtcttgatatgcttaggtgtatcgacagcggacactggtccgcaccactacctacgtgtgaggcaataagctgcgaaccacttgagtctccagtacacgggtccatggactgttctccgtcgcttagagcattccagtatgataccaactgcagcttcagatgtgcagaaggcttcatgctgaggggcgcggatatagtcagatgtgataacctcggccagtggactgcccccgcccccgtgtgtcaggccctgcaatgccaggatctgcccgtccccaacgaggctcgcgtgaattgctcccacccattcggagcttttcgctatcagtctgtctgctcattcacctgtaatgaggggcttttgctagtaggggcctccgtgttgcagtgtctggcaaccggaaactggaacagtgtccctccagaatgtcaggccataccctgcaccccactcctctcacctcagaatggtactatgacctgtgtgcaacctctgggttcaagttcttacaaatctacgtgccagttcatctgcgatgagggatactcgttgagtggtcccgagagattagactgcactaggagcgggcgctggacggacagtccacccatgtgcgaggcaatcaaatgccccgagctgttcgcaccagagcaaggaagcctcgattgttccgacacaaggggcgaatttaacgtaggcagcacctgtcacttttcttgtgataatggttttaaattagaagggcccaataacgttgaatgtacgacgtcgggaagatggtcggctacacccccaacctgtaagggaatagcatctctgccaacccccggagtacagtgtcccgccttgaccacaccaggtcaaggaactatgtattgtaggcaccacccaggtaccttcgggttcaatacaacttgttacttcgggtgcaacgctgggtttaccctgataggggattcaacactctcctgcaggccatcagggcaatggacagcagtcactccagcatgcagagctgtgaagtgctccgagctacatgtgaacaagcccatagcgatgaattgctccaatctttggggcaactttagttacggcagtatctgtagcttccattgcctagagggccagctacttaatggtagcgctcaaaccgcttgccaggagaatggccattggtccactaccgtccctacctgtcaagccgggcctctgaccatacaggaggccctcacctattttggcggtgccgttgcgtcaaccattgggttaattatgggcggcactctcctggcgctcctaaggaagaggttccgccagaaagatgacggcaagtgccccttaaatcctcactctcaccttggcacctacggagtgtttacaaatgctgctttcgacccctcaccctag

SEQ ID NO: 266627 - DNA, 2307 bp, Artificial Sequence
  derived and/or modified sequence
atggcgaactgccagatagccatcctataccagagatttcagagggtcgtctttggaatctctcagttgctgtgcttttcggctttgatttccgaactgaccaatcagaaggaggtggctgcttggacataccattactcaactaaagcatactcatggaacattagtcgcaagtattgccaaaatagatataccgacctggttgctatacagaacaaaaatgaaatcgactatttgaataaagtgcttccttactactctagttattactggataggtattcgcaagaacaataaaacttggacatgggtagggactaagaaggcattaaccaacgaggcggagaactgggctgataatgagccgaataacaaacgtaacaatgaggattgtgtggaaatctatatcaaaagcccaagtgcccctggcaagtggaacgatgagcattgcttaaaaaagaagcacgctctttgttacactgctagttgtcaagacatgagctgttccaagcaaggagagtgcttagagacgatcgggaattatacttgcagctgttaccccgggttttatgggcccgagtgcgaatacgtgcgagagtgcggggagttggaactcccccagcacgttctgatgaattgttcccacccactgggcaattttagctttaacagccagtgtagtttccactgcaccgatggttatcaggtgaacggaccatcaaagctggaatgccttgcttcgggaatctggactaataaaccacctcaatgccttgctgctcagtgcccgcctctgaagatccctgagcggggaaacatgacctgccttcattccgctaaggcctttcagcaccagtctagttgtagcttttcgtgtgaggagggcttcgccctggtcggccccgaggtggtgcaatgcacagcttccggagtgtggacagcgccggccccagtgtgcaaggctatatcttgtgagccactcgaatctccagttcacgggtcaatggactgttctccttcactccgcgccttccagtacgataccaactgctcttttagatgcgctgagggtttcatgttgcgcggggctgatatcgttaggtgcgacaatctgggccagtggaccgcccctgcccctgtctgtcaagcgctgcaatgtcaggatctgcccgtgccgaatgaggcaagagtgaattgttctcatcctttcggtgcatttagataccagtcagtctgctctttcacatgcaatgaggggctcctgcttgtgggggctagcgtcttgcagtgcttagccacggggaattggaacagtgtgccgccagaatgccaagctataccgtgtacaccactcttgtctccacagaatggtaccatgacatgtgttcagcccttagggagttcaagttacaagagcacctgccagtttatatgcgatgaaggctacagtttaagcggcccagagaggctggactgtactcggtctggccgatggactgatagcccccccatgtgtgaggcgattaagtgcccagaactgttcgctcctgaacagggctccctagactgtagcgacactaggggagagttcaatgtgggctcaacctgtcacttctcctgcgacaacgggtttaagttggaggggcctaacaatgttgagtgcactacctccggtagatggtccgccaccccccccacttgcaaaggcattgcttctcttccgacccccggagtccagtgtccggcactcaccaccccaggccaaggcaccatgtactgccggcatcatcctggcaccttcggttttaacactacttgttatttcgggtgcaatgctggatttacactaattggagattcaaccctgtcctgcaggccttcgggtcagtggacggctgtgacaccggcttgccgagcagttaagtgctctgagctacacgtgaacaagccaatcgctatgaattgttccaatctctggggcaacttctcttacgggagtatctgcagctttcattgtttggagggccagctgttgaacggatctgcacagacagcctgccaagaaaacggccattggtccaccacggtgcccacatgtcaggccggacctcttactatccaggaggcattgacctactttggaggtgccgttgcctctaccattggcttgataatgggaggtaccctgctcgccctgctccgaaagagatttaggcagaaggacgatggtaagtgccccctcaatccccactcacaccttggcacctacggagttttcactaatgcagcctttgaccccagcccctag

SEQ ID NO: 266628 - DNA, 1941 bp, Artificial Sequence
  derived and/or modified sequence
taagcaaactgtcagatcgccatcctgtatcagcggtttcagagggtcgttttcggcatttctcagttactatgtttctcagcactcatcagtgaactgacgaatcaaaaagaggttgccgcatggacctatcactattctaccaaggcatactcatggaatataagtcgaaaatactgtcaaaacagatatacagacttggtcgcaattcagaacaaaaacgagatcgattatcttaacaaagttttgccatactactcctcctactactggatagggattcgtaagaacaataagacttggacctgggtgggcaccaaaaaggcgctgaccaacgaggctgagaattgggctgataatgaaccaaataacaaacgcaataatgaggattgcgtggaaatttatatcaaatccccgtccgctcccggcaagtggaatgatgagcactgcctgaagaaaaagcacgcgctgtgctacaccgcttcttgccaggacatgagttgtagcaaacagggtgaatgccttgaaaccataggaaattatacttgctcgtgttatccaggtttttacggcccggagtgtgagtacgtccgagagtgtggggagctggagttgcctcagcatgtgctgatgaattgttcccaccccctgggaaacttctcttttaactctcagtgtagctttcactgtaccgacggataccaggtgaatggtccctccaagcttgaatgtcttgcctctgggatctggactaataagcctcctcagtgtttggctgcgcagtgcccccccctgaaaattcctgaacgaggcaacatgacatgcctgcattctgctaaggctttccaacaccaatcatcgtgctccttcagctgcgaggaaggcttcgccctggttggaccggaagtggtccagtgtaccgcaagcggtgtctggaccgccccagcgcctgtgtgtaaggccattagctgcgaaccgctggaatctcccgtgcacgggagcatggattgttcaccttctctccgagcattccaatatgatactaattgtagcttcaggtgcgccgaaggctttatgctgcgcggcgcagacatcgtcaggtgcgacaacctgggacaatggacggctcctgctcccgtgtgccaagctctgcagtgtcaagacctgccggtgccgaacgaggcacgggtgaactgttctcacccttttggagcttttcggtaccagtctgtttgttcatttacatgcaacgaaggcttactactggttggggccagtgtcttacaatgcctggccaccggaaattggaacagcgtgccccccgaatgccagggcaagagtatagcctcgttgcccactcctggcgtacagtgtccggctctgactaccccaggtcagggtactatgtattgccgacaccatcctggtacgttcggtttcaatacaacctgctatttcgggtgtaatgcgggctttaccctcattggggattctaccctctcttgccgcccttccgggcagtggaccgctgtgacacccgcctgtcgagcagtgaaatgtagtgaactgcatgtcaacaagcctatcgcgatgaactgctccaacctgtgggggaatttctcctacgggtcgatttgttctttccactgcctcgagggccaactgttgaatgggagtgctcagactgcttgtcaggagaatgggcactggtctactacagtgccaacttgtcaggccggacctctaaccatccaggaggcactgacgtatttcggcggagctgtggcatctaccatcgggctaataatgggcggtaccctcctggcgctgctccggaaacgcttcagacagaaggacgacggcaaatgccccctaaacccacactcccatcttggcacatacggcgtattcactaacgctgcctttgatccatccccttag

SEQ ID NO: 266629 - DNA, 2262 bp, Artificial Sequence
  derived and/or modified sequence
gttgttttcggaatcagccaattactttgtttcagtgccctgattagcgaattaacaaaccagaaggaggttgccgcatggacctaccactactccaccaaagcctactcttggaacatttctcggaaatactgccaaaatcggtacaccgatctggtagcgatccagaataagaatgagatcgattatctcaacaaggtgctaccttactattccagctattattggatcgggatccgaaagaataacaaaacatggacctgggttggaacgaaaaaagccctaacaaatgaggcggagaactgggctgacaatgagcctaataataaacggaataatgaggattgcgtggaaatatacatcaagtctccgtctgcacccggaaagtggaacgacgaacattgtcttaagaagaagcatgcactctgctacactgcttcatgtcaggatatgtcatgtagcaagcagggagagtgtctcgagaccatcgggaattacacttgtagttgctatccgggcttttacggccctgagtgcgagtatgtccgcgaatgcggggagctggagctcccccagcatgttttgatgaactgctctcaccctctgggcaacttcagtttcaatagccagtgctcttttcactgcaccgacgggtaccaagtcaatggaccctccaaactggaatgcttagcgagcggaatttggaccaataagcccccccaatgtctcgccgctcagtgtccacccctgaagattcccgagcggggcaatatgacctgcctgcactctgccaaggcttttcagcatcagtcctcttgtagttttagctgtgaggaaggatttgccctcgtcggccctgaagtcgttcagtgcaccgcatccggagtctggaccgcaccagctcccgtatgtaaggccatctcctgtgaacccttagaatctcccgtccatggaagcatggattgctctccttctcttcgcgcctttcagtacgacactaactgttcttttcgctgtgccgagggctttatgcttcggggagcagacattgtcagatgtgacaatcttggacagtggaccgccccagctccagtgtgccaggccctgcagtgtcaagacctgcctgtccccaacgaagctcgcgtgaactgcagccacccttttggagcctttcggtatcagtccgtctgctcttttacctgcaacgagggactgctgctcgttggcgcatcggtactacaatgcctggccacagggaactggaacagcgtgccgcctgaatgccaggctattccgtgtacacctctgctttcaccacagaacgggacaatgacatgcgtgcagccgcttggctcgagtagctacaagagcacttgtcaattcatttgtgacgaaggatattcattatctgggcccgagcgcctggactgcacccggtctggaagatggactgatagccctccaatgtgcgaggcaattaagtgtccagagctgttcgcccccgagcaggggtccctggattgctccgacaccaggggcgagtttaacgtcggaagcacatgtcacttctcttgtgataatggcttcaagctggagggccctaacaacgtggaatgcaccacttccggtagatggagcgctacccctcctacttgcaaaggcatcgcctcgcttcctacacctggcgtccagtgtccagctctgactacaccaggacaggggactatgtattgtcggcaccatccaggcacatttgggtttaatacaacgtgctattttggatgtaatgccgggttcaccctgatcggagattcaactctcagctgtaggccctccggccagtggaccgctgttacccctgcatgcagggccgtgaagtgctctgagcttcatgttaataaaccgattgctatgaattgtagcaatctgtggggaaatttcagctatggatctatttgtagcttccattgtctggagggccagctgcttaatggctcggcgcagacagcatgtcaggaaaacggacattggtcgactactgttcctacttgtcaagctggtcctctcacaattcaggaggccctcacatactttggtggagccgtggctagcactattgggctcataatgggagggaccctacttgcgctcttgcgcaagagatttagacagaaggacgacggaaaatgccccctgaacccccattcacatctgggaacctatggggttttcacaaatgctgcattcgatccttctccgtag

SEQ ID NO: 266630 - DNA, 2307 bp, Artificial Sequence
  derived and/or modified sequence
atggccaactgccagatcgccatcctgtaccagcgcttccagagggtggtgtttggcatcagccagctgctgtgcttcagcgccctgatcagcgagctgaccaaccagaaggaggtggccgcctggacctaccactacagcaccaaggcctacagctggaacatcagcaggaagtactgccagaaccgctacacagacctggtggccatccagaacaagaatgaaattgactacctgaacaaggtgctgccctactacagcagctactactggattggcatcaggaagaacaacaagacctggacctgggtgggcaccaagaaggccctgaccaatgaagctgagaactgggccgacaatgagcccaacaacaagaggaacaatgaagactgtgtggagatctacatcaagagccccagcgcccctgggaagtggaatgatgagcactgcctgaagaagaagcacgccctgtgctacacagccagctgccaggacatgagctgcagcaagcagggagaatgtctggagaccatcggcaactacacctgcagctgctacccaggcttctacggcccagaatgtgaatatgtgagagaatgtggggagctggagctgccccagcacgtgctgatgaactgcagccaccccctgggcaacttctccttcaacagccagtgcagcttccactgcacagatggctaccaggtgaatggccccagcaagctggagtgcctggccagcggcatctggaccaacaagccaccccagtgcctggccgcccagtgcccccccctgaagatccctgagcggggcaacatgacctgcctgcacagcgccaaggccttccagcaccagagcagctgcagcttcagctgtgaggagggctttgccctggtgggccctgaggtggtgcagtgcacagccagcggcgtgtggacagccccagcccctgtgtgcaaggccatcagctgtgagcccctggagagccctgtgcacggctccatggactgcagccccagcctgcgggccttccagtatgacaccaactgcagcttccgctgtgccgagggcttcatgctgcggggagctgacatcgtgcgctgtgacaacctgggccagtggacagccccagcccctgtgtgccaggccctgcagtgccaggacctgcctgtgcccaatgaggcccgggtgaactgcagccacccctttggagccttccgctaccagagcgtgtgcagcttcacctgcaatgaaggcctgctgctggtgggcgcctctgtgctgcagtgcctggccactggaaactggaacagcgtgcccccagagtgccaggccatcccctgcacccccctgctgagcccccagaatggcaccatgacctgtgtgcagcccctgggcagcagcagctacaagagcacctgccagttcatctgtgatgagggctacagcctgagcggccctgagcggctggactgcaccaggagcggccgctggacagacagcccccccatgtgtgaggccatcaagtgcccagagctgtttgcccctgagcagggcagcctggactgcagcgacaccagaggagagttcaacgtgggcagcacctgccacttcagctgtgacaatggcttcaagctggagggccccaacaacgtggagtgcaccaccagcggccgctggagcgccaccccacccacctgcaagggcatcgccagcctgcccaccccaggagtgcagtgcccagccctgaccaccccaggccagggcaccatgtactgccgccaccaccctggcaccttcggcttcaacaccacctgctacttcggctgcaatgccggcttcaccctgattggagacagcaccctgagctgccggcccagcggccagtggacagctgtgaccccagcctgcagagctgtgaagtgcagcgagctgcacgtgaacaagcccatcgccatgaactgcagcaacctgtggggcaacttctcctatggcagcatctgcagcttccactgcctggagggccagctgctgaatggaagtgcccagacagcctgccaggagaatggccactggagcaccaccgtgcccacctgccaggccggccccctgaccatccaggaggccctgacctactttggaggagctgtggccagcaccatcggcctcatcatgggcggcaccctgctggccctgctgaggaagcgcttccggcagaaggatgatggcaagtgccccctgaacccccacagccacctgggcacctacggcgtcttcaccaatgctgcctttgaccccagcccctag

SEQ ID NO: 266631 - DNA, 2307 bp, Artificial Sequence
  derived and/or modified sequence
atggccaactgccagatcgccatcctgtaccagcgcttccagagggtggtgtttggcatcagccagctgctgtgcttcagcgccctgatcagcgagctgaccaaccagaaggaggtggccgcctggacctaccactacagcaccaaggcctacagctggaacatcagcaggaagtactgccagaaccgctacacagacctggtggccatccagaacaagaatgaaattgactacctgaacaaggtgctgccctactacagcagctactactggattggcatcaggaagaacaacaagacctggacctgggtgggcaccaagaaggccctgaccaatgaagctgagaactgggccgacaatgagcccaacaacaagaggaacaatgaagactgtgtggagatctacatcaagagccccagcgcccctgggaagtggaatgatgagcactgcctgaagaagaagcacgccctgtgctacacagccagctgccaggacatgagctgcagcaagcagggagaatgtctggagaccatcggcaactacacctgcagctgctacccaggcttctacggcccagaatgtgaatatgtgagagaatgtggggagctggagctgccccagcacgtgctgatgaactgcagccaccccctgggcaacttctccttcaacagccagtgcagcttccactgcacagatggctaccaggtgaatggccccagcaagctggagtgcctggccagcggcatctggaccaacaagccaccccagtgcctggccgtgcagtgccagcacctggaggcccccagcgagggcaccatggactgtgtgcaccccctgacagcctttgcctacggcagcagctgcaagtttgagtgccagcccggctacagagtgcggggcctggacatgctgcgctgcattgattctggccactggagcgcccccctgcccacctgtgaggccatcagctgtgagcccctggagagccctgtgcacggctccatggactgcagccccagcctgcgggccttccagtatgacaccaactgcagcttccgctgtgccgagggcttcatgctgcggggagctgacatcgtgcgctgtgacaacctgggccagtggacagccccagcccctgtgtgccaggccctgcagtgccaggacctgcctgtgcccaatgaggcccgggtgaactgcagccacccctttggagccttccgctaccagagcgtgtgcagcttcacctgcaatgaaggcctgctgctggtgggcgcctctgtgctgcagtgcctggccactggaaactggaacagcgtgcccccagagtgccaggccatcccctgcacccccctgctgagcccccagaatggcaccatgacctgtgtgcagcccctgggcagcagcagctacaagagcacctgccagttcatctgtgatgagggctacagcctgagcggccctgagcggctggactgcaccaggagcggccgctggacagacagcccccccatgtgtgaggccatcaagtgcccagagctgtttgcccctgagcagggcagcctggactgcagcgacaccagaggagagttcaacgtgggcagcacctgccacttcagctgtgacaatggcttcaagctggagggccccaacaacgtggagtgcaccaccagcggccgctggagcgccaccccacccacctgcaagggcatcgccagcctgcccaccccaggagtgcagtgcccagccctgaccaccccaggccagggcaccatgtactgccgccaccaccctggcaccttcggcttcaacaccacctgctacttcggctgcaatgccggcttcaccctgattggagacagcaccctgagctgccggcccagcggccagtggacagctgtgaccccagcctgcagagctgtgaagtgcagcgagctgcacgtgaacaagcccatcgccatgaactgcagcaacctgtggggcaacttctcctatggcagcatctgcagcttccactgcctggagggccagctgctgaatggaagtgcccagacagcctgccaggagaatggccactggagcaccaccgtgcccacctgccaggccggccccctgaccatccaggaggccctgacctactttggaggagctgtggccagcaccatcggcctcatcatgggcggcaccctgctggccctgctgaggaagcgcttccggcagaaggatgatggcaagtgccccctgaacccccacagccacctgggcacctacggcgtcttcaccaatgctgcctttgaccccagcccctag

SEQ ID NO: 266632 - DNA, 1941 bp, Artificial Sequence
  derived and/or modified sequence
atggccaactgccagatcgccatcctgtaccagcgcttccagagggtggtgtttggcatcagccagctgctgtgcttcagcgccctgatcagcgagctgaccaaccagaaggaggtggccgcctggacctaccactacagcaccaaggcctacagctggaacatcagcaggaagtactgccagaaccgctacacagacctggtggccatccagaacaagaatgaaattgactacctgaacaaggtgctgccctactacagcagctactactggattggcatcaggaagaacaacaagacctggacctgggtgggcaccaagaaggccctgaccaatgaagctgagaactgggccgacaatgagcccaacaacaagaggaacaatgaagactgtgtggagatctacatcaagagccccagcgcccctgggaagtggaatgatgagcactgcctgaagaagaagcacgccctgtgctacacagccagctgccaggacatgagctgcagcaagcagggagaatgtctggagaccatcggcaactacacctgcagctgctacccaggcttctacggcccagaatgtgaatatgtgagagaatgtggggagctggagctgccccagcacgtgctgatgaactgcagccaccccctgggcaacttctccttcaacagccagtgcagcttccactgcacagatggctaccaggtgaatggccccagcaagctggagtgcctggccagcggcatctggaccaacaagccaccccagtgcctggccgcccagtgcccccccctgaagatccctgagcggggcaacatgacctgcctgcacagcgccaaggccttccagcaccagagcagctgcagcttcagctgtgaggagggctttgccctggtgggccctgaggtggtgcagtgcacagccagcggcgtgtggacagccccagcccctgtgtgcaaggccatcagctgtgagcccctggagagccctgtgcacggctccatggactgcagccccagcctgcgggccttccagtatgacaccaactgcagcttccgctgtgccgagggcttcatgctgcggggagctgacatcgtgcgctgtgacaacctgggccagtggacagccccagcccctgtgtgccaggccctgcagtgccaggacctgcctgtgcccaatgaggcccgggtgaactgcagccacccctttggagccttccgctaccagagcgtgtgcagcttcacctgcaatgaaggcctgctgctggtgggcgcctctgtgctgcagtgcctggccactggaaactggaacagcgtgcccccagagtgccagggcaagagcatcgccagcctgcccaccccaggagtgcagtgcccagccctgaccaccccaggccagggcaccatgtactgccgccaccaccctggcaccttcggcttcaacaccacctgctacttcggctgcaatgccggcttcaccctgattggagacagcaccctgagctgccggcccagcggccagtggacagctgtgaccccagcctgcagagctgtgaagtgcagcgagctgcacgtgaacaagcccatcgccatgaactgcagcaacctgtggggcaacttctcctatggcagcatctgcagcttccactgcctggagggccagctgctgaatggaagtgcccagacagcctgccaggagaatggccactggagcaccaccgtgcccacctgccaggccggccccctgaccatccaggaggccctgacctactttggaggagctgtggccagcaccatcggcctcatcatgggcggcaccctgctggccctgctgaggaagcgcttccggcagaaggatgatggcaagtgccccctgaacccccacagccacctgggcacctacggcgtcttcaccaatgctgcctttgaccccagcccctag

SEQ ID NO: 266633 - DNA, 1941 bp, Artificial Sequence
  derived and/or modified sequence
tgagccaactgccagatcgccatcctgtaccagcgcttccagagggtggtgtttggcatcagccagctgctgtgcttcagcgccctgatcagcgagctgaccaaccagaaggaggtggccgcctggacctaccactacagcaccaaggcctacagctggaacatcagcaggaagtactgccagaaccgctacacagacctggtggccatccagaacaagaatgaaattgactacctgaacaaggtgctgccctactacagcagctactactggattggcatcaggaagaacaacaagacctggacctgggtgggcaccaagaaggccctgaccaatgaagctgagaactgggccgacaatgagcccaacaacaagaggaacaatgaagactgtgtggagatctacatcaagagccccagcgcccctgggaagtggaatgatgagcactgcctgaagaagaagcacgccctgtgctacacagccagctgccaggacatgagctgcagcaagcagggagaatgtctggagaccatcggcaactacacctgcagctgctacccaggcttctacggcccagaatgtgaatatgtgagagaatgtggggagctggagctgccccagcacgtgctgatgaactgcagccaccccctgggcaacttctccttcaacagccagtgcagcttccactgcacagatggctaccaggtgaatggccccagcaagctggagtgcctggccagcggcatctggaccaacaagccaccccagtgcctggccgcccagtgcccccccctgaagatccctgagcggggcaacatgacctgcctgcacagcgccaaggccttccagcaccagagcagctgcagcttcagctgtgaggagggctttgccctggtgggccctgaggtggtgcagtgcacagccagcggcgtgtggacagccccagcccctgtgtgcaaggccatcagctgtgagcccctggagagccctgtgcacggctccatggactgcagccccagcctgcgggccttccagtatgacaccaactgcagcttccgctgtgccgagggcttcatgctgcggggagctgacatcgtgcgctgtgacaacctgggccagtggacagccccagcccctgtgtgccaggccctgcagtgccaggacctgcctgtgcccaatgaggcccgggtgaactgcagccacccctttggagccttccgctaccagagcgtgtgcagcttcacctgcaatgaaggcctgctgctggtgggcgcctctgtgctgcagtgcctggccactggaaactggaacagcgtgcccccagagtgccagggcaagagcatcgccagcctgcccaccccaggagtgcagtgcccagccctgaccaccccaggccagggcaccatgtactgccgccaccaccctggcaccttcggcttcaacaccacctgctacttcggctgcaatgccggcttcaccctgattggagacagcaccctgagctgccggcccagcggccagtggacagctgtgaccccagcctgcagagctgtgaagtgcagcgagctgcacgtgaacaagcccatcgccatgaactgcagcaacctgtggggcaacttctcctatggcagcatctgcagcttccactgcctggagggccagctgctgaatggaagtgcccagacagcctgccaggagaatggccactggagcaccaccgtgcccacctgccaggccggccccctgaccatccaggaggccctgacctactttggaggagctgtggccagcaccatcggcctcatcatgggcggcaccctgctggccctgctgaggaagcgcttccggcagaaggatgatggcaagtgccccctgaacccccacagccacctgggcacctacggcgtcttcaccaatgctgcctttgaccccagcccctag

SEQ ID NO: 266634 - DNA, 2262 bp, Artificial Sequence
  derived and/or modified sequence
gtggtgtttggcatcagccagctgctgtgcttcagcgccctgatcagcgagctgaccaaccagaaggaggtggccgcctggacctaccactacagcaccaaggcctacagctggaacatcagcaggaagtactgccagaaccgctacacagacctggtggccatccagaacaagaatgaaattgactacctgaacaaggtgctgccctactacagcagctactactggattggcatcaggaagaacaacaagacctggacctgggtgggcaccaagaaggccctgaccaatgaagctgagaactgggccgacaatgagcccaacaacaagagaaataatgaagactgtgtggagatctacatcaagagccccagcgcccctgggaagtggaatgatgagcactgcctgaagaagaagcacgccctgtgctacacagccagctgccaggacatgagctgcagcaagcagggcgagtgcctggagaccatcggcaactacacctgcagctgctacccaggcttctacggcccagaatgtgaatatgtgcgggagtgtggggagctggagctgccccagcacgtgctgatgaactgcagccaccccctgggcaacttctccttcaacagccagtgcagcttccactgcacagatggctaccaggtgaatggccccagcaagctggagtgcctggccagcggcatctggaccaacaagccaccccagtgcctggccgcccagtgcccccccctgaagatccctgagcggggcaacatgacctgcctgcacagcgccaaggccttccagcaccagagcagctgcagcttcagctgtgaggagggctttgccctggtgggccctgaggtggtgcagtgcacagccagcggcgtgtggacagccccagcccctgtgtgcaaggccatcagctgtgagcccctggagagccctgtgcacggctccatggactgcagccccagcctgcgggccttccagtatgacaccaactgcagcttccgctgtgccgagggcttcatgctgcggggagctgacatcgtgcgctgtgacaacctgggccagtggacagccccagcccctgtgtgccaggccctgcagtgccaggacctgcctgtgcccaatgaggcccgggtgaactgcagccacccctttggagccttccgctaccagagcgtgtgcagcttcacctgcaatgaaggcctgctgctggtgggcgcctctgtgctgcagtgcctggccaccggcaactggaacagcgtgcccccagagtgccaggccatcccctgcacccccctgctgagcccccagaatggcaccatgacctgtgtgcagcccctgggcagcagcagctacaagagcacctgccagttcatctgtgatgagggctacagcctgagcggccctgagcggctggactgcaccaggagcggccgctggacagacagcccccccatgtgtgaggccatcaagtgcccagagctgtttgcccctgagcagggcagcctggactgcagcgacaccagaggagagttcaacgtgggcagcacctgccacttcagctgtgacaatggcttcaagctggagggccccaacaacgtggagtgcaccaccagcggccgctggagcgccaccccacccacctgcaagggcatcgccagcctgcccaccccaggagtgcagtgcccagccctgaccaccccaggccagggcaccatgtactgccgccaccaccctggcaccttcggcttcaacaccacctgctacttcggctgcaatgccggcttcaccctcatcggggacagcaccctgagctgccggcccagcggccagtggacagctgtgaccccagcctgcagagctgtgaagtgcagcgagctgcacgtgaacaagcccatcgccatgaactgcagcaacctgtggggcaacttctcctatggcagcatctgcagcttccactgcctggagggccagctgctgaatggcagcgcccagacagcctgccaggagaatggccactggagcaccaccgtgcccacctgccaggccggccccctgaccatccaggaggccctgacctactttggaggagctgtggccagcaccatcggcctcatcatgggcggcaccctgctggccctgctgaggaagcgcttccggcagaaggatgatggaaaatgtcccctgaacccccacagccacctgggcacctatggagtcttcaccaatgctgcctttgaccccagcccctag

SEQ ID NO: 266635 - DNA, 2307 bp, Artificial Sequence
  derived and/or modified sequence
atggccaactgccagatcgccatcctgtaccagcggttccagcgggtggtgttcggaatcagtcagctgctgtgtttcagtgcactgatctctgagctgaccaaccagaaggaggtagccgcatggacctaccactacagcactaaggcgtattcctggaacatctcccggaagtactgtcaaaaccgttatacagacctcgtggctatccagaataagaatgagatcgactatttgaataaagttctgccatactatagctcttactattggattgggattaggaaaaacaataagacatggacatgggtcggcacaaaaaaagcgttgactaatgaggccgagaactgggctgacaacgaacctaataacaaacggaataacgaggactgtgtggagatctacatcaagtcccctagcgctcccggaaaatggaacgacgaacattgccttaagaagaagcacgccctgtgttacaccgctagctgccaagatatgtcatgctccaagcagggagaatgtctggaaaccatcggaaattatacctgctcttgttaccccggattttacggtccagagtgcgaatacgtcagggaatgtggagagctggagcttcctcagcatgtcctcatgaattgcagccaccctctcgggaatttctcgtttaatagccagtgctcatttcattgcactgatggctaccaggtcaatggaccctcaaagttggaatgtctggcatctgggatttggacaaataaacctccgcagtgcctggccgcccaatgcccgccactcaagattcctgagcgaggcaacatgacatgccttcattcagctaaggcattccagcaccagtcatcgtgcagtttctcatgtgaggaaggattcgccctggtgggccccgaggtcgtgcagtgcacagctagcggggtttggacggcacctgctccggtgtgcaaagccatctcttgtgagccactcgagagcccagtccatggttcaatggattgttccccgagcctgagagcgtttcaatacgatacaaattgtagctttcgctgcgccgaggggtttatgctaaggggggccgacatagtgaggtgcgataatctcggtcagtggaccgcccctgcgcctgtttgtcaggcattgcagtgtcaggacctgccagtgcctaacgaggccagggtgaattgctcccatccatttggagccttcagataccagtccgtgtgcagctttacttgtaatgaagggcttctgttggtcggcgcttcagtactacaatgcttagccaccggaaactggaactccgtgccccccgagtgccaggccatcccatgcacaccactgctaagcccgcagaacggaacaatgacatgcgtgcaaccgttgggaagtagctcatacaaatctacttgccagttcatttgtgatgaggggtacagcctcagtgggcctgagaggcttgactgcactaggtccggacgttggacagattctcctcctatgtgtgaggccatcaaatgtcctgagctgtttgcgcctgagcaagggtccctggactgttcagacactagaggggaattcaatgtgggctctacctgtcacttcagctgcgacaatggttttaaactggaaggccccaataatgtcgagtgcacgaccagcggccgctggagcgctactcctcccacttgcaagggtatcgcatctctgccaacaccaggtgttcagtgcccagccctcacaactcctggccagggaaccatgtattgcaggcatcatcccggcacattcggcttcaatactacttgttacttcggctgcaatgccggttttacacttatcggagatagtaccctgagctgtcgtccttccggccagtggacagcagtcactcctgcatgtcgagcagtaaaatgtagcgagctgcacgttaataagcccatagcgatgaattgtagcaacctgtggggaaacttttcctatggcagcatctgcagctttcactgtctcgaggggcagttgttgaatggcagcgcgcagactgcatgccaggagaacggacactggtctactacagtcccaacctgtcaggctggccctctcacgattcaggaggccctgacttacttcggcggtgccgtggcctccacaattggactgatcatggggggaactctgttggccttactccgcaagaggttcagacaaaaagacgacggaaagtgccctctgaacccccacagccacctggggacatatggtgtgttcaccaatgctgccttcgatcccagtccatag

SEQ ID NO: 266636 - DNA, 2307 bp, Artificial Sequence
  derived and/or modified sequence
atggccaactgccagatcgccatcctgtaccagcggttccagcgggtcgtcttcggtataagccaacttctctgcttcagtgccttgatttcagagcttactaaccagaaggaagtcgccgcttggacttatcactactcaaccaaggcatacagctggaatatcagccgaaaatattgccagaaccggtataccgatctcgtggcgattcaaaataagaacgaaatcgactatttgaacaaagtgcttccgtactatagttcgtattattggattggcatcaggaagaataataaaacttggacgtgggttggaactaaaaaagccttgacgaatgaggcagaaaactgggctgataatgagcccaataacaaacggaataacgaagattgcgtggagatttatatcaaatccccttcagcacccggaaagtggaacgatgagcattgcctcaaaaaaaagcatgccctttgctatactgcttcctgtcaggatatgtcctgtagcaaacagggcgagtgcttagagactatcggtaactacacttgcagctgttaccccggcttctacgggcctgaatgcgagtacgtgcgtgaatgcggggagctggaactgccccagcatgttctgatgaactgctcacaccctctgggaaacttctctttcaactcgcagtgtagctttcactgcactgacggttaccaggttaacggcccgagtaagctagaatgtctagcctctggaatctggacgaacaagcctccacagtgcctcgcagtacagtgccaacaccttgaagctccatccgagggcacaatggactgtgtgcacccattgaccgcgttcgcctatgggtccagctgcaaatttgaatgtcagcccgggtatagggtaaggggcctggacatgcttcggtgcattgattctgggcattggtcggccccactgcctacctgcgaggcaatatcttgcgagcccttggagagcccagtccatggttcaatggactgctctccttctctgagagctttccagtacgataccaactgtagttttaggtgtgccgaagggtttatgttgcggggagccgacatagtcaggtgcgataatctggggcaatggacagctccagccccagtgtgccaggccctgcagtgccaggacctcccggtccctaacgaagctcgggttaactgttctcatcctttcggcgcgtttcggtaccagtctgtttgttcatttacctgcaatgagggactactgttggtcggagcgtccgtacttcagtgcctggcaacggggaattggaacagtgtgccccctgaatgtcaagcaattccctgcactcctctgctatctcctcaaaatggaacaatgacttgcgtgcaacccctgggaagttcaagttacaagtccacctgtcagtttatctgtgacgaaggatactctctctctggccccgaaaggctggactgcactcgttccgggaggtggaccgatagcccaccaatgtgcgaagccattaaatgcccagagctctttgccccagagcaagggtctttagattgctccgatacacggggggaattcaatgtgggatccacctgccatttttcatgtgacaacggattcaagttagaaggccctaataacgtggagtgcaccacaagtggacgctggagtgctacacccccgacatgcaagggtattgcgtctttgccaacccctggcgtgcagtgccccgctttaactacacctggacagggcacaatgtattgtaggcatcaccccggaacattcgggtttaacaccacctgttactttggatgtaacgccggctttacccttatcggtgattccacattgagctgtcggccatccggacagtggaccgcagttacacccgcgtgcagagccgtcaagtgctctgagttacatgtgaataagcctatcgcaatgaattgcagtaatttatggggcaacttctcttatggcagcatttgttccttccactgccttgaaggccagcttctgaacggttcagcccagactgcttgccaggagaacggtcactggtccacaaccgtgccgacctgccaggccgggcccctgaccattcaagaagcactgacgtactttgggggcgcagtcgctagcacaataggactgataatggggggaaccttgctagccctgctcagaaagcgatttagacagaaagatgacggaaaatgccctctgaatccccacagccacctgggcacatacggcgtttttacaaacgcggcatttgacccatccccttag

SEQ ID NO: 266637 - DNA, 1941 bp, Artificial Sequence
  derived and/or modified sequence
atggccaactgccagatcgccatcctgtaccagcggttccagcgggttgtatttggcatttcccaactcctgtgcttctccgccctcatttctgagctgactaaccagaaagaagttgctgcatggacataccactattccaccaaggcctacagctggaacatctctcgtaaatattgtcagaacagatatacagatctggtcgccattcagaacaagaatgaaatcgactacctcaacaaggtcttaccgtattactctagctactactggattgggatcagaaagaacaataaaacttggacatgggtcgggactaaaaaagctctgactaatgaagcagaaaattgggcagataatgaacccaataacaaacgcaacaatgaagattgtgtggaaatctatatcaagagtccatccgctcccggcaagtggaacgacgagcattgcctgaagaaaaagcatgccctgtgttacacggcatcatgccaggatatgtcttgtagcaaacagggggagtgcttagaaaccattggcaactacacatgctcctgttaccctggcttttacgggcctgagtgtgaatacgtgcgtgaatgtggcgagctggagctgcctcagcacgttctgatgaattgcagccaccctttgggcaatttttcttttaacagccagtgcagttttcactgcacagatggctatcaggttaatggacccagcaagcttgagtgtttagcctcagggatttggacaaacaagcctccccagtgcctagcagcccagtgtccccctctgaaaatccctgaaagggggaacatgacatgtctgcactcagcgaaagccttccaacaccagtcaagttgctcattcagctgcgaagaaggattcgccctggtggggcccgaggtggttcagtgtacagcaagcggtgtgtggaccgcgcccgcccccgtatgcaaagcgatcagctgtgagccactggaatcccctgtccatggaagtatggattgttcaccaagcctacgcgccttccagtacgacactaattgctcttttagatgcgcagaagggttcatgttgcggggcgccgatatcgtccggtgtgataatctcggacagtggacagcgcctgcaccagtgtgtcaggccctgcagtgccaggacttgcctgttcccaacgaagctcgggtaaactgttcccatccattcggcgcgtttcggtaccaatcagtttgcagcttcacctgcaatgagggactcctgctcgtcggtgcttccgtcctgcaatgtctcgcaactggaaattggaactccgtgcctcctgaatgccagggtaagagcattgctagtctgccaacgcctggtgtgcagtgcccagccctcacaacccccggccaaggaactatgtattgtcggcaccacccgggtacattcggcttcaataccacctgctactttggctgcaacgccggtttcacccttatcggagacagcactctgtcctgccggcctagtgggcagtggaccgccgtgactccagcttgcagggccgtcaagtgctcagagctgcacgtaaataagcccattgccatgaattgctccaatctgtggggcaacttttcctatggtagcatttgctcatttcactgcctagagggccagctgcttaatggttctgctcagacagcttgtcaagaaaacggccactggtctacgacggtcccaacgtgtcaggccggacccttgactatccaggaagcattaacctatttcggaggggccgttgctagcactataggtctgattatggggggaactctactggcactcctcaggaagaggtttcggcagaaggatgacggaaagtgccccctcaacccgcacagtcacctcggcacatatggcgtgtttactaatgctgcatttgatcccagcccctag

SEQ ID NO: 266638 - DNA, 1941 bp, Artificial Sequence
  derived and/or modified sequence
atggccaactgccagatcgccatcctgtaccagcggttccagcgggtggtgttcggcatatctcaactcttatgcttttctgcactcatctctgaattgactaatcaaaaagaagtggctgcttggacataccattattccaccaaggcctacagctggaatatatctcggaaatactgccagaatcgctacactgacctggtggctattcagaacaaaaacgagatcgattaccttaataaggtattaccctactactcttcatactattggataggtatccggaaaaataacaagacatggacatgggttgggaccaagaaggccttaaccaatgaggccgagaactgggctgacaacgaaccgaacaacaaacgcaacaacgaagactgcgtggagatctatatcaagtctcctagtgctcccggaaagtggaacgacgaacattgtctcaagaagaaacacgccctatgctatacagcatcatgtcaggacatgtcctgcagtaagcagggcgaatgtcttgagacaattggcaattacacctgctcatgctaccccggattttacggccccgaatgtgaatacgtgagagaatgcggcgagctcgagctgcctcagcacgtgctgatgaactgcagccaccccctcggtaacttctccttcaattctcagtgcagcttccactgtaccgacgggtaccaggttaatggaccctctaaactggagtgtctagcttccggcatctggaccaataaacctccacagtgcctagcagcccagtgtcctcctttaaagatcccagaacggggtaacatgacatgcctgcacagtgccaaagctttccagcaccagtcgagttgctccttctcctgtgaggagggctttgctctggtcggccccgaggtcgtgcaatgcaccgccagcggggtgtggacggcgcccgccccagtttgcaaagccatatcctgtgagccgctggagtccccagttcacggctcgatggattgtagcccaagcctgagagctttccagtacgacacaaactgctctttccgatgtgcagaaggatttatgctcagaggggccgatattgtgagatgcgacaacctgggacagtggacagcgccagcacccgtttgtcaagccttgcagtgccaggacctgccagtgcctaatgaagcaagggttaactgctcacacccttttggcgccttccgctatcaatctgtgtgctcatttacctgcaatgaaggcttgctgcttgtcggggctagcgttctccagtgcctcgctaccggtaattggaacagcgtccctccagaatgccaagggaagtccattgcctctctgcccactcccggcgtgcagtgcccagccctaaccacaccaggacaaggcactatgtattgccgccatcatccgggtacattcggtttcaatactacctgctatttcgggtgtaacgctggattcacgctgataggcgattccactctgtcttgccgcccttctggtcaatggacggcagtgaccccagcttgtcgtgcggtcaaatgtagtgagctacatgtcaacaagcccattgcgatgaactgtagcaacttgtggggaaacttctcatacggttcaatctgttcctttcattgtttggaaggtcagctcttaaatgggtctgctcagaccgcctgtcaggagaatggtcactggtcaactactgttcccacctgccaggccgggccactgacgattcaggaagccttgacatacttcgggggtgcagttgcttccaccatcgggcttattatggggggtacactgctggcacttttgcgcaaaagattccgtcaaaaggacgatggaaagtgccccctgaacccacattcccacctgggcacttacggcgtgtttactaacgcagcatttgacccaagtccatag

SEQ ID NO: 266639 - DNA, 2307 bp, Artificial Sequence
  derived and/or modified sequence
atggccaactgccagatcgccatcctgtaccagcggttccagcgggttgtgttcggaatctctcaactgctttgcttcagcgccttaataagcgaattgaccaaccaaaaagaggtcgctgcctggacataccattattccaccaaagcctacagctggaacatttccaggaaatactgccagaataggtatacagacctcgtggctatccaaaataaaaacgaaattgactacctgaataaggtgctgccatactactcttcttactattggatcgggattaggaagaataataaaacttggacttgggtgggaaccaagaaagccctcactaacgaggcagagaattgggcggataacgagcccaacaataaacgcaacaacgaggattgcgtagaaatttatataaagtccccctccgcaccaggcaaatggaatgatgagcactgtctgaagaaaaaacacgctctctgttacacggcctcgtgtcaggacatgagctgttcgaagcagggcgagtgccttgagactataggtaactacacctgtagttgctatccaggattttacgggcccgagtgcgagtacgtgagggaatgcggcgaactggagctgccccagcacgttcttatgaattgtagtcatccccttggtaacttcagcttcaattcacagtgttctttccattgcacggacgggtatcaggtcaacgggcccagtaagctggagtgtctggctagcggcatttggaccaacaagcctccacaatgtttggccgttcagtgtcaacatctcgaggccccaagcgaggggacaatggattgtgtgcacccacttacagcttttgcatatggaagttcgtgtaaatttgaatgccagcccggctatcgcgtccggggcctggatatgctgcgttgcatagactctggccactggtctgcgccactgcccacatgcgaggcgataagttgtgagccgctggaaagccccgtgcacggaagtatggactgtagtccaagcctacgcgcttttcagtatgacacaaactgttcctttaggtgtgcggagggttttatgttgaggggcgctgacattgttagatgtgacaacctcgggcaatggacagcccccgcgccggtttgccaagcactccagtgtcaggatctcccagtcccgaatgaagcgagggtcaactgttcccatccatttggggcttttcgttaccaatccgtgtgcagtttcacatgtaacgaaggtttgctcctggtgggcgcctcagtgctccagtgcttggccacaggcaactggaacagcgttccacccgaatgccaggccatcccctgtacaccgcttctgagccctcagaatggcaccatgacatgtgtccagccactgggctcatcgagctacaagtccacgtgtcaattcatctgcgatgaagggtattctttgagcggacctgagaggctggactgtacaaggagcggtcgctggaccgattccccaccgatgtgcgaagcaatcaaatgtcccgaactatttgcacccgagcaggggagcctagattgtagcgataccagaggggaattcaacgtggggtcaacttgccacttcagttgcgataacggtttcaagcttgagggaccgaacaatgtagagtgcacaactagcggaaggtggtctgcgactcctcctacttgcaaaggaattgcttcactccctactcctggcgtacagtgcccggctctcacgacccccgggcagggcacgatgtattgtaggcatcacccagggacttttgggtttaatacgacatgctactttggctgcaacgcgggctttaccctaatcggcgatagtaccctgtcctgccgacccagcgggcagtggacagctgtgacaccagcctgtcgtgccgtaaaatgcagcgaactgcatgtaaataagccaatcgctatgaattgcagcaatctctggggcaatttcagttacggtagtatatgttccttccattgcctggaggggcagttgcttaacggctccgcccaaacagcttgccaggaaaatggtcactggagcaccactgtgcccacgtgccaggctggccccctgaccattcaggaggccttaacatacttcggtggggccgtggcctcaacaattggactcattatgggaggaacactgttagccctcctgaggaaacgctttaggcagaaggacgatggcaagtgccccctgaacccacactcacacctgggtacctacggggtcttcactaatgctgccttcgatccctccccttag

SEQ ID NO: 266640 - DNA, 2307 bp, Artificial Sequence
  derived and/or modified sequence
atggccaactgccagatcgccatcctgtaccagcggttccagcgggtggtgttcggaatttcccagctcctgtgcttttctgcactaatcagtgaattgacaaatcagaaagaggttgcagcttggacctaccactacagcaccaaagcatattcctggaacatcagtagaaaatattgccagaatcgctacaccgacctggttgccatacagaataagaatgaaattgactacctgaacaaagttctgccttactattctagctactactggatcgggatacgcaaaaacaacaagacctggacatgggtgggcacaaaaaaggcactaaccaatgaagccgagaattgggccgacaacgagcctaacaataaaagaaacaacgaagattgtgtagaaatctatataaagtcccctagtgcacccggcaagtggaatgacgaacattgtctgaagaaaaaacatgctctttgttacactgcgtcgtgtcaggatatgagctgttccaaacagggagaatgtctagagactatcgggaactacacctgttcatgttacccaggcttctatggaccagagtgcgaatatgtaagagaatgtggagagttggaactgccacagcatgttttgatgaattgctcacatccacttggtaatttctcatttaatagtcagtgcagctttcactgcactgacggataccaagtaaatgggccatcaaagctggagtgcctcgcatccgggatatggactaacaagcctccccaatgtctggctgcgcagtgcccaccgctgaagatacccgaaagggggaatatgacctgtctccacagcgccaaggcctttcaacaccagtcaagctgttccttcagttgtgaagaaggattcgcgctagtgggacccgaggtggttcagtgtacagcctctggagtttggaccgcacccgcgccagtgtgcaaagcgatctcttgtgaaccactggaaagcccggtgcacggaagcatggactgcagcccaagcttgcgcgcctttcaatacgacacgaactgtagctttcgatgcgcggagggctttatgttgcgtggagccgatatcgtacggtgcgataacctcggccagtggaccgctcctgcccccgtttgccaagccctccagtgtcaggacctcccagtccccaatgaggcgcgggtgaattgctctcacccctttggcgcattccggtaccaatcagtgtgcagtttcacgtgtaacgagggcttactgctagtcggcgctagtgttctgcagtgtctcgctaccggtaactggaacagcgtccctcctgagtgccaggccataccgtgcactccgcttttaagcccccagaatgggactatgacctgcgtacaacctttaggctccagttcatataagtcaacctgtcagtttatctgcgatgagggatactccctttcaggaccagaaaggctggattgcacaaggtctggaaggtggactgactcgcctccaatgtgtgaggctataaaatgccctgaactgttcgctccagagcagggctctttggactgcagcgatacacgaggagaattcaacgttgggagcacttgtcatttcagttgcgacaacgggtttaaattagaaggaccaaataatgtggagtgtaccacgtccggacggtggagtgccacacctcctacttgcaaaggcatcgccagcttacctactccaggggtccagtgtccagctctcaccacaccggggcagggcactatgtactgccgtcatcacccaggcacattcggtttcaatacaacttgttacttcggttgcaacgcggggtttaccctcatcggcgactccacgctgtcttgccggccttcaggccagtggaccgcagtgaccccagcatgccgcgctgtaaagtgttccgaacttcacgtcaacaagccaatcgccatgaactgcagtaatctgtgggggaacttttcttatggctccatctgctctttccattgcctcgaggggcagcttctgaatggatccgcccaaacggcctgccaggagaacggacattggagcacaaccgtgcccacatgccaagcgggccctctgactattcaggaggctctgacctatttcggcggcgctgtagcttcgaccatcggcttgattatgggaggaaccttactggcactgctcaggaaaagatttaggcagaaggacgatggtaagtgccctctgaatccccattctcacttgggcacatacggcgtgtttaccaatgctgccttcgatccctctccgtag

SEQ ID NO: 266641 - DNA, 1941 bp, Artificial Sequence
  derived and/or modified sequence
tgagccaactgccagatcgccatcctgtaccagcggttccagcgggttgtatttggcatttctcaacttctctgcttcagtgcactcatctctgagctgacaaatcaaaaagaggtggcagcctggacctatcactacagcacaaaggcttattcgtggaacattagccgcaagtactgtcagaatagatacaccgacctggtggctatccaaaacaagaatgagatagactacctcaacaaagttctgccttattactcttcatactactggatcggtattcgtaagaacaacaagacatggacctgggtggggacaaagaaagctcttactaatgaagccgaaaattgggccgataacgaacccaataacaaaaggaataacgaggactgcgtggagatatacatcaagtccccatccgcacccggaaaatggaatgacgagcattgcttgaaaaagaagcatgcactctgttatacagcctcttgccaggatatgtcatgctctaagcagggagaatgtctggaaaccattggcaattacacgtgctcttgctacccagggttttatggtcccgaatgtgagtacgttcgagagtgcggcgagctggaattgccacagcacgtgctgatgaattgtagtcacccgctcgggaatttctccttcaacagccagtgttcgttccactgcactgatggatatcaggttaatggtccttccaaactggagtgccttgcctccggcatttggaccaacaagccacctcagtgcctggcagctcagtgcccaccacttaagatacctgagcggggaaatatgacgtgtctgcattctgctaaggcgtttcagcaccagagttcctgttcgtttagttgcgaagaggggttcgctttggtggggccggaagttgtacagtgcaccgcgagcggcgtctggaccgcacccgctcccgtttgtaaagccatctcctgcgaacctctggagagcccagtccatggatccatggactgttcaccatcactgagagcctttcagtacgacactaactgcagctttagatgtgctgagggatttatgctgagaggggctgacattgtgcgatgtgacaacctggggcaatggactgcccccgcgcccgtgtgtcaggccctccagtgtcaggacttgccagttccaaatgaggctcgtgtgaactgcagccacccatttggagcgtttcgctatcagtcagtctgttctttcacgtgcaatgaaggccttcttctggtgggggcttctgtgttacagtgcttagcaacaggcaattggaactctgtgcctcccgagtgccagggtaagagcatcgcctcactgccaacccccggggtgcagtgtcctgccctgaccacccccggccagggaaccatgtattgccggcatcatcctggaacctttggtttcaacaccacgtgttacttcggatgcaacgccggattcacacttataggagactccacattgagctgtcgaccctccggccaatggactgccgtgacccccgcatgtagggccgtcaagtgctccgaactccatgtcaataagccaattgcgatgaactgcagcaacttatgggggaacttttcttatgggtccatctgtagtttccattgcctcgagggccagttgctgaacggctctgctcagaccgcgtgtcaggaaaatggccactggtccactaccgtccccacttgtcaggccggccccctgaccattcaagaggctctgacatactttggcggcgccgtggcatcaacaatcggattgatcatgggcggtaccctcctggcgcttctgcgaaagcgctttcgccagaaagatgacggaaaatgtcctcttaacccccattcccaccttggaacgtatggcgtgttcacaaacgcggcctttgatccttccccttag

SEQ ID NO: 266642 - DNA, 2262 bp, Artificial Sequence
  derived and/or modified sequence
gtggtgttcggcatcagccagctgctgtgcttcagcgccctgatctctgagctgaccaatcaaaaagaagtggcagcgtggacctaccactacagtaccaaagcctacagttggaatatctcacggaagtactgtcagaataggtatacggatctggtggctatacagaataaaaatgagatagattaccttaataaagtactgccatattactcctcttactattggattgggattagaaagaacaacaagacttggacttgggtgggcaccaaaaaagccctcacaaacgaagccgagaactgggccgacaatgaacccaataataagagaaataatgaagattgtgttgagatctatattaaaagcccctctgccccaggaaagtggaacgatgagcactgcttgaaaaaaaaacacgccttgtgttacaccgcgagttgtcaggatatgtcctgctctaagcagggcgaatgtctggagacgattggaaattacacgtgcagttgctatccaggcttctatggtcctgaatgcgaatacgtgcgagaatgtggcgaactggagcttcctcaacatgtcctgatgaactgttcgcaccctctcggcaacttttcctttaatagtcaatgctcctttcattgtactgatggatatcaagtcaatgggcccagcaagttggagtgcctggcttctggaatctggaccaacaaacccccccagtgtcttgccgcacagtgtccccctttaaaaatccctgaacggggcaacatgacatgtcttcatagtgctaaagcttttcagcaccagagcagctgttctttttcctgcgaagaagggttcgcccttgtcggtcctgaagttgtacagtgtactgctagcggagtctggacagctccagctccagtgtgtaaggccatctcatgtgagcctctggaaagccccgtgcatgggtccatggattgttcccctagcctccgagcattccaatatgacaccaactgctctttccggtgcgcagagggtttcatgctgcgtggggcagatatcgtacgatgtgataatctggggcagtggacggcccccgctccagtctgtcaggcacttcagtgtcaggatctccccgtcccaaatgaggcacgcgtcaattgcagtcatccatttggagcatttcggtatcagtccgtgtgttctttcacatgtaacgaaggcctcttacttgtcggtgcatccgtgctccagtgcctggcaacagggaattggaattctgtgcctccagagtgccaggccattccctgtaccccacttctaagcccccagaacggcacaatgacatgcgtgcagcccctgggctcaagtagttacaaatctacctgtcagtttatttgcgatgaaggatactctctctcaggcccggagagactggattgcacgcggtcaggtcgatggacggatagcccgcctatgtgcgaggctataaagtgcccagaactgtttgcacccgaacaagggagcttagactgctccgatacaaggggcgaatttaacgtcggctcgacttgccatttctcatgcgataacggctttaaactggagggcccgaataatgtggaatgcacaacctctggaagatggagcgctacaccccccacctgtaagggcattgctagtttgcccactccaggcgtgcagtgccccgcactgactactcctggacaggggactatgtattgccgccaccaccccgggaccttcggttttaatactacatgctacttcggatgcaacgctgggttcacactcatcggagacagcacgcttagctgccgcccttcaggacagtggaccgcagtgacaccagcttgccgtgctgtcaagtgcagcgaattgcacgtgaacaagcccatcgcaatgaattgctccaatctttggggcaatttctcttacggttcgatctgctctttccattgtctcgagggccaactcctcaacggcagcgcacaaaccgcttgtcaggaaaacggccactggagtactaccgtgcccacttgccaggcgggacccctcactatccaggaggcgctaacttattttggaggggccgttgcctccaccattgggctgattatggggggcacacttctcgccttactgcgcaaacgttttcgccagaaggacgatggcaagtgccccctgaaccctcacagccatttggggacttatggggtcttcacaaacgcagcgttcgacccaagcccctag

SEQ ID NO: 266643 - DNA, 141 bp, Artificial Sequence
  derived and/or modified sequence
atgctgtcacggaacgatgatatttgtatttacgggggactggggctcgggggtttactgctcctggctgtcgtgctgttaagtgcttgcctgtgctggctccacagaagagaacattgtctggctctggaaccgctgtag

SEQ ID NO: 266644 - DNA, 2307 bp, Artificial Sequence
  derived and/or modified sequence
atggccaattgccagattgccatcctctatcaaagatttcaacgtgtggtctttgggatcagccagcttctatgctttagcgctctgatttccgaactgactaaccagaaagaagtggccgcatggacgtatcactacagtacgaaagcgtatagttggaacatcagtagaaaatattgccaaaacaggtacacggacttagtcgctattcaaaataaaaatgaaatcgattatctgaacaaggtcttgccttactattcatcttactactggattggcattaggaaaaacaacaagacctggacttgggttggtacaaagaaggcactgaccaacgaagcggagaattgggcagataacgagccaaataacaagcggaacaacgaagactgcgtggagatctatattaaaagccccagtgcccctgggaaatggaacgatgagcactgccttaagaagaaacacgccttatgttacacagccagctgccaagacatgagctgctcaaaacagggcgaatgtcttgaaacgatagggaactatacttgttcttgctatcctggattttatggaccagagtgtgaatatgtgagagagtgtggggagttggagttaccacagcatgtactgatgaactgttctcacccattaggaaacttctccttcaactctcagtgttcctttcactgcaccgatggctaccaggttaatggccctagtaagttggagtgtctggcaagcggaatctggactaacaagcctccccagtgcctggcagctcagtgcccgcctctcaaaatccccgaaagaggtaacatgacatgcctgcactcagccaaggccttccagcaccagagcagctgttcattcagctgcgaagaaggttttgccttggtagggccagaggtggtgcaatgtacagcatcaggcgtgtggacagctcctgccccagtgtgtaaggccatatcatgcgaacccctcgaaagcccagttcatggaagcatggattgtagcccatctctaagggccttccagtatgacacaaactgctccttcagatgcgcggaaggattcatgttacgcggagcagatatcgtcagatgtgacaaccttggccagtggactgcacctgctcccgtttgtcaggcgctacagtgtcaggacttgcctgttccaaatgaagccagggtgaactgctcccaccctttcggcgcattcaggtaccagagcgtatgcagcttcacatgcaacgagggtctgctcttagtgggagcctctgttctgcagtgcctggcgactggcaactggaacagtgtgccccctgagtgccaggccatcccatgcactcccctcctgtccccacagaatggcaccatgacctgcgttcagcccctgggatcttctagttataaaagcacttgccagttcatctgcgacgaggggtattccctctccggaccagaacgcctcgattgtacccggtcaggtcgctggactgatagcccacccatgtgcgaagcaatcaagtgcccagagttgttcgcaccggagcagggttcactggattgttccgataccagaggagaattcaacgtcgggagcacttgccactttagttgcgacaatggctttaagctggaagggccaaacaatgtggaatgcactacaagcgggaggtggtcagccacccccccaacctgcaaaggtatcgcctctctccctaccccgggagtgcaatgtcccgctctcacaaccccaggccagggcactatgtattgcaggcatcatcctggcacctttggttttaacacaacatgttatttcggctgtaatgcaggttttacacttataggggactcaacgctgtcatgccgaccttccggtcagtggaccgcagtaacaccagcctgccgagctgtcaaatgctctgagctgcatgtcaacaaaccaatagctatgaattgcagtaatctgtggggcaatttctcatacggatccatatgtagctttcattgtctggagggccagttgctcaacggctcggcccaaaccgcgtgtcaggagaatgggcactggagcactaccgtacccacctgccaggccggacccttgactatccaggaagcactgacatactttggtggagctgtggcttcaaccattggactgatcatgggaggcaccctcctcgcgcttctaagaaaacgtttccggcagaaagatgatggaaagtgcccactgaatccccattcccacctgggcacctatggcgtgttcacaaacgccgcattcgatccctctccttag

SEQ ID NO: 266645 - DNA, 2307 bp, Artificial Sequence
  derived and/or modified sequence
atggctaactgtcaaatcgctattctctatcaacgattccagagggtagtgtttgggatttcacagcttctgtgctttagcgccctgatcagcgagctgacaaatcagaaagaagtggccgcatggacgtaccactactctaccaaggcgtactcctggaacatctcccggaaatactgtcagaacagatacacagacctggtcgccatccagaacaagaacgagatcgactatctgaacaaggttctcccatactactcttcctactactggatagggatccgcaaaaataataagacttggacttgggtgggcacgaagaaggcacttaccaacgaggccgagaattgggccgataacgagcctaataataagaggaacaatgaggattgtgtcgaaatctatataaagtcaccttctgcccctggcaagtggaacgacgaacactgcctgaaaaagaagcacgcactatgttacaccgcttcctgccaagatatgtcatgctcaaaacagggcgagtgcctggaaacgatcggaaattatacttgtagctgctatcctgggttttacgggccagaatgcgagtacgtccgagagtgcggagaactagaattgccccaacatgttcttatgaactgcagccaccctctgggcaacttttctttcaacagccagtgcagttttcattgcactgacggctatcaggtgaacggcccttctaagcttgagtgcctcgcttccggaatctggacaaataaaccgccacagtgtctggcagtgcagtgccagcacctcgaggcaccctctgaaggcactatggattgtgttcatccgctgacagcctttgcctacggatcatcatgtaagtttgaatgccagcctgggtacagggttcgaggtcttgacatgttgcgatgtattgattctgggcactggtctgctcccttgcccacctgcgaggccatctcatgcgagcctctggaatctcccgtgcacggaagtatggactgctcaccgtccttacgtgcctttcagtatgacacaaattgctccttccgttgcgcagaagggtttatgttgagaggagcagatattgttaggtgcgataatttggggcaatggacagcccctgctccagtgtgccaggcattgcagtgccaagatctgcctgtgccaaatgaggccagggtgaattgctcccacccttttggggcttttcgttaccagagcgtgtgctccttcacgtgcaacgagggtctcttgctcgttggagcaagtgtgctgcagtgcttagccaccggaaattggaactctgtccctcccgaatgtcaggctattccctgcacaccactgctgtccccacagaatggaacgatgacatgcgtgcagcctctgggcagtagcagttacaagtctacctgtcagtttatctgcgatgagggttattctctgtcaggtcccgagcggctggattgcacaaggagcggccgatggacagatagtccacccatgtgcgaggcgatcaagtgtcctgagctctttgcccctgagcagggttctctggactgctcagatactaggggcgagttcaatgttggcagtacatgtcactttagctgcgataacggtttcaagttagaaggtccaaacaacgtagaatgtactaccagcgggagatggagtgccactcctcccacatgtaaaggcatcgcaagcctaccaaccccaggagttcagtgccccgctctcactacgccagggcaaggcacaatgtactgtaggcatcacccaggtaccttcgggtttaataccacatgttacttcggctgcaatgctggcttcactctgattggagactcaacactgagttgtcgtcccagcgggcaatggaccgctgtcactcccgcttgcagagccgtgaaatgctctgagctgcatgtcaacaagcccatagcaatgaactgtagtaatctctggggcaatttttcttacggctcgatctgttcgtttcattgccttgaggggcagctcttgaacggaagcgcccagaccgcctgccaagaaaatgggcactggtcaaccacggtgcccacttgtcaggccggtccgctaaccatccaggaagccttgacctactttgggggtgcagtggccagcaccatcggcctgatcatggggggtaccttgttagcacttctgagaaagcggttccggcagaaagacgacggcaaatgccccctcaacccacactctcacctcggaacatatggggtattcacgaatgcagccttcgatccttccccttag

SEQ ID NO: 266646 - DNA, 1941 bp, Artificial Sequence
  derived and/or modified sequence
atggctaattgccaaatcgccattctgtatcagcggttccagcgagttgtttttgggatcagccagttactctgtttttccgccctgatatctgagctcaccaaccaaaaagaggtggctgcctggacatatcactattcaactaaggcatactcctggaacatcagccgcaagtactgccaaaatagatacacagaccttgtggccatccaaaataagaacgaaatcgactacctcaacaaggtgctcccctattattcctcttactattggattggtattcggaaaaacaataagacatggacatgggtgggcacaaagaaagccctaactaatgaagcagagaattgggccgataatgagccaaataataagcgcaacaacgaagactgcgtggagatctatatcaagtctccctctgcaccgggaaagtggaacgatgagcattgccttaaaaaaaaacacgcgctgtgttatacggcctcatgtcaggatatgtcttgcagtaagcagggagagtgcctggagacaatcggaaactatacttgttcttgttacccaggcttctacggcccagaatgcgagtacgtcagagagtgtggagaacttgaactaccacagcatgtgttgatgaactgctcgcaccctttaggaaatttttccttcaattcccagtgctcatttcattgtacagacgggtaccaggtgaacggaccatctaagctcgaatgccttgcaagcgggatatggactaataaaccgccacaatgcctggctgctcaatgtccacccctcaaaatcccagaaagggggaacatgacatgtctgcatagtgccaaggcgttccagcaccagtcttcctgcagcttctcttgtgaggaaggctttgctctggtggggccagaagtcgtgcagtgtaccgcgagcggtgtctggactgctcccgctcccgtgtgtaaggcaatctcgtgcgagccactcgagagccccgtccacgggagcatggattgttctccttctttgcgagcatttcaatatgacacaaattgcagttttagatgcgccgagggttttatgctgaggggtgccgacatcgtgcgctgtgataacctggggcaatggacagccccagctcctgtctgccaggctctgcagtgtcaggacctgcctgtgcctaacgaggcccgagtgaattgcagccatcccttcggtgcgtttcgatatcagagcgtgtgctctttcacctgcaacgaaggtttactcctcgtcggggcttctgttctgcaatgtctggctaccggtaactggaacagcgtgcctccagagtgtcaggggaaatctattgcttctttgcctacacctggggtccagtgtccggctctgacaacacctgggcagggcacaatgtactgtagacatcaccctggaacgttcggatttaacaccacctgctattttggatgcaacgccggatttactctcatcggtgactcgaccctgagctgtagaccttccggccagtggaccgccgtcacccccgcttgcagggcagttaaatgttctgagctccacgtgaataaaccgatcgctatgaattgctcgaatctgtgggggaatttcagttacggatctatttgttcatttcactgcctagagggccagctgctcaatggtagcgcccaaactgcctgtcaggaaaacggacactggtcaaccactgtgccaacatgccaggcaggtccactgacaattcaggaagctttgacctactttggcggagcagtcgcttcaacaattgggttaatcatggggggtaccctgcttgcacttttgcgtaagcggtttcggcaaaaagacgatggcaaatgccccctgaatcctcatagccaccttggaacctacggagtgtttactaacgcagctttcgacccatctccgtag

SEQ ID NO: 266647 - DNA, 1941 bp, Artificial Sequence
  derived and/or modified sequence
atggctaattgtcagatcgctattttataccaacggtttcagcgagttgtgttcggaatctcacagctgctttgttttagtgccctgatttcagaactgaccaaccagaaggaggtggctgcatggacgtaccattatagtaccaaggcctactcttggaacatctcacggaagtactgtcaaaaccgctacacagacctcgtggcaatccagaataagaacgaaattgactatttaaacaaagttcttccatactacagctcctattactggattggaatcagaaagaacaataaaacttggacctgggtgggcacgaagaaggccctcaccaacgaggcggagaattgggctgacaacgagcccaacaacaaacgcaataatgaggattgcgtggagatatacataaagagcccatctgctccaggtaagtggaacgacgagcattgtttgaaaaagaaacacgctctttgctacacagccagctgccaggatatgagctgctctaaacaaggggagtgtctggagaccattggcaactatacttgctcttgctacccgggtttctatgggcctgaatgtgaatacgtaagagaatgcggcgagttagagctgccacagcacgtgttgatgaactgttcccatccactcgggaatttttcattcaatagtcagtgttcttttcattgtactgacggctaccaggtaaacggaccctctaagctggaatgccttgcgagtggtatttggacgaataagccgccacagtgtcttgcagcccagtgccctccactgaaaataccggagcgcggaaatatgacgtgcctgcattccgcaaaagcctttcaacaccagtcctcctgcagctttagctgcgaggaaggatttgcactggtggggcctgaagttgttcagtgtacagcctccggagtctggactgccccagctcccgtgtgcaaggccatctcctgtgaacctctggagagccccgtgcacggtagcatggactgctctccctcattgagagcctttcagtacgataccaattgcagtttccgatgtgccgagggcttcatgctgcggggagcagacatagtacgttgcgacaatcttggacagtggactgcccctgcccctgtttgtcaggccctgcagtgccaagacctgccagtcccaaacgaagctcgcgtgaactgttcccacccttttggggctttccgctatcaaagcgtgtgctcattcacgtgcaatgagggcttgcttctggtgggagcatctgtgctccaatgcctggctacaggcaactggaattccgtccctccggaatgccagggaaaatcgattgcatccctgcctacacccggtgtgcagtgcccagcgcttaccacgcccggacaggggacaatgtactgtcggcatcacccagggacgttcgggtttaacaccacctgttatttcggctgtaacgctggctttacacttataggagacagtaccttgtcgtgtcgtccgagcggccagtggaccgcagtgactcccgcttgtcgggcagtgaagtgttccgaactgcatgtgaacaaacctatcgcaatgaattgctctaatctgtgggggaatttttcatacgggtccatttgttcttttcactgtctggaaggtcagctcctgaacggcagcgctcagaccgcctgccaggagaacggccattggtctaccaccgtcccaacatgtcaagccggacctctcacaatccaggaagctctgacatatttcggaggcgctgtggcgtcaaccatagggctgataatgggtggaaccctactggccttactaaggaaaagattccgccagaaagacgacggcaagtgtcccctgaacccacacagccatcttggcacatacggcgtcttcacaaacgctgcctttgacccaagcccatag

SEQ ID NO: 266648 - DNA, 2307 bp, Artificial Sequence
  derived and/or modified sequence
atggccaattgccagatagccattttgtatcaaaggtttcagagagtcgtttttggtatctcccaattactgtgtttcagcgctctgatctccgagctgaccaatcagaaggaagtcgccgcatggacatatcactattctaccaaggcatatagctggaacatttctagaaaatattgccaaaaccgctacacagatctcgtggctattcaaaataaaaatgaaatcgactacctcaataaagtgcttccatactattctagctactactggatcggcattcggaaaaacaataaaacctggacgtgggtgggtaccaaaaaggccctcaccaatgaggctgaaaactgggccgataacgagcccaacaacaagcgcaataatgaagattgcgtggagatatacatcaagtcaccttcagcacccggaaaatggaacgacgagcattgtctgaagaaaaagcatgctctctgctacaccgcaagctgccaggatatgagctgttcaaagcaaggggagtgccttgaaacgatcgggaattacacttgctcttgttatccaggattttacggtccagaatgcgagtatgtgagggagtgcggcgagctggagttacctcaacacgtcctcatgaattgctctcaccctctgggcaacttctccttcaattcacagtgcagttttcactgtactgacggctatcaggtgaacgggccttcaaaactcgagtgtctggccagcgggatctggacaaataagccaccccagtgtttggctgtgcagtgccagcacttagaagctccaagcgaaggaacgatggactgcgtgcacccgttaacggccttcgcttacggctcctcctgtaagttcgagtgtcagcctggctacagggtcaggggcctggatatgcttcggtgtattgattccgggcactggtccgcccctctgcctacctgcgaagccattagctgtgagccactggagtcaccagtccatgggtctatggactgctccccttctctaagggcctttcagtatgatactaattgttcttttaggtgtgcggagggtttcatgcttagaggggctgatatcgttcgttgcgataacctggggcagtggaccgcccctgcccctgtctgccaggcccttcagtgccaagacttgcccgttcctaatgaagcacgcgttaattgttctcacccgtttggggcatttcgctaccaatcagtctgttcattcacttgcaacgagggcctcttgcttgtgggagcatctgtcctgcagtgtctcgcaacaggtaactggaattctgtgccgcctgagtgccaagctatcccatgcactcccctgttgtctccacagaatggcaccatgacctgcgtacagcctctgggttcaagttcttacaagtccacctgtcagtttatctgcgacgaagggtatagtctgtcgggcccagaacggctggattgtacccgatcagggaggtggactgactcaccaccaatgtgcgaggctattaaatgccctgaactgtttgcaccggaacagggaagcctggactgcagcgacacacggggagagttcaacgtcggaagcacctgccatttctcctgcgacaatggattcaaattggagggtcccaataacgttgaatgtacgaccagcgggagatggagtgcaactcctccgacatgtaagggcattgcctcactccctacaccaggcgtccagtgtccggcattaaccactcctggtcagggaacgatgtactgtcgtcaccatcccggaactttcggttttaataccacctgctatttcgggtgtaatgcgggatttactctaatcggagattctactctttcttgcagaccatccgggcagtggactgcagttaccccggcttgccgtgctgtgaagtgttcagagctgcatgtgaacaaacccattgctatgaactgttcgaacctctggggcaacttcagttacggctccatctgttcttttcactgtctggagggccaactgctgaatggatcagcgcagacagcctgccaggaaaacgggcattggtctactactgtgcccacgtgtcaggcaggcccactgaccatacaggaggcactcacttattttggaggagccgtggccagcacaatcggactgatcatgggcggaacattgctagccctgctccgtaaaagattccggcagaaagacgacggcaagtgccccctgaatccccattctcacctaggcacctatggtgtgttcacaaacgccgcattcgatccgtcaccttag

SEQ ID NO: 266649 - DNA, 2307 bp, Artificial Sequence
  derived and/or modified sequence
atggcgaactgccagattgccatcttgtatcaacgctttcaacgggtagtttttggcatctcacagctcctctgctttagcgccctgatctcagaacttacgaaccagaaggaggtggctgcatggacctatcattacagcacaaaagcttacagctggaacatatcccggaagtactgtcaaaaccggtatacagatttagtggctatccagaataagaatgagatcgattacctgaataaagtcctgccttactattcctcctattattggattgggatccggaaaaacaataagacctggacctgggtggggactaaaaaggccctcactaatgaggccgaaaattgggcagacaatgagcctaacaacaagcgcaataatgaggactgtgtggagatttatatcaaatcgcctagcgcgccaggaaagtggaatgacgagcactgtcttaaaaaaaaacacgccctttgctacaccgcttcgtgtcaggatatgagctgctcgaagcagggagaatgcttggaaaccatcggaaattatacttgttcctgctatccaggtttttatggacctgaatgcgagtatgtaagggaatgcggggagctggaattgcctcagcatgttttgatgaattgttctcatccactcggcaatttcagtttcaactctcagtgcagttttcactgtacagacggatatcaggttaatgggcctagtaagctggagtgtctggccagcgggatctggaccaacaagcccccacagtgccttgccgctcaatgccccccactgaagattcccgaacgaggcaatatgacttgtttgcattctgccaaagcctttcagcaccagtcatcctgttccttttcttgtgaggaggggttcgcactagttggaccagaggtggtccagtgtaccgcgtcaggagtgtggactgctcctgcccctgtctgtaaggctatctcctgtgaaccattggagtcacccgtgcacggctccatggactgctctccttccttacgcgcatttcagtatgacacaaactgctcatttcgatgtgctgaggggttcatgctgagaggcgctgatattgtgcgatgcgacaatcttggccagtggacggcccctgctcctgtctgccaggccttgcaatgccaggatctgccagttcctaatgaggctagggtgaattgtagtcacccattcggtgccttccgctatcagtctgtctgttcttttacctgcaacgaaggcttgctcctggtcggagcttcagtgcttcaatgtctggctacggggaattggaattcggtcccccctgagtgtcaggcaataccttgtactccacttctgtcgccccaaaatggcacgatgacttgtgtgcagccccttggctcttcctcctacaagtcaacctgccagtttatctgcgatgagggttattccctatccggtcccgagagattagactgtacccggtcggggcgatggacagattcaccacctatgtgcgaagctatcaaatgtccagagctgttcgcccctgagcagggatctcttgactgtagcgacacccgcggagagttcaacgtgggcagtacttgccactttagttgtgataacggcttcaaactggaggggcctaataacgttgagtgcaccactagcggcaggtggtcagcaacaccaccaacatgcaaagggatcgcctccctgcctacccccggagtccagtgccctgccctgacgacgccgggacagggtactatgtactgccggcaccaccctggtaccttcgggtttaatacaacctgttacttcggctgtaacgccggttttactctcattggtgactctacactgtcctgtagaccaagcggccagtggaccgccgttacccccgcatgccgggctgtaaagtgctccgagctgcatgtcaataagccgattgctatgaattgttccaacctctggggtaacttctcttacggcagcatttgtagcttccactgtttagaggggcagctcctcaacggctcagcccagaccgcctgtcaagaaaacggtcattggtccactaccgtgcccacttgccaggccggtcccctgaccatccaggaggccctcacgtatttcggcggagccgttgcttcaactatcggactgattatggggggtactttactcgcccttttgcgtaagagatttagacagaaagatgacggcaaatgtcctctgaaccctcatagccacctcggtacatatggggtgtttactaacgcggcttttgacccttcaccatag

SEQ ID NO: 266650 - DNA, 1941 bp, Artificial Sequence
  derived and/or modified sequence
tgagcaaactgtcagattgccattttgtatcagagattccagagagtggtgtttggcatttctcaacttctatgcttctctgcccttatatcagagctcacaaatcaaaaagaggtggccgcttggacataccattactcgacgaaggcatactcatggaacatttctcgcaaatactgtcaaaatcgctatacagatctcgtggccattcagaataaaaacgaaatcgattatctcaacaaagtcctgccctactactcctcatactattggatcggaatcaggaagaacaacaagacatggacctgggtgggaactaaaaaagccctgaccaacgaagcggagaactgggcagataacgagcctaacaacaaacgcaacaacgaggactgtgtcgaaatttatatcaagagtcccagcgctccaggaaagtggaatgacgaacactgcttaaaaaaaaagcacgccttgtgctacacggcatcttgtcaggacatgagttgcagcaaacagggggagtgcctggaaaccattggaaactacacctgtagctgctaccctggtttctacgggcctgagtgtgagtacgttcgcgaatgtggcgaactcgaactgccccagcatgtgctcatgaattgctcacaccctctcggtaacttttcttttaattctcaatgttcattccactgtaccgacgggtatcaggtgaatgggccaagcaaacttgaatgcctcgcttcgggtatctggactaacaagcctccacagtgcctggctgctcaatgcccacctcttaagatccctgagcgtggcaacatgacttgtctccacagtgcaaaggcattccagcaccaaagcagctgtagcttttcctgcgaggagggatttgctctagtgggtccagaggttgtgcagtgtactgcctccggggtgtggacagcaccagcaccagtttgcaaagccatttcctgcgaaccacttgagagccccgtgcacggttctatggactgttcaccaagcctccgtgcctttcaatacgacacaaactgcagttttaggtgcgctgagggctttatgctgcggggagccgacattgtgcggtgtgataacctaggacaatggaccgcccctgccccagtttgtcaggctctccaatgtcaggatcttccagtgcccaatgaggccagggtaaattgctcacacccctttggtgcattccggtatcagtcggtgtgctcttttacctgcaacgaaggcctgctgctggtgggtgcaagcgtccttcagtgcctagcaactgggaactggaactccgtgccccctgagtgccagggaaaatctatcgcctcccttcctactccaggggttcagtgtcccgcacttacaacacctggtcagggcacaatgtattgccgacaccaccctggcaccttcgggttcaataccacctgctacttcggctgcaacgccggttttacactgatcggcgactccaccttgtcttgcaggccttctgggcagtggacagccgtaacccctgcctgcagggccgtaaaatgctctgagttgcatgtgaataaaccaatagccatgaactgtagtaacttgtggggtaacttcagttatggaagcatatgctcctttcactgtctggagggacaattgctgaatggaagcgcgcagaccgcttgccaggaaaacggacattggtctaccacggtccctacctgccaggctgggccattgacgatccaggaggctcttacttactttggaggtgccgtggcaagtactattggcttgatcatgggtggaacgcttctggctctactgcgcaaacggtttagacagaaggacgacggcaaatgtccactgaatccacatagtcacctgggcacatatggagtgtttactaacgcagcattcgacccatcgccctag

SEQ ID NO: 266651 - DNA, 2262 bp, Artificial Sequence
  derived and/or modified sequence
gttgtgttcggcattagccagctcctatgcttttctgccttgatatccgagttaacgaatcaaaaggaagtcgccgcttggacgtaccactacagtacgaaagcctacagctggaacatcagccgcaaatactgccagaaccggtacactgatctggtggccatacagaacaagaacgagatcgattatctgaataaggtgctgccctattactcctcttactattggattggcatccgaaaaaataataaaacttggacatgggtggggacaaagaaagctttgacaaacgaggccgaaaattgggcagacaatgaacccaacaacaagcggaacaacgaggattgtgtggaaatttacattaagagcccaagtgctccagggaagtggaatgacgagcattgcttgaagaagaaacatgcactttgctacactgcatcttgccaggacatgagttgcagcaagcagggcgaatgcctcgagacgattggtaattatacatgtagctgctatccgggtttctacggccctgagtgtgagtatgtgagagagtgcggcgagctggagctgccgcagcacgttctgatgaactgttcccaccctttgggcaatttttcattcaattctcagtgcagcttccattgtaccgatggctatcaggtcaatggtcccagcaagcttgaatgcctggcatccggtatatggacaaataaacctccacagtgcttggcagcccagtgtcctcctctgaagataccggagcggggaaatatgacgtgcctgcattctgcaaaggctttccagcaccagagtagctgctccttctcatgtgaggagggcttcgctctcgtcggtccagaggttgttcaatgtactgcctcgggagtgtggacagctcccgcacctgtttgcaaggccatcagctgcgaacccctggaatcaccagtccatggttcaatggactgcagcccctccctaagagcctttcagtacgacaccaattgctccttcagatgtgctgaaggtttcatgcttcgaggtgctgacattgtcaggtgcgacaacctcggccagtggaccgccccagcccctgtgtgccaggcattacagtgtcaggatctgcctgtacctaatgaagctcgagtgaactgcagccatccctttggtgctttcagatatcagtccgtgtgttccttcacgtgcaacgagggattgctgcttgtcggtgccagcgtcttacagtgtttggctacagggaattggaattctgtgccaccggaatgtcaggcgatcccttgtactccacttctctctccccagaatgggacgatgacatgtgtccagccccttggttccagtagctacaaatctacctgtcagtttatctgcgatgagggatattcactctctggacccgagagactggactgtacccggtcaggcaggtggacagactctcccccaatgtgcgaggctatcaaatgtccggagctattcgcacctgagcagggatcgctggactgctctgatacccgcggagagttcaacgtcggatctacctgccactttagttgtgataatgggtttaaactcgagggcccaaacaatgtggaatgtactacctctgggagatggtccgctactcccccaacatgtaaaggcattgcgtctctgccaacgccaggcgtgcagtgtccggcattgacaacacctgggcaggggactatgtattgccgtcatcacccagggactttcgggtttaacactacttgctacttcggctgtaacgcaggtttcactttgatcggcgactccaccttgtcttgccgtccttccgggcagtggaccgcagtcacgccagcttgtagagctgtgaagtgctcagaactgcacgtcaacaaacctattgccatgaactgtagtaatctctggggcaatttctcctacgggtccatttgctctttccattgtctggagggccagcttcttaatgggagtgcccagaccgcttgtcaggagaatgggcactggagcaccacagtgccgacatgccaagccggtcctcttacaattcaggaggccctgacttatttcggcggagctgtcgcaagcaccatcggtctgatcatggggggaacactacttgccctccttcgaaagcgcttccgccaaaaggatgacggcaagtgtccactgaatccccattcccacctaggcacctacggcgtttttacaaacgcggctttcgatccatcaccgtag

SEQ ID NO: 266652 - DNA, 2496 bp, Artificial Sequence
  derived and/or modified sequence
gagatggccaactgccaaatagccatcttgtaccagagattccagagagtggtctttggaatttcccaactcctttgcttcagtgccctgatctctgaactaacaaaccagaaagaagtggcagcatggacttatcattacagcacaaaagcatactcatggaatatttcccgtaaatactgccagaatcgctacacagacttagtggccatccagaataaaaatgaaattgattacctcaataaggtcctaccctactacagctcctactactggattgggatccgaaagaacaataagacatggacatgggtgggaaccaaaaaggctctcaccaacgaggctgagaactgggctgataatgaacctaacaacaaaaggaacaacgaggactgcgtggagatatacatcaagagtccgtcagcccctggcaagtggaatgatgagcactgcttgaagaaaaagcacgcattgtgttacacagcctcctgccaggacatgtcctgcagcaaacaaggagagtgcctcgagaccatcgggaactacacctgctcctgttaccctggattctatgggccagaatgtgaatacgtgagagagtgtggagaacttgagctccctcaacacgtgctcatgaactgcagccaccctctgggaaacttctcttttaactcgcagtgcagcttccactgcactgacgggtaccaagtaaatgggcccagcaagctggaatgcttggcttctggaatctggacaaataagcctccacagtgtttagctgcccagtgcccacccctgaagattcctgaacgaggaaacatgacctgccttcattctgcaaaagcattccagcatcagtctagctgcagcttcagttgtgaagagggatttgcattagttggaccggaagtggtgcaatgcacagcctcgggggtatggacagccccagccccagtgtgtaaagctatttcgtgtgagccgctggagagtcctgtccacggaagcatggattgctctccatccttgagagcgtttcagtatgacaccaactgtagcttccgctgtgctgaaggtttcatgctgagaggagccgatatagttcggtgtgataacttgggacagtggacagcaccagccccagtctgtcaagctttgcagtgccaggatctcccagttccaaatgaggcccgggtgaactgctcccaccccttcggtgcctttaggtaccagtcagtctgcagcttcacctgcaatgaaggcttgctcctggtgggagcaagtgtgctacagtgcttggctactggaaactggaattctgttcctccagaatgccaagccattccctgcacacctttgctaagccctcagaatggaacaatgacctgtgttcaacctcttggaagttccagttataaatccacatgtcaattcatctgtgacgagggatattctttgtctggaccagaaagattggattgtactcgatcgggacgctggacagactccccaccaatgtgtgaagccatcaagtgcccagaactctttgccccagagcagggcagcctggattgttctgacactcgtggagaattcaatgttggctccacctgccatttctcttgtgacaacggctttaagctggaggggcccaataatgtggaatgcacaacttctggaagatggtcagctactccaccaacctgcaaaggcatagcatcacttcctactccaggggtgcaatgtccagccctcaccactcctgggcagggaaccatgtactgtaggcatcatccgggaacctttggttttaataccacttgttactttggctgcaacgctggattcacactcataggagacagcactctcagctgcagaccttcaggacaatggacagcagtaactccagcatgcagagctgtgaaatgctcagaactacatgttaataagccaatagcgatgaactgctccaacctctggggaaacttcagttatggatcaatctgctctttccattgtctagagggccagttacttaatggctctgcacaaacagcatgccaagagaatggccactggtcaactaccgtgccaacctgccaagcaggaccattgactatccaggaagccctgacttactttggtggagcggtggcttctacgataggtctgataatgggtgggacgctcctggctttgctaagaaagcgtttcagacaaaaagatgatgggaaatgccccttgaatcctcacagccacctaggaacatatggagtttttacaaacgctgcatttgacccgagtccttaagaaatgataattatttaaatttctttggtctcatttccagagacctgtccttttcctggtctcctcattcagcctccatatgatcctgttgtgaacatcaagtttcctgctacactggacttaactataatgcatttgctgcaggtttccataaacacccatgaatcaaagacatggaattacctt

SEQ ID NO: 266653 - DNA, 2996 bp, Artificial Sequence
  derived and/or modified sequence
tgggcagaaggcagaaaaccagcagagtcacagaggagatggccaactgccaaatagccatcttgtaccagagattccagagagtggtctttggaatttcccaactcctttgcttcagtgccctgatctctgaactaacaaaccagaaagaagtggcagcatggacttatcattacagcacaaaagcatactcatggaatatttcccgtaaatactgccagaatcgctacacagacttagtggccatccagaataaaaatgaaattgattacctcaataaggtcctaccctactacagctcctactactggattgggatccgaaagaacaataagacatggacatgggtgggaaccaaaaaggctctcaccaacgaggctgagaactgggctgataatgaacctaacaacaaaaggaacaacgaggactgcgtggagatatacatcaagagtccgtcagcccctggcaagtggaatgatgagcactgcttgaagaaaaagcacgcattgtgttacacagcctcctgccaggacatgtcctgcagcaaacaaggagagtgcctcgagaccatcgggaactacacctgctcctgttaccctggattctatgggccagaatgtgaatacgtgagagagtgtggagaacttgagctccctcaacacgtgctcatgaactgcagccaccctctgggaaacttctcttttaactcgcagtgcagcttccactgcactgacgggtaccaagtaaatgggcccagcaagctggaatgcttggcttctggaatctggacaaataagcctccacagtgtttagctgtgcagtgtcagcacctggaagcccccagtgaaggaaccatggactgtgttcatccgctcactgcttttgcctatggctccagctgtaaatttgagtgccagcccggctacagagtgaggggcttggacatgctccgctgcattgactctggacactggtctgcacccttgccaacctgtgaggctatttcgtgtgagccgctggagagtcctgtccacggaagcatggattgctctccatccttgagagcgtttcagtatgacaccaactgtagcttccgctgtgctgaaggtttcatgctgagaggagccgatatagttcggtgtgataacttgggacagtggacagcaccagccccagtctgtcaagctttgcagtgccaggatctcccagttccaaatgaggcccgggtgaactgctcccaccccttcggtgcctttaggtaccagtcagtctgcagcttcacctgcaatgaaggcttgctcctggtgggagcaagtgtgctacagtgcttggctactggaaactggaattctgttcctccagaatgccaagccattccctgcacacctttgctaagccctcagaatggaacaatgacctgtgttcaacctcttggaagttccagttataaatccacatgtcaattcatctgtgacgagggatattctttgtctggaccagaaagattggattgtactcgatcgggacgctggacagactccccaccaatgtgtgaagccatcaagtgcccagaactctttgccccagagcagggcagcctggattgttctgacactcgtggagaattcaatgttggctccacctgccatttctcttgtgacaacggctttaagctggaggggcccaataatgtggaatgcacaacttctggaagatggtcagctactccaccaacctgcaaaggcatagcatcacttcctactccaggggtgcaatgtccagccctcaccactcctgggcagggaaccatgtactgtaggcatcatccgggaacctttggttttaataccacttgttactttggctgcaacgctggattcacactcataggagacagcactctcagctgcagaccttcaggacaatggacagcagtaactccagcatgcagagctgtgaaatgctcagaactacatgttaataagccaatagcgatgaactgctccaacctctggggaaacttcagttatggatcaatctgctctttccattgtctagagggccagttacttaatggctctgcacaaacagcatgccaagagaatggccactggtcaactaccgtgccaacctgccaagcaggaccattgactatccaggaagccctgacttactttggtggagcggtggcttctacgataggtctgataatgggtgggacgctcctggctttgctaagaaagcgtttcagacaaaaagatgatgggaaatgccccttgaatcctcacagccacctaggaacatatggagtttttacaaacgctgcatttgacccgagtccttaaagacctgtccttttcctggtctcctcattcagcctccatatgatcctgttgtgaacatcaagtttcctgctacactggacttaactataatgcatttgctgcaggtttccataaacacccatgaatcaaagacatggaattaccttagattagctctggaccagcctgttggacccgctctggaccaaccctgtttcctgagtttgggattgtggtacaatctcaaattctcaacctaccaccccttcctgtcccacctcttctcttcctgtaacacaagccacagaagccaggagcaaatgtttctgcagtagtctctgtgctttgactcacctgttacttgaaataccagtgaaccaaagagactggagcatctgactcacaagaagaccagactgtggagaaataaaaatacctctttattttttgattgaaggaaggttttctccactttgttggaaagcaggtggcatctctaattggaagaaattcctgtagcatcttctggagtctccagtggttgctgttgatgaggcctcttggacctctgctctgaggcttccagagagtcctctggatggcaccagaggctgcagaaggccaagaatcaagctagaaggccacatgtcaccgtggaccttcctgccacca

SEQ ID NO: 266654 - DNA, 2589 bp, Artificial Sequence
  derived and/or modified sequence
tgggcagaaggcagaaaaccagcagagtcacagaggagatggccaactgccaaatagccatcttgtaccagagattccagagagtggtctttggaatttcccaactcctttgcttcagtgccctgatctctgaactaacaaaccagaaagaagtggcagcatggacttatcattacagcacaaaagcatactcatggaatatttcccgtaaatactgccagaatcgctacacagacttagtggccatccagaataaaaatgaaattgattacctcaataaggtcctaccctactacagctcctactactggattgggatccgaaagaacaataagacatggacatgggtgggaaccaaaaaggctctcaccaacgaggctgagaactgggctgataatgaacctaacaacaaaaggaacaacgaggactgcgtggagatatacatcaagagtccgtcagcccctggcaagtggaatgatgagcactgcttgaagaaaaagcacgcattgtgttacacagcctcctgccaggacatgtcctgcagcaaacaaggagagtgcctcgagaccatcgggaactacacctgctcctgttaccctggattctatgggccagaatgtgaatacgtgagagagtgtggagaacttgagctccctcaacacgtgctcatgaactgcagccaccctctgggaaacttctcttttaactcgcagtgcagcttccactgcactgacgggtaccaagtaaatgggcccagcaagctggaatgcttggcttctggaatctggacaaataagcctccacagtgtttagctgcccagtgcccacccctgaagattcctgaacgaggaaacatgacctgccttcattctgcaaaagcattccagcatcagtctagctgcagcttcagttgtgaagagggatttgcattagttggaccggaagtggtgcaatgcacagcctcgggggtatggacagccccagccccagtgtgtaaagctatttcgtgtgagccgctggagagtcctgtccacggaagcatggattgctctccatccttgagagcgtttcagtatgacaccaactgtagcttccgctgtgctgaaggtttcatgctgagaggagccgatatagttcggtgtgataacttgggacagtggacagcaccagccccagtctgtcaagctttgcagtgccaggatctcccagttccaaatgaggcccgggtgaactgctcccaccccttcggtgcctttaggtaccagtcagtctgcagcttcacctgcaatgaaggcttgctcctggtgggagcaagtgtgctacagtgcttggctactggaaactggaattctgttcctccagaatgccaaggtaagagcatagcatcacttcctactccaggggtgcaatgtccagccctcaccactcctgggcagggaaccatgtactgtaggcatcatccgggaacctttggttttaataccacttgttactttggctgcaacgctggattcacactcataggagacagcactctcagctgcagaccttcaggacaatggacagcagtaactccagcatgcagagctgtgaaatgctcagaactacatgttaataagccaatagcgatgaactgctccaacctctggggaaacttcagttatggatcaatctgctctttccattgtctagagggccagttacttaatggctctgcacaaacagcatgccaagagaatggccactggtcaactaccgtgccaacctgccaagcaggaccattgactatccaggaagccctgacttactttggtggagcggtggcttctacgataggtctgataatgggtgggacgctcctggctttgctaagaaagcgtttcagacaaaaagatgatgggaaatgccccttgaatcctcacagccacctaggaacatatggagtttttacaaacgctgcatttgacccgagtccttaagtttccataaacacccatgaatcaaagacatggaattaccttagattagctctggaccagcctgttggacccgctctggaccaaccctgtttcctgagtttgggattgtggtacaatctcaaattctcaacctaccaccccttcctgtcccacctcttctcttcctgtaacacaagccacagaagccaggagcaaatgtttctgcagtagtctctgtgctttgactcacctgttacttgaaataccagtgaaccaaagagactggagcatctgactcacaagaagaccagactgtggagaaataaaaatacctctttattttttgattgaaggaaggttttctccactttgttggaaagcaggtggcatctctaattggaagaaattcctgtagcatcttctggagtctccagtggttgctgttgatgaggcctcttggacctctgctctgaggcttccagagagtcctctggatggcaccagaggctgcagaaggccaagaatcaagctagaaggccacatgtcaccgtggaccttcctgccaccagtcactgtccctcaaatgacccaaagaccaatattcaaatgcgtaattaaaagaattttcccc

SEQ ID NO: 266655 - DNA, 2617 bp, Artificial Sequence
  derived and/or modified sequence
ggcagtgagactgtaagcagtctgggttgggcagaaggcagaaaaccagcagagtcacagaggagatggccaactgccaaatagccatcttgtaccagagattccagagagtggtctttggaatttcccaactcctttgcttcagtgccctgatctctgaactaacaaaccagaaagaagtggcagcatggacttatcattacagcacaaaagcatactcatggaatatttcccgtaaatactgccagaatcgctacacagacttagtggccatccagaataaaaatgaaattgattacctcaataaggtcctaccctactacagctcctactactggattgggatccgaaagaacaataagacatggacatgggtgggaaccaaaaaggctctcaccaacgaggctgagaactgggctgataatgaacctaacaacaaaaggaacaacgaggactgcgtggagatatacatcaagagtccgtcagcccctggcaagtggaatgatgagcactgcttgaagaaaaagcacgcattgtgttacacagcctcctgccaggacatgtcctgcagcaaacaaggagagtgcctcgagaccatcgggaactacacctgctcctgttaccctggattctatgggccagaatgtgaatacgtgagagagtgtggagaacttgagctccctcaacacgtgctcatgaactgcagccaccctctgggaaacttctcttttaactcgcagtgcagcttccactgcactgacgggtaccaagtaaatgggcccagcaagctggaatgcttggcttctggaatctggacaaataagcctccacagtgtttagctgcccagtgcccacccctgaagattcctgaacgaggaaacatgacctgccttcattctgcaaaagcattccagcatcagtctagctgcagcttcagttgtgaagagggatttgcattagttggaccggaagtggtgcaatgcacagcctcgggggtatggacagccccagccccagtgtgtaaagctatttcgtgtgagccgctggagagtcctgtccacggaagcatggattgctctccatccttgagagcgtttcagtatgacaccaactgtagcttccgctgtgctgaaggtttcatgctgagaggagccgatatagttcggtgtgataacttgggacagtggacagcaccagccccagtctgtcaagctttgcagtgccaggatctcccagttccaaatgaggcccgggtgaactgctcccaccccttcggtgcctttaggtaccagtcagtctgcagcttcacctgcaatgaaggcttgctcctggtgggagcaagtgtgctacagtgcttggctactggaaactggaattctgttcctccagaatgccaaggtaagagcatagcatcacttcctactccaggggtgcaatgtccagccctcaccactcctgggcagggaaccatgtactgtaggcatcatccgggaacctttggttttaataccacttgttactttggctgcaacgctggattcacactcataggagacagcactctcagctgcagaccttcaggacaatggacagcagtaactccagcatgcagagctgtgaaatgctcagaactacatgttaataagccaatagcgatgaactgctccaacctctggggaaacttcagttatggatcaatctgctctttccattgtctagagggccagttacttaatggctctgcacaaacagcatgccaagagaatggccactggtcaactaccgtgccaacctgccaagcaggaccattgactatccaggaagccctgacttactttggtggagcggtggcttctacgataggtctgataatgggtgggacgctcctggctttgctaagaaagcgtttcagacaaaaagatgatgggaaatgccccttgaatcctcacagccacctaggaacatatggagtttttacaaacgctgcatttgacccgagtccttaaggtttccataaacacccatgaatcaaagacatggaattaccttagattagctctggaccagcctgttggacccgctctggaccaaccctgtttcctgagtttgggattgtggtacaatctcaaattctcaacctaccaccccttcctgtcccacctcttctcttcctgtaacacaagccacagaagccaggagcaaatgtttctgcagtagtctctgtgctttgactcacctgttacttgaaataccagtgaaccaaagagactggagcatctgactcacaagaagaccagactgtggagaaataaaaatacctctttattttttgattgaaggaaggttttctccactttgttggaaagcaggtggcatctctaattggaagaaattcctgtagcatcttctggagtctccagtggttgctgttgatgaggcctcttggacctctgctctgaggcttccagagagtcctctggatggcaccagaggctgcagaaggccaagaatcaagctagaaggccacatgtcaccgtggaccttcctgccaccagtcactgtccctcaaatgacccaaagaccaatattcaaatgcgtaattaaaagaattttcccc

SEQ ID NO: 266656 - DNA, 2983 bp, Artificial Sequence
  derived and/or modified sequence
ggcagtgagactgtaagcagtctgggttgggcagaaggcagaaaaccagcagagtcacagaggagatggccaactgccaaatagccatcttgtaccagagattccagagagtggtctttggaatttcccaactcctttgcttcagtgccctgatctctgaactaacaaaccagaaagaagtggcagcatggacttatcattacagcacaaaagcatactcatggaatatttcccgtaaatactgccagaatcgctacacagacttagtggccatccagaataaaaatgaaattgattacctcaataaggtcctaccctactacagctcctactactggattgggatccgaaagaacaataagacatggacatgggtgggaaccaaaaaggctctcaccaacgaggctgagaactgggctgataatgaacctaacaacaaaaggaacaacgaggactgcgtggagatatacatcaagagtccgtcagcccctggcaagtggaatgatgagcactgcttgaagaaaaagcacgcattgtgttacacagcctcctgccaggacatgtcctgcagcaaacaaggagagtgcctcgagaccatcgggaactacacctgctcctgttaccctggattctatgggccagaatgtgaatacgtgagagagtgtggagaacttgagctccctcaacacgtgctcatgaactgcagccaccctctgggaaacttctcttttaactcgcagtgcagcttccactgcactgacgggtaccaagtaaatgggcccagcaagctggaatgcttggcttctggaatctggacaaataagcctccacagtgtttagctgtgcagtgtcagcacctggaagcccccagtgaaggaaccatggactgtgttcatccgctcactgcttttgcctatggctccagctgtaaatttgagtgccagcccggctacagagtgaggggcttggacatgctccgctgcattgactctggacactggtctgcacccttgccaacctgtgaggctatttcgtgtgagccgctggagagtcctgtccacggaagcatggattgctctccatccttgagagcgtttcagtatgacaccaactgtagcttccgctgtgctgaaggtttcatgctgagaggagccgatatagttcggtgtgataacttgggacagtggacagcaccagccccagtctgtcaagctttgcagtgccaggatctcccagttccaaatgaggcccgggtgaactgctcccaccccttcggtgcctttaggtaccagtcagtctgcagcttcacctgcaatgaaggcttgctcctggtgggagcaagtgtgctacagtgcttggctactggaaactggaattctgttcctccagaatgccaagccattccctgcacacctttgctaagccctcagaatggaacaatgacctgtgttcaacctcttggaagttccagttataaatccacatgtcaattcatctgtgacgagggatattctttgtctggaccagaaagattggattgtactcgatcgggacgctggacagactccccaccaatgtgtgaagccatcaagtgcccagaactctttgccccagagcagggcagcctggattgttctgacactcgtggagaattcaatgttggctccacctgccatttctcttgtgacaacggctttaagctggaggggcccaataatgtggaatgcacaacttctggaagatggtcagctactccaccaacctgcaaaggcatagcatcacttcctactccaggggtgcaatgtccagccctcaccactcctgggcagggaaccatgtactgtaggcatcatccgggaacctttggttttaataccacttgttactttggctgcaacgctggattcacactcataggagacagcactctcagctgcagaccttcaggacaatggacagcagtaactccagcatgcagagctgtgaaatgctcagaactacatgttaataagccaatagcgatgaactgctccaacctctggggaaacttcagttatggatcaatctgctctttccattgtctagagggccagttacttaatggctctgcacaaacagcatgccaagagaatggccactggtcaactaccgtgccaacctgccaagcaggaccattgactatccaggaagccctgacttactttggtggagcggtggcttctacgataggtctgataatgggtgggacgctcctggctttgctaagaaagcgtttcagacaaaaagatgatgggaaatgccccttgaatcctcacagccacctaggaacatatggagtttttacaaacgctgcatttgacccgagtccttaaggtttccataaacacccatgaatcaaagacatggaattaccttagattagctctggaccagcctgttggacccgctctggaccaaccctgtttcctgagtttgggattgtggtacaatctcaaattctcaacctaccaccccttcctgtcccacctcttctcttcctgtaacacaagccacagaagccaggagcaaatgtttctgcagtagtctctgtgctttgactcacctgttacttgaaataccagtgaaccaaagagactggagcatctgactcacaagaagaccagactgtggagaaataaaaatacctctttattttttgattgaaggaaggttttctccactttgttggaaagcaggtggcatctctaattggaagaaattcctgtagcatcttctggagtctccagtggttgctgttgatgaggcctcttggacctctgctctgaggcttccagagagtcctctggatggcaccagaggctgcagaaggccaagaatcaagctagaaggccacatgtcaccgtggaccttcctgccaccagtcactgtccctcaaatgacccaaagaccaatattcaaatgcgtaattaaaagaattttcccc

SEQ ID NO: 266657 - DNA, 2983 bp, Artificial Sequence
  derived and/or modified sequence
ggcagtgagactgtaagcagtctgggttgggcagaaggcagaaaaccagcagagtcacagaggagatggccaactgccaaatagccatcttgtaccagagattccagagagtggtctttggaatttcccaactcctttgcttcagtgccctgatctctgaactaacaaaccagaaagaagtggcagcatggacttatcattacagcacaaaagcatactcatggaatatttcccgtaaatactgccagaatcgctacacagacttagtggccatccagaataaaaatgaaattgattacctcaataaggtcctaccctactacagctcctactactggattgggatccgaaagaacaataagacatggacatgggtgggaaccaaaaaggctctcaccaacgaggctgagaactgggctgataatgaacctaacaacaaaaggaacaacgaggactgcgtggagatatacatcaagagtccgtcagcccctggcaagtggaatgatgagcactgcttgaagaaaaagcacgcattgtgttacacagcctcctgccaggacatgtcctgcagcaaacaaggagagtgcctcgagaccatcgggaactacacctgctcctgttaccctggattctatgggccagaatgtgaatacgtgagagagtgtggagaacttgagctccctcaacacgtgctcatgaactgcagccaccctctgggaaacttctcttttaactcgcagtgcagcttccactgcactgacgggtaccaagtaaatgggcccagcaagctggaatgcttggcttctggaatctggacaaataagcctccacagtgtttagctgcccagtgcccacccctgaagattcctgaacgaggaaacatgacctgccttcattctgcaaaagcattccagcatcagtctagctgcagcttcagttgtgaagagggatttgcattagttggaccggaagtggtgcaatgcacagcctcgggggtatggacagccccagccccagtgtgtaaagctatttcgtgtgagccgctggagagtcctgtccacggaagcatggattgctctccatccttgagagcgtttcagtatgacaccaactgtagcttccgctgtgctgaaggtttcatgctgagaggagccgatatagttcggtgtgataacttgggacagtggacagcaccagccccagtctgtcaagctttgcagtgccaggatctcccagttccaaatgaggcccgggtgaactgctcccaccccttcggtgcctttaggtaccagtcagtctgcagcttcacctgcaatgaaggcttgctcctggtgggagcaagtgtgctacagtgcttggctactggaaactggaattctgttcctccagaatgccaagccattccctgcacacctttgctaagccctcagaatggaacaatgacctgtgttcaacctcttggaagttccagttataaatccacatgtcaattcatctgtgacgagggatattctttgtctggaccagaaagattggattgtactcgatcgggacgctggacagactccccaccaatgtgtgaagccatcaagtgcccagaactctttgccccagagcagggcagcctggattgttctgacactcgtggagaattcaatgttggctccacctgccatttctcttgtgacaacggctttaagctggaggggcccaataatgtggaatgcacaacttctggaagatggtcagctactccaccaacctgcaaaggcatagcatcacttcctactccaggggtgcaatgtccagccctcaccactcctgggcagggaaccatgtactgtaggcatcatccgggaacctttggttttaataccacttgttactttggctgcaacgctggattcacactcataggagacagcactctcagctgcagaccttcaggacaatggacagcagtaactccagcatgcagagctgtgaaatgctcagaactacatgttaataagccaatagcgatgaactgctccaacctctggggaaacttcagttatggatcaatctgctctttccattgtctagagggccagttacttaatggctctgcacaaacagcatgccaagagaatggccactggtcaactaccgtgccaacctgccaagcaggaccattgactatccaggaagccctgacttactttggtggagcggtggcttctacgataggtctgataatgggtgggacgctcctggctttgctaagaaagcgtttcagacaaaaagatgatgggaaatgccccttgaatcctcacagccacctaggaacatatggagtttttacaaacgctgcatttgacccgagtccttaaggtttccataaacacccatgaatcaaagacatggaattaccttagattagctctggaccagcctgttggacccgctctggaccaaccctgtttcctgagtttgggattgtggtacaatctcaaattctcaacctaccaccccttcctgtcccacctcttctcttcctgtaacacaagccacagaagccaggagcaaatgtttctgcagtagtctctgtgctttgactcacctgttacttgaaataccagtgaaccaaagagactggagcatctgactcacaagaagaccagactgtggagaaataaaaatacctctttattttttgattgaaggaaggttttctccactttgttggaaagcaggtggcatctctaattggaagaaattcctgtagcatcttctggagtctccagtggttgctgttgatgaggcctcttggacctctgctctgaggcttccagagagtcctctggatggcaccagaggctgcagaaggccaagaatcaagctagaaggccacatgtcaccgtggaccttcctgccaccagtcactgtccctcaaatgacccaaagaccaatattcaaatgcgtaattaaaagaattttcccc

SEQ ID NO: 266658 - DNA, 2660 bp, Artificial Sequence
  derived and/or modified sequence
ggccaactgccaaatagccatcttgtaccagagattccagagagtggtctttggaatttcccaactcctttgcttcagtgccctgatctctgaactaacaaaccagaaagaagtggcagcatggacttatcattacagcacaaaagcatactcatggaatatttcccgtaaatactgccagaatcgctacacagacttagtggccatccagaataaaaatgaaattgattacctcaataaggtcctaccctactacagctcctactactggattgggatccgaaagaacaataagacatggacatgggtgggaaccaaaaaggctctcaccaacgaggctgagaactgggctgataatgaacctaacaacaaaaggaacaacgaggactgcgtggagatatacatcaagagtccgtcagcccctggcaagtggaatgatgagcactgcttgaagaaaaagcacgcattgtgttacacagcctcctgccaggacatgtcctgcagcaaacaaggagagtgcctcgagaccatcgggaactacacctgctcctgttaccctggattctatgggccagaatgtgaatacgtgagagagtgtggagaacttgagctccctcaacacgtgctcatgaactgcagccaccctctgggaaacttctcttttaactcgcagtgcagcttccactgcactgacgggtaccaagtaaatgggcccagcaagctggaatgcttggcttctggaatctggacaaataagcctccacagtgtttagctgcccagtgcccacccctgaagattcctgaacgaggaaacatgacctgccttcattctgcaaaagcattccagcatcagtctagctgcagcttcagttgtgaagagggatttgcattagttggaccggaagtggtgcaatgcacagcctcgggggtatggacagccccagccccagtgtgtaaagctatttcgtgtgagccgctggagagtcctgtccacggaagcatggattgctctccatccttgagagcgtttcagtatgacaccaactgtagcttccgctgtgctgaaggtttcatgctgagaggagccgatatagttcggtgtgataacttgggacagtggacagcaccagccccagtctgtcaagctttgcagtgccaggatctcccagttccaaatgaggcccgggtgaactgctcccaccccttcggtgcctttaggtaccagtcagtctgcagcttcacctgcaatgaaggcttgctcctggtgggagcaagtgtgctacagtgcttggctactggaaactggaattctgttcctccagaatgccaaggtaagagcatagcatcacttcctactccaggggtgcaatgtccagccctcaccactcctgggcagggaaccatgtactgtaggcatcatccgggaacctttggttttaataccacttgttactttggctgcaacgctggattcacactcataggagacagcactctcagctgcagaccttcaggacaatggacagcagtaactccagcatgcagagctgtgaaatgctcagaactacatgttaataagccaatagcgatgaactgctccaacctctggggaaacttcagttatggatcaatctgctctttccattgtctagagggccagttacttaatggctctgcacaaacagcatgccaagagaatggccactggtcaactaccgtgccaacctgccaagcaggaccattgactatccaggaagccctgacttactttggtggagcggtggcttctacgataggtctgataatgggtgggacgctcctggctttgctaagaaagcgtttcagacaaaaagatgatgggaaatgccccttgaatcctcacagccacctaggaacatatggagtttttacaaacgctgcatttgacccgagtccttaaagacctgtccttttcctggtctcctcattcagcctccatatgatcctgttgtgaacatcaagtttcctgctacactggacttaactataatgcatttgctgcaggtttccataaacacccatgaatcaaagacatggaattaccttagattagctctggaccagcctgttggacccgctctggaccaaccctgtttcctgagtttgggattgtggtacaatctcaaattctcaacctaccaccccttcctgtcccacctcttctcttcctgtaacacaagccacagaagccaggagcaaatgtttctgcagtagtctctgtgctttgactcacctgttacttgaaataccagtgaaccaaagagactggagcatctgactcacaagaagaccagactgtggagaaataaaaatacctctttattttttgattgaaggaaggttttctccactttgttggaaagcaggtggcatctctaattggaagaaattcctgtagcatcttctggagtctccagtggttgctgttgatgaggcctcttggacctctgctctgaggcttccagagagtcctctggatggcaccagaggctgcagaaggccaagaatcaagctagaaggccacatgtcaccgtggaccttcctgccaccagtcactgtccctcaaatgacccaaagaccaatattcaaatgcgtaattaaaagaattttccccaaatgcc

SEQ ID NO: 266659 - DNA, 2371 bp, Artificial Sequence
  derived and/or modified sequence
gtggtctttggaatttcccaactcctttgcttcagtgccctgatctctgaactaacaaaccagaaagaagtggcagcatggacttatcattacagcacaaaagcatactcatggaatatttcccgtaaatactgccagaatcgctacacagacttagtggccatccagaataaaaatgaaattgattacctcaataaggtcctaccctactacagctcctactactggattgggatccgaaagaacaataagacatggacatgggtgggaaccaaaaaggctctcaccaacgaggctgagaactgggctgataatgaacctaacaacaaaaggaacaacgaggactgcgtggagatatacatcaagagtccgtcagcccctggcaagtggaatgatgagcactgcttgaagaaaaagcacgcattgtgttacacagcctcctgccaggacatgtcctgcagcaaacaaggagagtgcctcgagaccatcgggaactacacctgctcctgttaccctggattctatgggccagaatgtgaatacgtgagagagtgtggagaacttgagctccctcaacacgtgctcatgaactgcagccaccctctgggaaacttctcttttaactcgcagtgcagcttccactgcactgacgggtaccaagtaaatgggcccagcaagctggaatgcttggcttctggaatctggacaaataagcctccacagtgtttagctgcccagtgcccacccctgaagattcctgaacgaggaaacatgacctgccttcattctgcaaaagcattccagcatcagtctagctgcagcttcagttgtgaagagggatttgcattagttggaccggaagtggtgcaatgcacagcctcgggggtatggacagccccagccccagtgtgtaaagctatttcgtgtgagccgctggagagtcctgtccacggaagcatggattgctctccatccttgagagcgtttcagtatgacaccaactgtagcttccgctgtgctgaaggtttcatgctgagaggagccgatatagttcggtgtgataacttgggacagtggacagcaccagccccagtctgtcaagctttgcagtgccaggatctcccagttccaaatgaggcccgggtgaactgctcccaccccttcggtgcctttaggtaccagtcagtctgcagcttcacctgcaatgaaggcttgctcctggtgggagcaagtgtgctacagtgcttggctactggaaactggaattctgttcctccagaatgccaagccattccctgcacacctttgctaagccctcagaatggaacaatgacctgtgttcaacctcttggaagttccagttataaatccacatgtcaattcatctgtgacgagggatattctttgtctggaccagaaagattggattgtactcgatcgggacgctggacagactccccaccaatgtgtgaagccatcaagtgcccagaactctttgccccagagcagggcagcctggattgttctgacactcgtggagaattcaatgttggctccacctgccatttctcttgtgacaacggctttaagctggaggggcccaataatgtggaatgcacaacttctggaagatggtcagctactccaccaacctgcaaaggcatagcatcacttcctactccaggggtgcaatgtccagccctcaccactcctgggcagggaaccatgtactgtaggcatcatccgggaacctttggttttaataccacttgttactttggctgcaacgctggattcacactcataggagacagcactctcagctgcagaccttcaggacaatggacagcagtaactccagcatgcagagctgtgaaatgctcagaactacatgttaataagccaatagcgatgaactgctccaacctctggggaaacttcagttatggatcaatctgctctttccattgtctagagggccagttacttaatggctctgcacaaacagcatgccaagagaatggccactggtcaactaccgtgccaacctgccaagcaggaccattgactatccaggaagccctgacttactttggtggagcggtggcttctacgataggtctgataatgggtgggacgctcctggctttgctaagaaagcgtttcagacaaaaagatgatgggaaatgccccttgaatcctcacagccacctaggaacatatggagtttttacaaacgctgcatttgacccgagtccttaaagacctgtccttttcctggtctcctcattcagcctccatatgatcctgttgtgaacatcaagtttcctgctacactggacttaactataatgcatttgctgcaggtttc

SEQ ID NO: 266660 - DNA, 2307 bp, Artificial Sequence
  derived and/or modified sequence
atggccaactgccagatcgccatcctgtaccagagattccagagagtggtgttcggcatcagccagctgctgtgcttcagcgccctgatcagcgagctgaccaaccagaaggaggtggccgcctggacctaccactacagcaccaaggcctacagctggaacatcagcagaaagtactgccagaacagatacaccgacctggtggccatccagaacaagaacgagatcgactacctgaacaaggtgctgccctactacagcagctactactggatcggcatcagaaagaacaacaagacctggacctgggtgggcaccaagaaggccctgaccaacgaggccgagaactgggccgacaacgagcccaacaacaagagaaacaacgaggactgcgtggagatctacatcaagagccccagcgcccccggcaagtggaacgacgagcactgcctgaagaagaagcacgccctgtgctacaccgccagctgccaggacatgagctgcagcaagcagggcgagtgcctggagaccatcggcaactacacctgcagctgctaccccggcttctacggccccgagtgcgagtacgtgagagagtgcggcgagctggagctgccccagcacgtgctgatgaactgcagccaccccctgggcaacttcagcttcaacagccagtgcagcttccactgcaccgacggctaccaggtgaacggccccagcaagctggagtgcctggccagcggcatctggaccaacaagcccccccagtgcctggccgcccagtgcccccccctgaagatccccgagagaggcaacatgacctgcctgcacagcgccaaggccttccagcaccagagcagctgcagcttcagctgcgaggagggcttcgccctggtgggccccgaggtggtgcagtgcaccgccagcggcgtgtggaccgcccccgcccccgtgtgcaaggccatcagctgcgagcccctggagagccccgtgcacggcagcatggactgcagccccagcctgagagccttccagtacgacaccaactgcagcttcagatgcgccgagggcttcatgctgagaggcgccgacatcgtgagatgcgacaacctgggccagtggaccgcccccgcccccgtgtgccaggccctgcagtgccaggacctgcccgtgcccaacgaggccagagtgaactgcagccaccccttcggcgccttcagataccagagcgtgtgcagcttcacctgcaacgagggcctgctgctggtgggcgccagcgtgctgcagtgcctggccaccggcaactggaacagcgtgccccccgagtgccaggccatcccctgcacccccctgctgagcccccagaacggcaccatgacctgcgtgcagcccctgggcagcagcagctacaagagcacctgccagttcatctgcgacgagggctacagcctgagcggccccgagagactggactgcaccagaagcggcagatggaccgacagcccccccatgtgcgaggccatcaagtgccccgagctgttcgcccccgagcagggcagcctggactgcagcgacaccagaggcgagttcaacgtgggcagcacctgccacttcagctgcgacaacggcttcaagctggagggccccaacaacgtggagtgcaccaccagcggcagatggagcgccaccccccccacctgcaagggcatcgccagcctgcccacccccggcgtgcagtgccccgccctgaccacccccggccagggcaccatgtactgcagacaccaccccggcaccttcggcttcaacaccacctgctacttcggctgcaacgccggcttcaccctgatcggcgacagcaccctgagctgcagacccagcggccagtggaccgccgtgacccccgcctgcagagccgtgaagtgcagcgagctgcacgtgaacaagcccatcgccatgaactgcagcaacctgtggggcaacttcagctacggcagcatctgcagcttccactgcctggagggccagctgctgaacggcagcgcccagaccgcctgccaggagaacggccactggagcaccaccgtgcccacctgccaggccggccccctgaccatccaggaggccctgacctacttcggcggcgccgtggccagcaccatcggcctgatcatgggcggcaccctgctggccctgctgagaaagagattcagacagaaggacgacggcaagtgccccctgaacccccacagccacctgggcacctacggcgtgttcaccaacgccgccttcgaccccagcccctag

SEQ ID NO: 266661 - DNA, 2307 bp, Artificial Sequence
  derived and/or modified sequence
atggccaactgccagatcgccatcctgtaccagagattccagagagtggtgttcggcatcagccagctgctgtgcttcagcgccctgatcagcgagctgaccaaccagaaggaggtggccgcctggacctaccactacagcaccaaggcctacagctggaacatcagcagaaagtactgccagaacagatacaccgacctggtggccatccagaacaagaacgagatcgactacctgaacaaggtgctgccctactacagcagctactactggatcggcatcagaaagaacaacaagacctggacctgggtgggcaccaagaaggccctgaccaacgaggccgagaactgggccgacaacgagcccaacaacaagagaaacaacgaggactgcgtggagatctacatcaagagccccagcgcccccggcaagtggaacgacgagcactgcctgaagaagaagcacgccctgtgctacaccgccagctgccaggacatgagctgcagcaagcagggcgagtgcctggagaccatcggcaactacacctgcagctgctaccccggcttctacggccccgagtgcgagtacgtgagagagtgcggcgagctggagctgccccagcacgtgctgatgaactgcagccaccccctgggcaacttcagcttcaacagccagtgcagcttccactgcaccgacggctaccaggtgaacggccccagcaagctggagtgcctggccagcggcatctggaccaacaagcccccccagtgcctggccgtgcagtgccagcacctggaggcccccagcgagggcaccatggactgcgtgcaccccctgaccgccttcgcctacggcagcagctgcaagttcgagtgccagcccggctacagagtgagaggcctggacatgctgagatgcatcgacagcggccactggagcgcccccctgcccacctgcgaggccatcagctgcgagcccctggagagccccgtgcacggcagcatggactgcagccccagcctgagagccttccagtacgacaccaactgcagcttcagatgcgccgagggcttcatgctgagaggcgccgacatcgtgagatgcgacaacctgggccagtggaccgcccccgcccccgtgtgccaggccctgcagtgccaggacctgcccgtgcccaacgaggccagagtgaactgcagccaccccttcggcgccttcagataccagagcgtgtgcagcttcacctgcaacgagggcctgctgctggtgggcgccagcgtgctgcagtgcctggccaccggcaactggaacagcgtgccccccgagtgccaggccatcccctgcacccccctgctgagcccccagaacggcaccatgacctgcgtgcagcccctgggcagcagcagctacaagagcacctgccagttcatctgcgacgagggctacagcctgagcggccccgagagactggactgcaccagaagcggcagatggaccgacagcccccccatgtgcgaggccatcaagtgccccgagctgttcgcccccgagcagggcagcctggactgcagcgacaccagaggcgagttcaacgtgggcagcacctgccacttcagctgcgacaacggcttcaagctggagggccccaacaacgtggagtgcaccaccagcggcagatggagcgccaccccccccacctgcaagggcatcgccagcctgcccacccccggcgtgcagtgccccgccctgaccacccccggccagggcaccatgtactgcagacaccaccccggcaccttcggcttcaacaccacctgctacttcggctgcaacgccggcttcaccctgatcggcgacagcaccctgagctgcagacccagcggccagtggaccgccgtgacccccgcctgcagagccgtgaagtgcagcgagctgcacgtgaacaagcccatcgccatgaactgcagcaacctgtggggcaacttcagctacggcagcatctgcagcttccactgcctggagggccagctgctgaacggcagcgcccagaccgcctgccaggagaacggccactggagcaccaccgtgcccacctgccaggccggccccctgaccatccaggaggccctgacctacttcggcggcgccgtggccagcaccatcggcctgatcatgggcggcaccctgctggccctgctgagaaagagattcagacagaaggacgacggcaagtgccccctgaacccccacagccacctgggcacctacggcgtgttcaccaacgccgccttcgaccccagcccctag

SEQ ID NO: 266662 - DNA, 1941 bp, Artificial Sequence
  derived and/or modified sequence
atggccaactgccagatcgccatcctgtaccagagattccagagagtggtgttcggcatcagccagctgctgtgcttcagcgccctgatcagcgagctgaccaaccagaaggaggtggccgcctggacctaccactacagcaccaaggcctacagctggaacatcagcagaaagtactgccagaacagatacaccgacctggtggccatccagaacaagaacgagatcgactacctgaacaaggtgctgccctactacagcagctactactggatcggcatcagaaagaacaacaagacctggacctgggtgggcaccaagaaggccctgaccaacgaggccgagaactgggccgacaacgagcccaacaacaagagaaacaacgaggactgcgtggagatctacatcaagagccccagcgcccccggcaagtggaacgacgagcactgcctgaagaagaagcacgccctgtgctacaccgccagctgccaggacatgagctgcagcaagcagggcgagtgcctggagaccatcggcaactacacctgcagctgctaccccggcttctacggccccgagtgcgagtacgtgagagagtgcggcgagctggagctgccccagcacgtgctgatgaactgcagccaccccctgggcaacttcagcttcaacagccagtgcagcttccactgcaccgacggctaccaggtgaacggccccagcaagctggagtgcctggccagcggcatctggaccaacaagcccccccagtgcctggccgcccagtgcccccccctgaagatccccgagagaggcaacatgacctgcctgcacagcgccaaggccttccagcaccagagcagctgcagcttcagctgcgaggagggcttcgccctggtgggccccgaggtggtgcagtgcaccgccagcggcgtgtggaccgcccccgcccccgtgtgcaaggccatcagctgcgagcccctggagagccccgtgcacggcagcatggactgcagccccagcctgagagccttccagtacgacaccaactgcagcttcagatgcgccgagggcttcatgctgagaggcgccgacatcgtgagatgcgacaacctgggccagtggaccgcccccgcccccgtgtgccaggccctgcagtgccaggacctgcccgtgcccaacgaggccagagtgaactgcagccaccccttcggcgccttcagataccagagcgtgtgcagcttcacctgcaacgagggcctgctgctggtgggcgccagcgtgctgcagtgcctggccaccggcaactggaacagcgtgccccccgagtgccagggcaagagcatcgccagcctgcccacccccggcgtgcagtgccccgccctgaccacccccggccagggcaccatgtactgcagacaccaccccggcaccttcggcttcaacaccacctgctacttcggctgcaacgccggcttcaccctgatcggcgacagcaccctgagctgcagacccagcggccagtggaccgccgtgacccccgcctgcagagccgtgaagtgcagcgagctgcacgtgaacaagcccatcgccatgaactgcagcaacctgtggggcaacttcagctacggcagcatctgcagcttccactgcctggagggccagctgctgaacggcagcgcccagaccgcctgccaggagaacggccactggagcaccaccgtgcccacctgccaggccggccccctgaccatccaggaggccctgacctacttcggcggcgccgtggccagcaccatcggcctgatcatgggcggcaccctgctggccctgctgagaaagagattcagacagaaggacgacggcaagtgccccctgaacccccacagccacctgggcacctacggcgtgttcaccaacgccgccttcgaccccagcccctag

SEQ ID NO: 266663 - DNA, 1941 bp, Artificial Sequence
  derived and/or modified sequence
tgagccaactgccagatcgccatcctgtaccagagattccagagagtggtgttcggcatcagccagctgctgtgcttcagcgccctgatcagcgagctgaccaaccagaaggaggtggccgcctggacctaccactacagcaccaaggcctacagctggaacatcagcagaaagtactgccagaacagatacaccgacctggtggccatccagaacaagaacgagatcgactacctgaacaaggtgctgccctactacagcagctactactggatcggcatcagaaagaacaacaagacctggacctgggtgggcaccaagaaggccctgaccaacgaggccgagaactgggccgacaacgagcccaacaacaagagaaacaacgaggactgcgtggagatctacatcaagagccccagcgcccccggcaagtggaacgacgagcactgcctgaagaagaagcacgccctgtgctacaccgccagctgccaggacatgagctgcagcaagcagggcgagtgcctggagaccatcggcaactacacctgcagctgctaccccggcttctacggccccgagtgcgagtacgtgagagagtgcggcgagctggagctgccccagcacgtgctgatgaactgcagccaccccctgggcaacttcagcttcaacagccagtgcagcttccactgcaccgacggctaccaggtgaacggccccagcaagctggagtgcctggccagcggcatctggaccaacaagcccccccagtgcctggccgcccagtgcccccccctgaagatccccgagagaggcaacatgacctgcctgcacagcgccaaggccttccagcaccagagcagctgcagcttcagctgcgaggagggcttcgccctggtgggccccgaggtggtgcagtgcaccgccagcggcgtgtggaccgcccccgcccccgtgtgcaaggccatcagctgcgagcccctggagagccccgtgcacggcagcatggactgcagccccagcctgagagccttccagtacgacaccaactgcagcttcagatgcgccgagggcttcatgctgagaggcgccgacatcgtgagatgcgacaacctgggccagtggaccgcccccgcccccgtgtgccaggccctgcagtgccaggacctgcccgtgcccaacgaggccagagtgaactgcagccaccccttcggcgccttcagataccagagcgtgtgcagcttcacctgcaacgagggcctgctgctggtgggcgccagcgtgctgcagtgcctggccaccggcaactggaacagcgtgccccccgagtgccagggcaagagcatcgccagcctgcccacccccggcgtgcagtgccccgccctgaccacccccggccagggcaccatgtactgcagacaccaccccggcaccttcggcttcaacaccacctgctacttcggctgcaacgccggcttcaccctgatcggcgacagcaccctgagctgcagacccagcggccagtggaccgccgtgacccccgcctgcagagccgtgaagtgcagcgagctgcacgtgaacaagcccatcgccatgaactgcagcaacctgtggggcaacttcagctacggcagcatctgcagcttccactgcctggagggccagctgctgaacggcagcgcccagaccgcctgccaggagaacggccactggagcaccaccgtgcccacctgccaggccggccccctgaccatccaggaggccctgacctacttcggcggcgccgtggccagcaccatcggcctgatcatgggcggcaccctgctggccctgctgagaaagagattcagacagaaggacgacggcaagtgccccctgaacccccacagccacctgggcacctacggcgtgttcaccaacgccgccttcgaccccagcccctag

SEQ ID NO: 266664 - DNA, 2262 bp, Artificial Sequence
  derived and/or modified sequence
gtggtgttcggcatcagccagctgctgtgcttcagcgccctgatcagcgagctgaccaaccagaaggaggtggccgcctggacctaccactacagcaccaaggcctacagctggaacatcagcagaaagtactgccagaacagatacaccgacctggtggccatccagaacaagaacgagatcgactacctgaacaaggtgctgccctactacagcagctactactggatcggcatcagaaagaacaacaagacctggacctgggtgggcaccaagaaggccctgaccaacgaggccgagaactgggccgacaacgagcccaacaacaagagaaacaacgaggactgcgtggagatctacatcaagagccccagcgcccccggcaagtggaacgacgagcactgcctgaagaagaagcacgccctgtgctacaccgccagctgccaggacatgagctgcagcaagcagggcgagtgcctggagaccatcggcaactacacctgcagctgctaccccggcttctacggccccgagtgcgagtacgtgagagagtgcggcgagctggagctgccccagcacgtgctgatgaactgcagccaccccctgggcaacttcagcttcaacagccagtgcagcttccactgcaccgacggctaccaggtgaacggccccagcaagctggagtgcctggccagcggcatctggaccaacaagcccccccagtgcctggccgcccagtgcccccccctgaagatccccgagagaggcaacatgacctgcctgcacagcgccaaggccttccagcaccagagcagctgcagcttcagctgcgaggagggcttcgccctggtgggccccgaggtggtgcagtgcaccgccagcggcgtgtggaccgcccccgcccccgtgtgcaaggccatcagctgcgagcccctggagagccccgtgcacggcagcatggactgcagccccagcctgagagccttccagtacgacaccaactgcagcttcagatgcgccgagggcttcatgctgagaggcgccgacatcgtgagatgcgacaacctgggccagtggaccgcccccgcccccgtgtgccaggccctgcagtgccaggacctgcccgtgcccaacgaggccagagtgaactgcagccaccccttcggcgccttcagataccagagcgtgtgcagcttcacctgcaacgagggcctgctgctggtgggcgccagcgtgctgcagtgcctggccaccggcaactggaacagcgtgccccccgagtgccaggccatcccctgcacccccctgctgagcccccagaacggcaccatgacctgcgtgcagcccctgggcagcagcagctacaagagcacctgccagttcatctgcgacgagggctacagcctgagcggccccgagagactggactgcaccagaagcggcagatggaccgacagcccccccatgtgcgaggccatcaagtgccccgagctgttcgcccccgagcagggcagcctggactgcagcgacaccagaggcgagttcaacgtgggcagcacctgccacttcagctgcgacaacggcttcaagctggagggccccaacaacgtggagtgcaccaccagcggcagatggagcgccaccccccccacctgcaagggcatcgccagcctgcccacccccggcgtgcagtgccccgccctgaccacccccggccagggcaccatgtactgcagacaccaccccggcaccttcggcttcaacaccacctgctacttcggctgcaacgccggcttcaccctgatcggcgacagcaccctgagctgcagacccagcggccagtggaccgccgtgacccccgcctgcagagccgtgaagtgcagcgagctgcacgtgaacaagcccatcgccatgaactgcagcaacctgtggggcaacttcagctacggcagcatctgcagcttccactgcctggagggccagctgctgaacggcagcgcccagaccgcctgccaggagaacggccactggagcaccaccgtgcccacctgccaggccggccccctgaccatccaggaggccctgacctacttcggcggcgccgtggccagcaccatcggcctgatcatgggcggcaccctgctggccctgctgagaaagagattcagacagaaggacgacggcaagtgccccctgaacccccacagccacctgggcacctacggcgtgttcaccaacgccgccttcgaccccagcccctag

SEQ ID NO: 266665 - DNA, 1521 bp, Artificial Sequence
  derived and/or modified sequence
atggagttcctgaaggtcgccaggcggaataaacgcgaacagctggaacagattcagaaggagctcagtgtcctggaggaggacatcaagcgggttgaagagatgagtggcctatattctcctgtgtctgaggactcgaccgtcccccagtttgaggctccttccccctctcattccagcataatcgattcaacggagtactcacagcctcctggtttctccgggtcttcacaagccggcgtgcagtggcggtacttaggatccttacagccccccccccccagatataagcgatttagctgtctcaccctcccgagtagctgggattacaggcggttgcccccccacttaactaagaagcaaccatggtacaacagcacccttgccagtagacgcaaaagactgaccgcccatttcgaggacttggagcagtgctacttctcgactaggatgagccgcatctcagacgatagtaggacagccagtcagctagatgagtttcaggaatgcttgagcaaatttacccgttacaatagcgttagacctctggccaccctgtcctacgcatcggacctttataacggctcctcaatagtgagctccatcgagtttgaccgtgattgtgattattttgccattgcaggggtgactaaaaaaatcaaggtttacgagtatgatactgtgatacaggacgcggtggacatccactaccccgaaaacgagatgacgtgcaacagtaagataagctgcatctcttggtcctcataccataagaatcttctggcgtcctccgactacgagggaaccgtgattctatgggacgggttcactggacagcgtagtaaagtttaccaagaacacgaaaagagatgttggtccgtcgattttaatctgatggatccaaagcttctggcctctggctcggatgatgccaaagtcaaactatggtcaaccaacctcgataatagtgtggcttccatagaggcaaaagccaacgtctgctgcgtgaagttttcgcctagtagcaggtaccacttggcctttggatgtgccgatcattgtgtacactattacgatctgcggaataccaagcagccaataatggtgtttaaaggacaccgcaaagcagtaagttacgcaaaattcgttagtggcgaagagatcgtttcagcttctaccgatagccagttaaagctgtggaatgttggcaagccgtattgcctgcggtcgttcaagggtcatattaatgagaaaaacttcgtgggacttgctagtaacggggattatattgcctgtgggtcggaaaacaactccttgtacttgtattacaaagggctctcaaagaccctacttacattcaagttcgacacagtgaagagcgtgttggataaggataggaaggaggacgataccaatgaatttgtgagcgccgtttgttggcgggcactccccgacggggagagcaacgtgctgatcgccgcaaactcgcaaggcaccattaaggttttggctctcctttag

SEQ ID NO: 266666 - DNA, 1521 bp, Artificial Sequence
  derived and/or modified sequence
atggagttcctgaaggtggcccggaggaacaagcgggagcagctggagcagatccagaaggagctgtctgtgctggaggaggacatcaagagggtggaggagatgagcggcctgtacagccctgtgtctgaggacagcacagtgccccagtttgaggcccccagccccagccacagcagcatcatcgacagcacagagtacagccagcccccaggcttcagcggcagcagccaggccggcgtgcagtggagatacctgggcagcctgcagcccccaccaccccgctacaagcgcttcagctgcctgaccctgcccagctcctgggactacagaaggctgcccccccacctgaccaagaagcagccctggtacaacagcaccctggccagcaggaggaagaggctgacagcccactttgaggacctggagcagtgctacttcagcaccaggatgagccgcatcagtgatgacagcaggacagccagccagctggatgagttccaggagtgcctgagcaagttcacccgctacaacagcgtgcggcccctggccaccctgtcctatgccagtgacctgtacaacggcagcagcatcgtgagcagcattgaatttgaccgggactgtgactactttgccatcgccggcgtgaccaagaagatcaaggtgtatgaatatgacaccgtcatccaggatgctgtggacatccactacccagaaaatgagatgacctgcaacagcaagatcagctgcatctcctggagcagctaccacaagaacctgctggccagcagtgactatgagggcaccgtcatcctgtgggatggcttcaccggccagaggagcaaggtgtaccaggagcacgagaagcgctgctggagcgtggacttcaacctgatggaccccaagctgctggccagcggcagtgatgatgccaaggtgaagctgtggagcaccaacctggacaacagcgtggccagcattgaggccaaggccaacgtgtgctgcgtgaagttcagccccagcagccgctaccacctggccttcggctgtgccgaccactgtgtgcactactatgacctgaggaacaccaagcagcccatcatggtgttcaagggccacaggaaggctgtgtcctatgccaagtttgtgtctggagaggagatcgtgtctgccagcacagacagccagctgaagctgtggaatgtgggcaagccctactgcctgcggagcttcaagggccacatcaatgagaagaactttgtgggcctggccagcaatggagactacatcgcctgtggcagcgagaacaacagcctgtacctgtactacaagggcctgagcaagaccctgctgaccttcaagtttgacacagtgaagtctgtgctggacaaggacaggaaggaggatgacaccaatgaatttgtgtctgctgtgtgctggagggccctgcctgatggagagagcaatgtgctgattgctgccaacagccagggcaccatcaaggtgctggccctgctgtag

SEQ ID NO: 266667 - DNA, 1521 bp, Artificial Sequence
  derived and/or modified sequence
atggagttcctgaaggtggcccggcggaacaagcgggagcagctggaacagatacagaaggagctctccgtccttgaggaggatatcaagcgggttgaagagatgtccggcctatattcccctgtgtccgaagactctacggttccacaatttgaggccccttctccatcccattcctctatcatcgactcaaccgagtattctcagccccctgggtttagcgggtcgtcccaagccggtgttcagtggcgctacctcgggtcactgcagcccccgccgccccgctacaagcgtttcagttgcctgacactgccaagctcctgggattacagaagactacccccccatttgaccaaaaagcaaccgtggtataattctaccctggcttcccgccgcaagaggctgactgctcacttcgaagatctcgagcaatgttatttttcaacacgcatgagccggatctctgatgacagtagaacggctagccaacttgatgaatttcaagagtgtctctcaaagtttactcggtacaacagtgtgagacccctcgccactctgtcatacgcaagtgatctttataatggaagctctatcgtttcaagtatcgaattcgacagagactgtgactattttgccatagctggcgtgaccaagaaaattaaagtgtacgagtacgatactgtgattcaggatgcggtggacatacattacccggaaaacgagatgacatgtaactcgaagatttcttgcattagctggagttcataccacaaaaatctcctggccagcagtgactatgaaggcaccgtgatcctttgggacggcttcaccgggcagcggtccaaggtgtatcaggagcacgagaagcgctgctggtctgttgacttcaatctgatggaccccaagcttctggcatcagggagtgacgatgctaaggtgaagctatggagcactaaccttgataattctgtcgccagcatagaggcaaaagctaacgtgtgctgtgtcaagtttagtcctagtagtagatatcacctggcctttgggtgtgccgatcactgcgttcactattacgatcttcggaacaccaagcagcccatcatggtgttcaagggccacaggaaggctgtgtcctatgctaaatttgtatccggagaggaaatagtttcagcaagtaccgattcccagcttaaactgtggaacgtgggtaaaccgtactgtttacgcagtttcaaaggacatattaacgagaagaacttcgtcggattggccagcaatggcgactacatcgcttgcggcagcgaaaacaattcattgtacctgtattacaaagggctgagcaagaccctgttgacgtttaaattcgatactgtgaagtcagtgcttgataaggaccgaaaggaggacgataccaatgagttcgtatctgccgtctgctggagggctttaccagatggagagtccaatgtgttgattgctgcaaactcccaaggtactattaaagttctggctcttttatag

SEQ ID NO: 266668 - DNA, 1521 bp, Artificial Sequence
  derived and/or modified sequence
atggaattcctgaaggtggccagacgaaacaaaagagagcagctcgagcaaattcagaaggagctgtcagtactagaggaggatataaaacgggtggaggagatgtctggtctgtattctcccgtgtccgaagattctaccgtgcctcagttcgaggctcctagcccaagtcattcctcaattatcgactcaaccgagtactcccaacctcctggattttcaggaagcagtcaggctggggtgcagtggcgatacttaggtagtctccagccaccccctcccagatataaacgcttctcctgccttacacttccttctagctgggactaccgtcgtctgccaccgcatctcaccaagaaacagccctggtataactccaccctcgcctctcgcagaaaacggctgactgcccattttgaggaccttgaacaatgctatttctctactcgcatgagcagaatttcagacgatagtaggacagcttctcaactcgacgaatttcaggagtgcctgtcaaagtttacgagatacaatagtgtgcgccctctcgctaccctttcatatgcctccgacctctacaacggcagtagtattgtgtcttccattgaatttgatagagattgcgactacttcgctattgctggcgttaccaaaaaaataaaagtgtatgagtatgacactgtgatacaggatgccgttgacattcactaccccgaaaatgagatgacatgcaatagcaagatttcttgcattagttggagcagctatcacaagaatctgctggcgtcatctgactatgaggggaccgtaatactctgggacggattcactgggcaacgcagtaaggtctatcaggagcacgagaaaagatgctggtcagtggatttcaatttaatggaccctaaacttttggcctccgggagcgatgatgcgaaggtgaagctttggagcactaacctagataattccgtcgccagcatcgaggcaaaggccaacgtctgttgcgtcaaatttagccccagctctcgctatcaccttgcgttcggttgcgcagatcactgcgtgcactactatgatcttcggaacacaaagcagccaatcatggttttcaagggacacagaaaagccgtaagctatgcgaagtttgtgagtggtgaagaaattgtgtcagccagcacagattcccagcttaagctctggaatgttggaaaaccctattgcctgaggagctttaagggacatatcaacgaaaaaaatttcgttggactggcatctaacggcgactacatcgcgtgcggtagcgagaacaatagcctgtatttgtactataagggcttgtctaaaaccctgctcaccttcaaatttgacacagtgaagtccgtgctggacaaggaccgaaaggaggatgacacaaatgagtttgtgagcgctgtgtgctggcgggcactgccggacggcgagtctaacgtcttgattgccgctaacagtcaggggactatcaaggtgctagcgctgctctag

SEQ ID NO: 266669 - DNA, 1521 bp, Artificial Sequence
  derived and/or modified sequence
atggagttcctgaaggtggccagaagaaacaagagagagcagctggagcagatccagaaggagctgagcgtgctggaggaggacatcaagagagtggaggagatgagcggcctgtacagccccgtgagcgaggacagcaccgtgccccagttcgaggcccccagccccagccacagcagcatcatcgacagcaccgagtacagccagccccccggcttcagcggcagcagccaggccggcgtgcagtggagatacctgggcagcctgcagccccccccccccagatacaagagattcagctgcctgaccctgcccagcagctgggactacagaagactgcccccccacctgaccaagaagcagccctggtacaacagcaccctggccagcagaagaaagagactgaccgcccacttcgaggacctggagcagtgctacttcagcaccagaatgagcagaatcagcgacgacagcagaaccgccagccagctggacgagttccaggagtgcctgagcaagttcaccagatacaacagcgtgagacccctggccaccctgagctacgccagcgacctgtacaacggcagcagcatcgtgagcagcatcgagttcgacagagactgcgactacttcgccatcgccggcgtgaccaagaagatcaaggtgtacgagtacgacaccgtgatccaggacgccgtggacatccactaccccgagaacgagatgacctgcaacagcaagatcagctgcatcagctggagcagctaccacaagaacctgctggccagcagcgactacgagggcaccgtgatcctgtgggacggcttcaccggccagagaagcaaggtgtaccaggagcacgagaagagatgctggagcgtggacttcaacctgatggaccccaagctgctggccagcggcagcgacgacgccaaggtgaagctgtggagcaccaacctggacaacagcgtggccagcatcgaggccaaggccaacgtgtgctgcgtgaagttcagccccagcagcagataccacctggccttcggctgcgccgaccactgcgtgcactactacgacctgagaaacaccaagcagcccatcatggtgttcaagggccacagaaaggccgtgagctacgccaagttcgtgagcggcgaggagatcgtgagcgccagcaccgacagccagctgaagctgtggaacgtgggcaagccctactgcctgagaagcttcaagggccacatcaacgagaagaacttcgtgggcctggccagcaacggcgactacatcgcctgcggcagcgagaacaacagcctgtacctgtactacaagggcctgagcaagaccctgctgaccttcaagttcgacaccgtgaagagcgtgctggacaaggacagaaaggaggacgacaccaacgagttcgtgagcgccgtgtgctggagagccctgcccgacggcgagagcaacgtgctgatcgccgccaacagccagggcaccatcaaggtgctggccctgctgtag

SEQ ID NO: 266670 - DNA, 345 bp, Artificial Sequence
  derived and/or modified sequence
ctggcatcacggcttgggccagtctccacagctaacatgtcccgtccagtccggaaccgcaaggttgtggactactctcagtttcaggagagtgatgatgctgattttgaatccgaggacagcgaggacaaagatgttaagactaagaaggatgactcacacagcgccgaggactccgaggatgagaaagaagatcataaaaacgtgcgacaacagagacaggccgcctctaaagcggcctctaagcagcgtgagatgctcatggaggatgtgggcagcgaggaggagcaagaggaagaggatgaggccccatttcaggaacgaaaggacagcttctcacagtag

SEQ ID NO: 266671 - DNA, 345 bp, Artificial Sequence
  derived and/or modified sequence
ctggccagccggctgggccctgtgtccacagccaacatgagcaggcctgtgaggaacaggaaggtggtggactacagccagttccaggagagtgatgatgctgactttgaaagtgaagattctgaggacaaggatgtgaagaccaagaaggatgacagccacagcgcagaagattctgaagatgagaaggaggaccacaagaatgtgcggcagcagaggcaggccgccagcaaggccgccagcaagcagcgggagatgctgatggaggatgtgggcagcgaggaggagcaggaggaggaggatgaggcccccttccaggagaggaaggacagcttcagccagtag

SEQ ID NO: 266672 - DNA, 345 bp, Artificial Sequence
  derived and/or modified sequence
ctggccagccggctgggccccgtgagcaccgccaacatgagccggcctgtgcgtaacaggaaggtggttgactactctcagttccaggagtccgacgatgccgatttcgaaagcgaagatagtgaggataaggatgtaaaaacaaaaaaagatgattcacattccgcagaggattctgaagatgagaaagaggatcacaagaatgtgcgtcagcagcgccaggctgccagcaaggctgcaagtaagcaacgggagatgctgatggaggatgttggctcggaggaggaacaagaagaagaagatgaggctccttttcaagaaagaaaagattccttcagccagtag

SEQ ID NO: 266673 - DNA, 498 bp, Artificial Sequence
  derived and/or modified sequence
gggggagcggggggctcgtctgttccaggagccctgaaccaaagagcagcggagtttgagaagccagcagctcggggttcggcagcagcggtcccatcggctgaagttcggggggggtggggcgccgagcgcgcggggtggggggggtcctggtctttggcttctcgactcggtcctgtttcgacagcgaacatgtcgcggcctgtcagaaataggaaggttgttgattactcacagtttcaggaatctgatgatgcagattttgagagtgaggactcagaagacaaagatgtgaagaccaagaaggatgattctcactcagcagaggatagtgaagatgaaaaagaagatcataaaaatgtgcgccaacaacggcaggcggcatctaaagcagcttctaaacagagagagatgctcatggaagatgtgggcagtgaggaagaacaagaagaggaggatgaggcaccattccaggagagaaaagactccttctcccaa

SEQ ID NO: 266674 - DNA, 345 bp, Artificial Sequence
  derived and/or modified sequence
ctcgcatccagattgggaccggttagtactgcaaacatgtcaagacccgtgaggaaccggaaggtggtcgattattctcaatttcaggaatctgatgatgcagacttcgagtctgaagactctgaggacaaagatgtaaaaacaaaaaaggatgacagccactccgccgaggactctgaagacgaaaaagaagaccataaaaacgtgaggcaacagaggcaggccgcttctaaggctgcatcaaagcagcgggaaatgctgatggaggatgtcggaagtgaagaggagcaagaagaggaagacgaggccccattccaggagaggaaggacagcttctctcagtag

SEQ ID NO: 266675 - DNA, 345 bp, Artificial Sequence
  derived and/or modified sequence
ctggccagcagactgggccccgtgagcaccgccaacatgagcagacccgtgagaaacagaaaggtggtggactacagccagttccaggagagcgacgacgccgacttcgagagcgaggacagcgaggacaaggacgtgaagaccaagaaggacgacagccacagcgccgaggacagcgaggacgagaaggaggaccacaagaacgtgagacagcagagacaggccgccagcaaggccgccagcaagcagagagagatgctgatggaggacgtgggcagcgaggaggagcaggaggaggaggacgaggcccccttccaggagagaaaggacagcttcagccagtag

SEQ ID NO: 266676 - protein, 305 aa, Artificial Sequence
  derived and/or modified sequence
MDPKGLLSLTFVLFLSLAFGASYGTGGRMMNCPKILRQLGSKVLLPLTYERINKSMNKSIHIVVTMAKSLENSVENKIVSLDPSEAGPPRYLGDRYKFYLENLTLGIRESRKEDEGWYLMTLEKNVSVQRFCLQLRLYEQVSTPEIKVLNKTQENGTCTLILGCTVEKGDHVAYSWSEKAGTHPLNPANSSHLLSLTLGPQHADNIYICTVSNPISNNSQTFSPWPGCRTDPSGKTNHYQTTVEKKSLTIYAQVQKPGPLQKKLDSFPAQDPCTTIYVAATEPVPESVQETNSITVYASVTLPES

SEQ ID NO: 266677 - protein, 144 aa, Artificial Sequence
  derived and/or modified sequence
MDPKGLLSLTFVLFLSLAFGASYGTGGRMMNCPKILRQLGSKVLLPLTYERINKSMNKSIHIVVTMAKSLENSVENKIVSLDPSEAGPPRYLGDRYKFYLENLTLGIRESRKEDEGWYLMTLEKSLHFGYLYFVLGADHDNLQT

SEQ ID NO: 266678 - DNA, 918 bp, Artificial Sequence
  derived and/or modified sequence
atggatcccaaagggcttctcagcctgacgtttgtacttttcttgtcattggcctttggagcatcttatgggaccggaggaaggatgatgaactgtcccaagatactgcgtcaactgggaagcaaggtgctgctccccctgacctacgaacggataaataagtctatgaacaaatctatccacattgtggtcaccatggcaaagagcttagagaactctgtagagaacaagattgtatcccttgacccctcggaggcagggcctcctcgttacctgggagaccgatacaaattctatctggaaaacttgacactggggatccgggaaagccgcaaggaggatgaggggtggtatctgatgacactggagaagaacgtgtcggtgcagaggttctgtttgcagctgcggctgtacgaacaggtgtccacgccagagataaaagtgttgaacaagactcaggaaaacgggacttgcacccttatcctgggttgtaccgtcgagaaaggagatcatgtcgcttattcctggtcagaaaaagcgggtacccaccctttgaacccagctaatagctcgcacctgctaagcctgactttgggcccacagcatgctgacaatatctacatatgcaccgtgagcaatcccataagcaataacagccagacattctccccttggcccgggtgccgaactgatccctccggaaaaacgaaccactaccagaccactgtggaaaaaaaaagcctaaccatttacgcccaagtccagaaaccaggtcccctgcagaagaagcttgattcttttcccgcccaggatccgtgtactactatttatgtggccgcaacagaaccagtacccgagagcgtgcaagagactaattctattaccgtatatgcttctgtgacacttccggagtcctag

SEQ ID NO: 266679 - DNA, 918 bp, Artificial Sequence
  derived and/or modified sequence
atggaccccaagggcctgctgagcctgacctttgtgctcttcctgagcctggcctttggagccagctatggaactggaggccgcatgatgaactgccccaagatcctgcggcagctgggcagcaaggtgctgctgcccctgacctatgagcgcatcaacaagtccatgaacaagagcatccacatcgtggtgaccatggccaagagcctggagaacagcgtggagaacaagatcgtgtccctggaccccagcgaggccggccccccacgctacctgggggaccgctacaagttctacctggagaacctgaccctgggcatccgggagagcaggaaagaagatgagggctggtacctgatgaccctggagaagaatgtgtctgtgcagcgcttctgcctgcagctgcggctgtatgagcaggtgtccaccccagagatcaaggtgctgaacaagacccaggagaatggcacctgcaccctcatcctgggctgcaccgtggagaagggggaccacgtggcctacagctggagcgagaaggccggcacccaccccctgaacccagccaacagcagccacctgctgagcctgaccctgggcccccagcacgccgacaacatctacatctgcaccgtgagcaaccccatcagcaacaacagccagaccttcagcccctggccaggctgcaggacagaccccagcggcaagaccaaccactaccagaccaccgtggagaagaagagcctgaccatctatgcccaggtgcagaagccaggccccctgcagaagaagctggacagcttccctgcccaggacccctgcaccaccatctacgtggccgccacagagcctgtgcctgagagcgtgcaggagaccaacagcatcaccgtgtatgcctctgtgaccctgcctgagagctag

SEQ ID NO: 266680 - DNA, 918 bp, Artificial Sequence
  derived and/or modified sequence
atggaccccaagggcctgctgagcctgaccttcgtgctgttcctgagcttggcctttggggcttcatatggaaccggcggccgaatgatgaattgtccgaaaattttaagacaactagggtctaaagtactgctgcctctgacttacgaaagaattaataagtcgatgaataagagtatccacatagtcgtcactatggcaaagagtttggagaactcagtcgaaaataaaatcgtctccctggacccgtcagaagcaggccctcctagatatctgggggaccgttacaaattctaccttgaaaacctaacacttggcattcgggagagccggaaggaagacgaggggtggtacctcatgaccttggagaaaaacgtctctgtccagagattttgccttcagctccgcctgtacgagcaggtttctactcccgagatcaaagtactcaacaagacccaggaaaatgggacatgcacgctgatcttaggttgcactgtcgaaaaaggcgaccacgttgcatatagttggtctgagaaggcaggcacccaccccttaaacccagccaattcttcccaccttctatcattaacactggggccacagcatgccgataacatctatatctgcaccgtatcaaatccgatatcaaacaacagtcagacctttagcccatggccagggtgtcggaccgacccatccggcaaaacaaatcattatcaaacgacagtggagaagaaatccctgactatttatgcacaggtacagaaacccggaccgcttcagaaaaagttggattcattcccggcccaggatccttgcaccactatatatgtcgcagccactgagccggtgcccgaaagcgttcaggagaccaatagcattaccgtgtatgcttcagtgactctcccggaatcctag

SEQ ID NO: 266681 - DNA, 918 bp, Artificial Sequence
  derived and/or modified sequence
atggacccaaagggccttctttccctcaccttcgtgctgtttctatctctcgcatttggcgcatcttacgggacagggggtagaatgatgaactgtccaaagatattgagacagttgggatccaaagtgctattacccctcacatatgaaagaattaacaaaagtatgaacaagagcatccacattgtagtcacaatggcgaaatccttagaaaactcggtggaaaacaagatagtgagcctggatccctcagaagcaggccctccccgatacctaggcgacagatacaagttctatctggaaaatctgactctgggcatcagagaatctcgcaaggaggatgaagggtggtacttgatgaccctcgaaaagaacgtgtccgttcaacgcttctgtctccagcttaggttgtatgaacaggttagcacgccggagattaaggtgctgaataagacgcaggaaaacggaacttgcactctcattctcggttgtaccgtggagaagggcgaccatgtggcctatagttggtccgagaaggccggaacacaccccctgaacccagcgaatagttcacacctgttgagcctcactctgggccctcagcatgccgataacatttatatttgtactgtgagcaaccccatctcgaataattcacagacgttctccccctggcccggatgcagaacagatccttcaggcaagacaaaccactatcaaaccaccgtggaaaaaaagagcctaacaatctacgcccaggtccagaagcccggacctctgcagaaaaagctcgactccttcccggcacaggatccttgtacaaccatatatgtcgccgctaccgaacctgtgcccgaatccgtgcaggagaccaactccattacagtgtacgcttcagtcacgcttcctgagagctag

SEQ ID NO: 266682 - DNA, 1910 bp, Artificial Sequence
  derived and/or modified sequence
acagctaaggaaagaagctggggcgcatgtttctgcccaaagccgggttttggccgaggtgactacacaccccctttcctggctcccataggctaagtgcctggcttcttgagaagcctgcttcttgagaacaaaaaagtgatttaaagcctcatgggagatgagcaatcctcaagacacaagcagaaaaagtcccagtgatacaggaagcgggttcaggaacctgctggttcctgatacataaatcagacagcctctgctgcatgacacgaagcttgcttctgcctggcatctgtgagcagctgccaggctccggccaggatcccttccttctcctcattggctgatggatcccaaggggctcctctccttgaccttcgtgctgtttctctccctggcttttggggcaagctacggaacaggtgggcgcatgatgaactgcccaaagattctccggcagttgggaagcaaagtgctgctgcccctgacatatgaaaggataaataagagcatgaacaaaagcatccacattgtcgtcacaatggcaaaatcactggagaacagtgtcgagaacaaaatagtgtctcttgatccatccgaagcaggccctccacgttatctaggagatcgctacaagttttatctggagaatctcaccctggggatacgggaaagcaggaaggaggatgagggatggtaccttatgaccctggagaaaaatgtttcagttcagcgcttttgcctgcagttgaggctttatgagcaggtctccactccagaaattaaagttttaaacaagacccaggagaacgggacctgcaccttgatactgggctgcacagtggagaagggggaccatgtggcttacagctggagtgaaaaggcgggcacccacccactgaacccagccaacagctcccacctcctgtccctcaccctcggcccccagcatgctgacaatatctacatctgcaccgtgagcaaccctatcagcaacaattcccagaccttcagcccgtggcccggatgcaggacagacccctcaggtaaaacgaaccattaccagacaacagtggaaaaaaaaagccttacgatctatgcccaagtccagaaaccaggtcctcttcagaagaaacttgactccttcccagctcaggacccttgcaccaccatatatgttgctgccacagagcctgtcccagagtctgtccaggaaacaaattccatcacagtctatgctagtgtgacacttccagagagctgacaccagagaccaacaaagggactttctgaaggaaaatggaaaaaccaaaatgaacactgaacttggccacaggccccaagtttcctctggcagacatgctgcacgtctgtacccttctcagatcaactccctggtgatgtttcttccacatacatctgtgaaatgaacaaggaagtgaggcttcccaagaatttagcttgctgtgcagtggctgcaggcgcagaacagagcgttacttgataacagcgttccatctttgtgttgtagcagatgaaatggacagtaatgtgagttcagactttgggcatcttgctcttggctggaactggataataaaaatcagactgaaagccaggacatctgagtacctatctcacacactggaccaccagtcacaaagtctggaaaagtttacattttggctatctttactttgttctgggagctgatcatgataacctgcagacctgatcaagcctctgtgcctcagtttctctctcaggataaagagtgaatagaggctgaagggtgaatttcttattatacataaaacactctgatattattgtataaaggaagctaagaatattattttatttgcaaaacccagaagctaaaaagtcaataaacagaaagaatgattttg

SEQ ID NO: 266683 - DNA, 918 bp, Artificial Sequence
  derived and/or modified sequence
atggaccccaagggcctgctgagcctgaccttcgtgctgttcctgagcctggccttcggcgccagctacggcaccggcggcagaatgatgaactgccccaagatcctgagacagctgggcagcaaggtgctgctgcccctgacctacgagagaatcaacaagagcatgaacaagagcatccacatcgtggtgaccatggccaagagcctggagaacagcgtggagaacaagatcgtgagcctggaccccagcgaggccggcccccccagatacctgggcgacagatacaagttctacctggagaacctgaccctgggcatcagagagagcagaaaggaggacgagggctggtacctgatgaccctggagaagaacgtgagcgtgcagagattctgcctgcagctgagactgtacgagcaggtgagcacccccgagatcaaggtgctgaacaagacccaggagaacggcacctgcaccctgatcctgggctgcaccgtggagaagggcgaccacgtggcctacagctggagcgagaaggccggcacccaccccctgaaccccgccaacagcagccacctgctgagcctgaccctgggcccccagcacgccgacaacatctacatctgcaccgtgagcaaccccatcagcaacaacagccagaccttcagcccctggcccggctgcagaaccgaccccagcggcaagaccaaccactaccagaccaccgtggagaagaagagcctgaccatctacgcccaggtgcagaagcccggccccctgcagaagaagctggacagcttccccgcccaggacccctgcaccaccatctacgtggccgccaccgagcccgtgcccgagagcgtgcaggagaccaacagcatcaccgtgtacgccagcgtgaccctgcccgagagctag

SEQ ID NO: 266684 - DNA, 435 bp, Artificial Sequence
  derived and/or modified sequence
atggacccgaagggacttctttctctcacctttgtcttattcctgagcctggccttcggggcctcctatggtactggtggtcgaatgatgaattgcccaaagattttgagacagctgggtagcaaagtactcctgccgctgacttacgaaaggattaataaatcaatgaataagtccattcacatagtcgtgactatggctaagagcctagaaaactctgtggaaaacaagattgtgtcactcgaccctagtgaggctgggcctcctcgctatctaggcgaccgctataagttctatctggaaaacctcactcttggtatccgggagtcacggaaggaggacgagggatggtatctgatgaccctggagaagtccctccatttcggatatctgtactttgtcctgggagccgaccatgataatttgcagacttag

SEQ ID NO: 266685 - DNA, 435 bp, Artificial Sequence
  derived and/or modified sequence
atggaccccaagggcctgctgagcctgacctttgtgctcttcctgagcctggcctttggagccagctatggaactggaggccgcatgatgaactgccccaagatcctgcggcagctgggcagcaaggtgctgctgcccctgacctatgagcgcatcaacaagtccatgaacaagagcatccacatcgtggtgaccatggccaagagcctggagaacagcgtggagaacaagatcgtgtccctggaccccagcgaggccggccccccacgctacctgggggaccgctacaagttctacctggagaacctgaccctgggcatccgggagagcaggaaagaagatgagggctggtacctgatgaccctggagaagagcctgcacttcggctacctgtactttgtgctgggcgctgaccatgacaacctgcagacctag

SEQ ID NO: 266686 - DNA, 435 bp, Artificial Sequence
  derived and/or modified sequence
atggaccccaagggcctgctgagcctgaccttcgtgctgttcctgagtttagccttcggcgcatcctatggaaccggaggcaggatgatgaactgccccaaaattctgcggcagctggggtccaaggttttactcccgctgacctatgaacgtatcaataagagcatgaataagtctatacacatagtcgtaaccatggccaagagccttgaaaactcggtggagaacaagattgtaagcctcgatccgtctgaagccggccctccccgctacctgggagatagatataagttctacctggagaacctgacgttgggaattagagagagtcgtaaggaagatgagggctggtacttgatgacattagagaaatcgctgcattttggttacctgtattttgtgttaggcgctgatcatgacaatctacagacatag

SEQ ID NO: 266687 - DNA, 435 bp, Artificial Sequence
  derived and/or modified sequence
atggatccaaaagggctgctgtcactcacgttcgtgctgttcctaagtctggcgtttggcgcatcctatggcactgggggaagaatgatgaattgccccaaaatcttgagacaactcggctccaaagtgctgttacccctgacatatgagcggatcaacaaatctatgaacaaaagcatccacattgtcgtcacaatggcaaagtccctggagaacagtgtggagaataaaatcgtgtcattggatccatctgaagccggacctccaaggtatctcggtgatcgttacaagttctacctcgagaacctgacactgggtatcagggaatcgcgcaaagaggacgagggttggtatctgatgacgctcgagaaaagtctccatttcggctacctctacttcgtcctcggcgctgaccatgacaacttacagacttag

SEQ ID NO: 266688 - DNA, 883 bp, Artificial Sequence
  derived and/or modified sequence
ggagacagctaaggaaagaagctggggcgcatgtttctgcccaaagccgggttttggccgaggtgactacacaccccctttcctggctcccataggctaagtgcctggcttcttgagaagcctgcttcttgagaacaaaaaagtgatttaaagcctcatgggagatgagcaatcctcaagacacaagcagaaaaagtcccagtgatacaggaagcgggttcaggaacctgctggttcctgatacataaatcagacagcctctgctgcatgacacgaagcttgcttctgcctggcatctgtgagcagctgccaggctccggccaggatcccttccttctcctcattggctgatggatcccaaggggctcctctccttgaccttcgtgctgtttctctccctggcttttggggcaagctacggaacaggtgggcgcatgatgaactgcccaaagattctccggcagttgggaagcaaagtgctgctgcccctgacatatgaaaggataaataagagcatgaacaaaagcatccacattgtcgtcacaatggcaaaatcactggagaacagtgtcgagaacaaaatagtgtctcttgatccatccgaagcaggccctccacgttatctaggagatcgctacaagttttatctggagaatctcaccctggggatacgggaaagcaggaaggaggatgagggatggtaccttatgaccctggagaaaagtttacattttggctatctttactttgttctgggagctgatcatgataacctgcagacctgatcaagcctctgtgcctcagtttctctctcaggataaagagtgaatagaggctgaagggtgaatttcttattatacataaaacactctgatattattgt

SEQ ID NO: 266689 - DNA, 435 bp, Artificial Sequence
  derived and/or modified sequence
atggaccccaagggcctgctgagcctgaccttcgtgctgttcctgagcctggccttcggcgccagctacggcaccggcggcagaatgatgaactgccccaagatcctgagacagctgggcagcaaggtgctgctgcccctgacctacgagagaatcaacaagagcatgaacaagagcatccacatcgtggtgaccatggccaagagcctggagaacagcgtggagaacaagatcgtgagcctggaccccagcgaggccggcccccccagatacctgggcgacagatacaagttctacctggagaacctgaccctgggcatcagagagagcagaaaggaggacgagggctggtacctgatgaccctggagaagagcctgcacttcggctacctgtacttcgtgctgggcgccgaccacgacaacctgcagacctag

SEQ ID NO: 266690 - protein, 521 aa, Artificial Sequence
  derived and/or modified sequence
MNINDLKLTLSKAGQEHLLRFWNELEEAQQVELYAELQAMNFEELNFFFQKAIEGFNQSSHQKNVDARMEPVPREVLGSATRDQDQLQAWESEGLFQISQNKVAVLLLAGGQGTRLGVAYPKGMYDVGLPSRKTLFQIQAERILKLQQVAEKYYGNKCIIPWYIMTSGRTMESTKEFFTKHKYFGLKKENVIFFQQGMLPAMSFDGKIILEEKNKVSMAPDGNGGLYRALAAQNIVEDMEQRGIWSIHVYCVDNILVKVADPRFIGFCIQKGADCGAKVVEKTNPTEPVGVVCRVDGVYQVVEYSEISLATAQKRSSDGRLLFNAGNIANHFFTVPFLRDVVNVYEPQLQHHVAQKKIPYVDTQGQLIKPDKPNGIKMEKFVFDIFQFAKKFVVYEVLREDEFSPLKNADSQNGKDNPTTARHALMSLHHCWVLNAGGHFIDENGSRLPAIPRATNGKSETITADVNHNLKDANDVPIQCEISPLISYAGEGLESYVADKEFHAPLIIDENGVHELVKNGI

SEQ ID NO: 266691 - DNA, 1566 bp, Artificial Sequence
  derived and/or modified sequence
atgaacatcaacgacctgaagctgaccctgagcaaggccggccaggagcacctgctgagattctggaacgagctggaggaggcccagcaggtggagctgtacgccgagctgcaggccatgaacttcgaggagctgaacttcttcttccagaaggccatcgagggcttcaaccagagcagccaccagaagaacgtggacgccagaatggagcccgtgcccagagaggtgctgggcagcgccaccagagaccaggaccagctgcaggcctgggagagcgagggcctgttccagatcagccagaacaaggtggccgtgctgctgctggccggcggccagggcaccagactgggcgtggcctaccccaagggcatgtacgacgtgggcctgcccagcagaaagaccctgttccagatccaggccgagagaatcctgaagctgcagcaggtggccgagaagtactacggcaacaagtgcatcatcccctggtacatcatgaccagcggcagaaccatggagagcaccaaggagttcttcaccaagcacaagtacttcggcctgaagaaggagaacgtgatcttcttccagcagggcatgctgcccgccatgagcttcgacggcaagatcatcctggaggagaagaacaaggtgagcatggcccccgacggcaacggcggcctgtacagagccctggccgcccagaacatcgtggaggacatggagcagagaggcatctggagcatccacgtgtactgcgtggacaacatcctggtgaaggtggccgaccccagattcatcggcttctgcatccagaagggcgccgactgcggcgccaaggtggtggagaagaccaaccccaccgagcccgtgggcgtggtgtgcagagtggacggcgtgtaccaggtggtggagtacagcgagatcagcctggccaccgcccagaagagaagcagcgacggcagactgctgttcaacgccggcaacatcgccaaccacttcttcaccgtgcccttcctgagagacgtggtgaacgtgtacgagccccagctgcagcaccacgtggcccagaagaagatcccctacgtggacacccagggccagctgatcaagcccgacaagcccaacggcatcaagatggagaagttcgtgttcgacatcttccagttcgccaagaagttcgtggtgtacgaggtgctgagagaggacgagttcagccccctgaagaacgccgacagccagaacggcaaggacaaccccaccaccgccagacacgccctgatgagcctgcaccactgctgggtgctgaacgccggcggccacttcatcgacgagaacggcagcagactgcccgccatccccagagccaccaacggcaagagcgagaccatcaccgccgacgtgaaccacaacctgaaggacgccaacgacgtgcccatccagtgcgagatcagccccctgatcagctacgccggcgagggcctggagagctacgtggccgacaaggagttccacgcccccctgatcatcgacgagaacggcgtgcacgagctggtgaagaacggcatctag

SEQ ID NO: 266692 - DNA, 1566 bp, Artificial Sequence
  derived and/or modified sequence
atgaacatcaacgacctcaagttgaccctgagcaaagcgggtcaggaacacctcctgagattttggaacgaactcgaggaggcccaacaggtcgaactatatgctgagctacaagcgatgaatttcgaagagctgaacttcttcttccagaaggccatcgagggattcaaccagtcttctcaccaaaaaaacgtggacgcccggatggaacccgtcccgcgggaggtcttgggcagtgccacaagggatcaggatcagctacaagcctgggaaagtgaaggtttatttcagatctcccagaataaggtggccgtgctgctactcgctggcggccagggcacacgtcttggggtcgcctaccctaaaggaatgtatgacgttggcctcccttccaggaagacccttttccagatccaagccgagaggatcctaaaacttcagcaggtagcagaaaaatattatggcaacaagtgtataatcccatggtacattatgacttcgggacgcaccatggaatccactaaagaatttttcactaaacacaagtattttggcctgaaaaaggagaatgtgattttttttcaacaagggatgttgcccgcgatgtcattcgacggaaagatcatcctggaggagaagaataaggtgtctatggctcccgacggaaatggtgggctgtatagagccctggctgcccagaacatcgttgaggatatggagcagcgcggaatatggagtatccatgtttattgcgtagacaatatcctcgtgaaagtggcagatcccaggtttatcgggttttgtatccagaagggggctgattgcggcgccaaagttgtggaaaagaccaatcctacagagcccgtcggggtggtctgtagagtagatggggtttatcaggtggtcgaatactctgagatcagcctagcaacggctcagaagagatctagcgatgggcgactgctttttaacgccggaaacatcgcaaatcattttttcacggtgccatttctcagagacgtcgtaaatgtgtatgagcctcagcttcagcaccacgtggcccaaaaaaaaatcccatatgtggacacccaaggacaactgatcaagccagacaagccgaatgggatcaagatggaaaaattcgttttcgacatctttcagtttgccaaaaagttcgtggtttatgaagtactgcgtgaagatgaattttcgcccctgaagaatgctgactcccagaacggtaaggacaatcccacaaccgcacggcatgccttgatgtcactgcatcattgctgggtcctcaatgcaggcggtcatttcatcgacgagaacggttcccggctgcccgctatccccagagctactaacggcaaaagcgaaaccatcacagcagatgttaatcataacctgaaggatgcaaatgatgtgccaatccaatgcgaaatcagcccacttatttcctatgcaggcgagggcttagagtcttatgtggccgataaagaatttcatgccccattaatcatcgatgagaacggggtccatgaactggtcaaaaacgggatatag

SEQ ID NO: 266693 - DNA, 1566 bp, Artificial Sequence
  derived and/or modified sequence
atgaacatcaatgacctgaagctgaccctgagcaaggccggccaggagcacctgctgcgcttctggaatgagctggaggaggcccagcaggtggagctgtatgcagagctgcaggccatgaactttgaggagctgaacttcttcttccagaaggccatcgagggcttcaaccagagcagccaccagaagaatgtggatgccaggatggagcctgtgccccgggaggtgctgggcagcgccacccgggaccaggaccagctgcaggcctgggagagcgagggcctcttccagatcagccagaacaaggtggccgtgctgctgctggccggcggccagggcacccggctgggcgtggcctaccccaagggcatgtatgatgtgggcctgcccagcaggaagaccctcttccagatccaggccgagcgcatcctgaagctgcagcaggtggccgagaagtactacggcaacaagtgcatcatcccctggtacatcatgaccagcggccgcaccatggagagcaccaaggagttcttcaccaagcacaagtacttcggcctgaagaaggaaaatgtcatcttcttccagcagggcatgctgcctgccatgagctttgatggcaagatcatcctggaggagaagaacaaggtgtccatggccccagatggaaatggaggcctgtaccgggccctggccgcccagaacatcgtggaggacatggagcagaggggcatctggagcatccacgtgtactgtgtggacaacatcctggtgaaggtggccgacccccgcttcatcggcttctgcatccagaagggagctgactgtggggccaaggtggtggagaagaccaaccccacagagcctgtgggcgtggtgtgccgggtggatggagtgtaccaggtggtggagtacagcgagatcagcctggccacagcccagaagaggagcagtgatggccgcctgctcttcaatgccggcaacatcgccaaccacttcttcaccgtgcccttcctgagagatgtggtgaatgtgtatgagccccagctgcagcaccacgtggcccagaagaagatcccctacgtggacacccagggccagctgatcaagccagacaagcccaacggcatcaagatggagaagtttgtgtttgacatcttccagtttgccaagaagtttgtggtgtatgaggtgctgcgggaggatgagttcagccccctgaagaatgctgacagccagaatggcaaggacaaccccaccacagcccggcatgccctgatgagcctgcaccactgctgggtgctgaatgctgggggccacttcattgatgaaaatggcagccggctgcctgccatcccccgggccaccaacgggaagtctgagaccatcacagcagatgtgaaccacaacctgaaggatgccaatgatgtgcccatccagtgtgagatcagccccctcatctcctatgctggggagggcctggagagctatgtggccgacaaggagttccacgcccccctcatcattgatgaaaatggagtgcatgagctggtgaagaatggcatctag

SEQ ID NO: 266694 - DNA, 1566 bp, Artificial Sequence
  derived and/or modified sequence
atgaacatcaacgacctgaagctgaccctgagcaaggccggccaggaacacctgctccgcttttggaacgagttggaagaggcccagcaagttgaattgtatgcggaactgcaggcgatgaatttcgaagagctgaacttctttttccagaaggcgattgagggcttcaatcagagctctcaccaaaagaatgttgatgcgaggatggagccagtccccagagaagtgctaggctctgctactagagatcaggaccagttgcaggcgtgggagtctgaggggctgttccagatctcccaaaacaaggtggcagtccttctcctggcaggaggacagggcacccggttgggagtcgcgtatcctaaggggatgtacgatgtaggattaccctctaggaagactctgttccagatccaagcagagaggatcctgaaactgcagcaagtggcggaaaagtattatggaaataagtgtattatcccttggtacatcatgacatcaggcagaacgatggaatccacgaaagaattctttaccaagcataaatactttggacttaaaaaggagaatgtgattttcttccagcagggaatgctgcccgccatgtcttttgacggcaaaattattcttgaggagaagaataaggtgagcatggcccccgatggaaacggagggttataccgggccctggccgcccagaatattgtagaggacatggagcaacgcggcatctggagcattcacgtatattgcgtagataatattctggtgaaagtggccgaccctaggttcatcggattctgtattcagaaaggcgcggattgcggcgcaaaggtagttgagaaaaccaacccaactgaaccagttggagtggtctgccgggtagacggggtctaccaggtggtcgaatactccgagatctctcttgctacagcacagaaaagatcctctgacgggaggctgctctttaatgcaggcaatattgccaaccactttttcactgttcccttcctccgcgacgtggtgaatgtctacgaaccacaacttcagcatcatgtcgctcagaaaaagattccatacgtagatacccaggggcaactgattaaacctgataagcccaacggcataaagatggaaaaatttgtgtttgatatcttccagtttgctaagaagttcgtggtgtacgaggtcctcagggaggacgagttcagtccactgaagaatgccgacagccagaacggcaaagacaaccctactacagcccgccacgcgctcatgagtctgcatcattgttgggtcttgaatgctggcgggcacttcatcgacgaaaatggaagtcggctgcctgccatcccacgcgccaccaacggaaagagcgagacgatcaccgctgatgttaatcacaaccttaaagatgcaaacgacgtccccattcagtgtgagatttccccgcttatttcatatgctggcgaggggctcgaatcatatgtggccgacaaggaattccacgcacccctgatcatcgacgaaaatggagtgcacgagctcgtgaaaaacgggatatag

SEQ ID NO: 266695 - DNA, 1566 bp, Artificial Sequence
  derived and/or modified sequence
atgaatatcaatgacctcaaacttaccctgagcaaagccggacaggaacatttgctgcgcttttggaacgaattggaagaagcccagcaagttgaactatacgctgaactccaggccatgaacttcgaggaactaaatttcttctttcagaaagctatagagggcttcaaccaatcttcgcatcaaaaaaatgtcgatgcaaggatggaacccgtgcctcgtgaagtcttgggaagtgctacgagggatcaggaccagctgcaggcctgggagagtgagggcctgttccagatcagccagaacaaggtggcggtgttgctgctggccggagggcagggaaccagactgggggtcgcttaccccaaaggaatgtacgatgttggactgcccagccggaagaccctgttccagatccaagccgaacgcatccttaagcttcaacaggtcgctgagaaatactacggaaataagtgtatcattccttggtacatcatgacctctggcagaaccatggagtccacgaaggaattcttcacaaaacataagtatttcgggctgaaaaaagagaacgttatcttctttcagcaaggtatgctgccggcaatgtcattcgatggaaagatcatccttgaagaaaaaaataaggtgtccatggccccagacggaaatggcggtctttatcgagccttagctgcacaaaacatcgtggaggatatggagcagcgcggtatatggtcaattcacgtttattgcgttgataatatcttggtcaaggtcgctgaccctagattcattggcttctgcatccagaagggagccgactgcggtgccaaagtggttgagaagaccaaccctaccgagccagtgggggtggtgtgtagggttgacggggtgtatcaagtggtggaatactccgagatctcacttgctacagcacagaagaggtcctccgacgggcgtctgctgtttaatgctgggaatatcgccaatcatttttttacagttccttttctgagagacgtcgtgaacgtgtacgaaccccaattacaacatcatgttgctcagaagaaaattccatacgtcgacacccaggggcagctgatcaagccagacaagccaaatggtattaagatggagaagttcgtatttgatatctttcagtttgctaagaaatttgttgtatatgaggtgttgcgggaagacgagttcagtcctttgaagaacgccgacagccaaaacggtaaggacaaccctaccacagctcgccatgccctgatgtcactccatcactgctgggtcttgaatgctggaggtcattttattgatgagaatgggtcaaggctgccggctatccctcgcgcaactaatggaaaatcagagacgataaccgccgacgtgaatcacaatctgaaagacgcaaatgacgtccctattcagtgtgaaatcagccctctcatttcctacgctggcgagggactggagagctacgtagccgacaaggagtttcatgcgcctctgatcatagatgaaaatggagtgcatgaacttgtaaagaatggcatctag

SEQ ID NO: 266696 - DNA, 2066 bp, Artificial Sequence
  derived and/or modified sequence
ctatttctacaaagcttggctattagagcattatgaacattaatgacctcaaactcacgttgtccaaagctgggcaagagcacctactacgtttctggaatgagcttgaagaagcccaacaggtagaactttatgcagagctccaggccatgaactttgaggagctgaacttctttttccaaaaggccattgaaggttttaaccagtcttctcaccaaaagaatgtggatgcacgaatggaacctgtgcctcgagaggtattaggcagtgctacaagggatcaagatcagctccaggcctgggaaagtgaaggacttttccagatttctcagaataaagtagcagttcttcttctagctggtgggcaggggacaagactcggcgttgcatatcctaaggggatgtatgatgttggtttgccatcccgtaagacactttttcagattcaagcagagcgtatcctgaagctacagcaggttgctgaaaaatattatggcaacaaatgcattattccatggtatataatgaccagtggcagaacaatggaatctacaaaggagttcttcaccaagcacaagtactttggtttaaaaaaagagaatgtaatcttttttcagcaaggaatgctccccgccatgagttttgatgggaaaattattttggaagagaagaacaaagtttctatggctccagatgggaatggtggtctttatcgggcacttgcagcccagaatattgtggaggatatggagcaaagaggcatttggagcattcatgtctattgtgttgacaacatattagtaaaagtggcagacccacggttcattggattttgcattcagaaaggagcagactgtggagcaaaggtggtagagaaaacgaaccctacagaaccagttggagtggtttgccgagtggatggagtttaccaggtggtagaatatagtgagatttccctggcaacagctcaaaaacgaagctcagacggacgactgctgttcaatgcggggaacattgccaaccatttcttcactgtaccatttctgagagatgttgtcaatgtttatgaacctcagttgcagcaccatgtggctcaaaagaagattccttatgtggatacccaaggacagttaattaagccagacaaacccaatggaataaagatggaaaaatttgtctttgacatcttccagtttgcaaagaagtttgtggtatatgaagtattgcgagaagatgagttttccccactaaagaatgctgatagtcagaatgggaaagacaaccctactactgcaaggcatgctttgatgtcccttcatcattgctgggtcctcaatgcagggggccatttcatagatgaaaatggctctcgccttccagcaattccccgtgctacaaatgggaagtcagagaccatcacagctgatgtcaatcacaacttgaaggatgccaatgatgtaccaatccaatgtgaaatctctcctcttatctcctatgctggagaaggattagaaagttatgtggcagataaagaattccatgcacctctaatcatcgatgagaatggagttcatgagctggtgaaaaatggtatttgaaccagataccaagttttgtttgccacgataggaatagcttttatttttgatagaccaactgtgaacctacaagacgtcttggacaactgaagtttaaatatccacagggttttattttgcttgttgaactcttagagctattgcaaacttcccaagatccagatgactgaatttcagatagcatttttatgattcccaactcattgaaggtcttatttatataattttttccaagccaaggagaccattggccatccaggaaatttcgtacagctgaaatataggcaggatgttcaacatcagtttacttgcagctggaagcatttgtttttgaagttgtacatagtaataatatgtcattgtacatgttgaaaggtttctatggtactaaaagtttgttttattttatcaaacattaagcttttttaagaaaataattgggcagtgaaataaatgtatcttcttgtc

SEQ ID NO: 266697 - protein, 1854 aa, Artificial Sequence
  derived and/or modified sequence
MEPSSPQDEGLRKKQPKKPVPEILPRPPRALFCLTLENPLRKACISIVEWKPFETIILLTIFANCVALAVYLPMPEDDNNSLNLGLEKLEYFFLIVFSIEAAMKIIAYGFLFHQDAYLRSGWNVLDFTIVFLGVFTVILEQVNVIQSHTAPMSSKGAGLDVKALRAFRVLRPLRLVSGVPSLQVVLNSIFKAMLPLFHIALLVLFMVIIYAIIGLELFKGKMHKTCYFIGTDIVATVENEEPSPCARTGSGRRCTINGSECRGGWPGPNHGITHFDNFGFSMLTVYQCITMEGWTDVLYWVNDAIGNEWPWIYFVTLILLGSFFILNLVLGVLSGEFTKEREKAKSRGTFQKLREKQQLDEDLRGYMSWITQGEVMDVEDFREGKLSLDEGGSDTESLYEIAGLNKIIQFIRHWRQWNRIFRWKCHDIVKSKVFYWLVILIVALNTLSIASEHHNQPLWLTRLQDIANRVLLSLFTTEMLMKMYGLGLRQYFMSIFNRFDCFVVCSGILEILLVESGAMTPLGISVLRCIRLLRIFKITKYWTSLSNLVASLLNSIRSIASLLLLLFLFIVIFALLGMQLFGGRYDFEDTEVRRSNFDNFPQALISVFQVLTGEDWTSMMYNGIMAYGGPSYPGMLVCIYFIILFVCGNYILLNVFLAIAVDNLAEAESLTSAQKAKAEEKKRRKMSKGLPDKSEEEKSTMAKKLEQKPKGEGIPTTAKLKIDEFESNVNEVKDPYPSADFPGDDEEDEPEIPLSPRPRPLAELQLKEKAVPIPEASSFFIFSPTNKIRVLCHRIVNATWFTNFILLFILLSSAALAAEDPIRADSMRNQILKHFDIGFTSVFTVEIVLKMTTYGAFLHKGSFCRNYFNMLDLLVVAVSLISMGLESSAISVVKILRVLRVLRPLRAINRAKGLKHVVQCMFVAISTIGNIVLVTTLLQFMFACIGVQLFKGKFFRCTDLSKMTEEECRGYYYVYKDGDPMQIELRHREWVHSDFHFDNVLSAMMSLFTVSTFEGWPQLLYKAIDSNAEDVGPIYNNRVEMAIFFIIYIILIAFFMMNIFVGFVIVTFQEQGETEYKNCELDKNQRQCVQYALKARPLRCYIPKNPYQYQVWYIVTSSYFEYLMFALIMLNTICLGMQHYNQSEQMNHISDILNVAFTIIFTLEMILKLMAFKARGYFGDPWNVFDFLIVIGSIIDVILSEIDDPDESARISSAFFRLFRVMRLIKLLSRAEGVRTLLWTFIKSFQALPYVALLIVMLFFIYAVIGMQMFGKIALVDGTQINRNNNFQTFPQAVLLLFRCATGEAWQEILLACSYGKLCDPESDYAPGEEYTCGTNFAYYYFISFYMLCAFLVINLFVAVIMDNFDYLTRDWSILGPHHLDEFKAIWAEYDPEAKGRIKHLDVVTLLRRIQPPLGFGKFCPHRVACKRLVGMNMPLNSDGTVTFNATLFALVRTALKIKTEGNFEQANEELRAIIKKIWKRTSMKLLDQVIPPIGDDEVTVGKFYATFLIQEHFRKFMKRQEEYYGYRPKKDIVQIQAGLRTIEEEAAPEICRTVSGDLAAEEELERAMVEAAMEEGIFRRTGGLFGQVDNFLERTNSLPPVMANQRPLQFAEIEMEEMESPVFLEDFPQDPRTNPLARANTNNANANVAYGNSNHSNSHVFSSVHYEREFPEETETPATRGRALGQPCRVLGPHSKPCVEMLKGLLTQRAMPRGQAPPAPCQCPRVESSMPEDRKSSTPGSLHEETPHSRSTRENTSRCSAPATALLIQKALVRGGLGTLAADANFIMATGQALADACQMEPEEVEIMATELLKGREAPEGMASSLGCLNLGSSLGSLDQHQGSQETLIPPRL

SEQ ID NO: 266698 - DNA, 5565 bp, Artificial Sequence
  derived and/or modified sequence
atggagccatctagcccccaggacgagggcctccgaaagaagcaacccaaaaaaccagtgccagaaattttacctcggcctcctagagcactgttctgtctgaccctcgaaaaccccctgagaaaggcctgcatctctatcgtcgagtggaagcccttcgaaactatcatactactgactatttttgcaaattgcgtcgcgctagcagtgtatctccccatgcctgaagatgataacaattcactgaaccttgggcttgagaagcttgaatacttcttcctgatcgtcttctctatcgaggccgccatgaagattatcgcatacggctttcttttccaccaagacgcatacctgcgctccggctggaatgtcctcgactttaccatagtgtttctcggcgtgttcaccgtcatcctggaacaggtgaatgtgattcagtctcataccgctcccatgtcgtctaaaggggccggtttggacgtgaaagcgctgcgcgctttccgggtccttcgcccattaaggttggtgtcgggcgtgccttccttgcaggttgtacttaattctatctttaaagccatgctacccctgttccacatcgcgcttttggtgctgtttatggtgattatttacgctatcattggactcgagctgttcaaaggcaaaatgcataaaacttgttattttatcggtacagatatcgtcgcaacagtcgagaatgaagagccatctccatgcgcccgtaccggttctggccgacgatgtaccatcaatgggtctgagtgcagagggggatggccggggccaaatcacggtatcacacacttcgataatttcgggttttctatgcttaccgtatatcagtgtattacaatggaaggttggactgatgtattgtactgggtgaacgatgcaatcggcaatgaatggccttggatttacttcgtgaccctgatcctgctgggatccttctttattttgaatcttgtgctgggagtgctttcaggcgaattcaccaaagaacgtgagaaagcaaagtcccgaggcacattccaaaagttgagggagaagcagcaactcgacgaggatttaaggggctacatgtcctggatcacccaaggcgaggtaatggacgtcgaagacttccgagagggaaagttgagcctggatgagggcggttccgataccgaatccctgtatgagatcgccggtcttaataaaatcatccagttcatacggcactggaggcagtggaatagaattttcaggtggaagtgccacgatattgtgaagagtaaagtgttttattggttggttatccttatcgtcgctctgaatacactcagtattgcttctgagcaccacaatcagccattatggctgactagactgcaagatatcgcaaatcgggttctgctgtctctgttcactaccgagatgctgatgaaaatgtacggcctgggtctgcggcagtacttcatgtccatcttcaatcgtttcgactgctttgtcgtgtgcagtgggatcctggaaatcctgctagtcgagtcgggggccatgacccctttggggatcagtgtcttacgttgtataaggctgctcagaatcttcaagataacaaaatattggacctctctatcgaatctcgtggcctccctccttaacagtattcggtccatcgcttcactcttacttctgctgtttctcttcatcgtcatatttgcactgctgggaatgcagctgttcggaggcaggtatgacttcgaggatacggaggtccggaggagcaactttgataatttccctcaggccctgatctctgtcttccaggtgttaacaggtgaggactggacatcgatgatgtacaacgggataatggcatacggcggaccctcctatcccggcatgcttgtttgtatctatttcatcattctgtttgtatgcggaaattacattttgttaaacgtctttttggctatcgcagtggataatttggctgaggcggagagtttgacatcagcgcagaaagccaaggccgaggaaaaaaagcggcgtaagatgagcaagggcttgcctgacaaatctgaagaagagaagagtaccatggccaagaagcttgaacaaaagcccaaaggagagggaatcccaactacagcaaaactgaaaatcgacgagtttgagtctaacgtgaatgaagttaaggacccttatccttccgccgatttccccggtgacgacgaggaggatgaacccgagatcccactttctccccgacctcgaccattggcagagctccagttgaaggaaaaggccgtgcctatccctgaggctagtagctttttcatcttttcaccaacaaataagatccgggtcttatgccatagaattgtcaatgctacttggttcacaaactttatcttactctttatactgctgtcctccgccgccttagccgccgaagatcccattagagcagactctatgcgcaatcaaatcctgaagcatttcgacattggcttcaccagcgtcttcactgttgagattgtgctgaagatgactacctacggggcttttctacataagggttctttctgtcgaaactattttaatatgctggacctccttgtagtggcagtgagcttgatcagcatgggattggagtctagtgctatctcagtggttaagattttacgcgttcttagggtactgcggcctctccgggcaattaaccgcgccaagggactgaaacatgtggttcaatgcatgtttgttgcgattagtacaatcgggaacattgtactggttacaacacttctccagtttatgtttgcatgcataggtgtccaactgtttaagggcaaattcttcagatgtactgacttgagcaagatgactgaagaggaatgtcgtggctattattacgtgtataaggatggagacccaatgcagatcgagctgagacaccgtgagtgggtacactcagactttcacttcgacaatgtgctgtcggccatgatgtccctgtttacagtttccactttcgaagggtggccccagcttttatataaagccattgactccaacgctgaggacgtgggacctatttataataatagagttgaaatggccatcttctttatcatttacattattcttatcgctttttttatgatgaacattttcgttggattcgtgatcgtcacgttccaggaacagggcgaaacagagtacaaaaactgcgaattggacaagaaccaaagacagtgcgtgcaatacgccttgaaagctcgtcccttgcgctgttacatacccaaaaatccctaccagtatcaagtatggtatatagtaaccagcagttatttcgagtatctgatgttcgcgctgatcatgctcaatactatctgtctgggtatgcagcactataatcagagcgaacagatgaaccatattagtgatatattaaatgtggcgttcactatcatattcacattggaaatgattctgaagctgatggcctttaaggctagaggctacttcggagacccctggaacgtgttcgatttcctaatcgtcatcggcagcattatcgacgtgatcctctcagaaattgacgaccctgatgagtccgccaggatttcttctgcatttttcaggctatttcgggtgatgagattgattaagttgctgtcacgggctgaaggggtgaggaccttgctctggacttttatcaaaagctttcaggctttaccgtacgtcgctcttttgattgtcatgctatttttcatatacgccgttattggtatgcaaatgttcgggaagattgctctagtggacggcacgcagattaataggaataacaacttccaaacatttccacaagctgtcctacttttgtttcggtgtgcgaccggcgaagcttggcaggagatactgctggcctgcagctacggaaaactctgcgatcctgagtctgattatgcccccggggaagaatacacgtgtggcactaatttcgcctactactatttcatttcattctatatgctctgtgcctttttagtcataaacttgtttgtcgctgtgataatggataatttcgactacctgacaagggactggtccattctggggccccaccaccttgacgaatttaaagccatatgggctgaatatgacccagaagccaagggtcgcataaagcatctggatgtcgtcaccctgctgcggcgcattcagccccctcttggattcggcaagttttgccctcaccgagtggcttgtaaaaggcttgtcggcatgaacatgcccctcaattccgacgggactgtgacctttaatgctacattgttcgctctggttagaacggcacttaagatcaagacagaaggcaatttcgaacaggctaacgaggaactcagggccatcattaagaagatctggaagcgcacctccatgaagctcctcgatcaagtgattccacctatcggagacgatgaggtgacagtcggcaaattctacgccacattcctgattcaggagcacttccgaaagtttatgaagcgccaagaggaatactatgggtacagacccaagaaagacatcgtgcaaatccaggccggtcttcgcaccatagaagaggaagcggctccggagatatgcaggaccgtctcaggcgatctcgcagctgaagaagagctagaaagggctatggtggaggccgccatggaagaagggatctttcgcagaacaggcgggcttttcggacaggttgataattttctcgaacgcaccaattctctccccccagtgatggccaatcagaggccacttcagttcgccgagatagagatggaggagatggagtcacccgtcttccttgaagattttccccaggacccgagaactaatccactagcccgggctaatacaaataatgctaatgctaatgtggcctacggaaacagcaaccactcaaatagccacgttttttcatccgtccactacgagcgcgaattcccagaagagacagagacacccgcaactcggggcagggctctgggacagccttgtagagtgttggggccgcactccaagccctgcgtggaaatgttgaaagggcttctcacccaacgagcaatgccccgaggacaggcccccccagccccttgtcagtgccctcgggtcgaatcctctatgccagaggaccgcaaatctagtactcctgggtccctgcacgaggagactccacactcacggtccacgagagaaaatacctcccgctgctctgccccagcaaccgcactcctcatccagaaggctcttgtcagaggtggtctaggcacacttgcagccgacgctaatttcattatggctaccggccaggctctcgccgacgcttgccagatggagcctgaagaagtcgagattatggccacagaactcttaaagggcagggaagcccccgaaggaatggcctcctccctggggtgcctgaaccttgggtctagcctggggtcactggaccagcaccaggggtctcaagagacgctcatccctcctcgactgtag

SEQ ID NO: 266699 - DNA, 5565 bp, Artificial Sequence
  derived and/or modified sequence
atggagcccagcagcccccaggatgagggcctgaggaagaagcagcccaagaagcctgtgcctgagatcctgcccaggcctccccgggccctcttctgcctgaccctggagaaccccctgaggaaggcctgcatcagcatcgtggagtggaagccctttgagaccatcatcctgctgaccatctttgccaactgtgtggccctggccgtgtacctgcccatgccagaagatgacaacaacagcctgaacctgggcctggagaagctggagtacttcttcctgattgtgttcagcattgaagctgccatgaagatcatcgcctacggcttcctgttccaccaggatgcctacctgcggagcggctggaatgtgctggacttcaccatcgtgttcctgggcgtcttcaccgtcatcctggagcaggtgaatgtcatccagagccacacagcccccatgagcagcaaaggagctggcctggatgtgaaggccctgcgggccttccgggtgctgcggcccctgcggctggtgtctggagtgcccagcctgcaggtggtgctgaacagcatcttcaaggccatgctgcccctcttccacatcgccctgctggtgctcttcatggtgatcatctatgccatcatcggcctggagctgttcaagggcaagatgcacaagacctgctacttcatcggcacagacatcgtggccaccgtggagaatgaggagcccagcccctgtgccaggacaggcagcggccgccgctgcaccatcaatggaagtgagtgccggggcggctggccaggccccaaccacggcatcacccactttgacaactttggcttctccatgctgactgtgtaccagtgcatcaccatggagggctggacagatgtgctgtactgggtgaatgatgccatcggaaatgagtggccctggatctactttgtgaccctcatcctgctgggcagcttcttcatcctgaacctggtgctgggcgtgctgagcggggagttcaccaaggagcgggagaaggccaagagccggggcaccttccagaagctgcgggagaagcagcagctggatgaggacctgcggggctacatgtcctggatcacccagggcgaggtgatggatgtggaggacttccgggagggcaagctgagcctggatgaaggaggcagtgacacagagagcctgtatgaaattgctggcctgaacaagatcatccagttcatccgccactggaggcagtggaaccgcatcttccgctggaagtgccacgacatcgtgaagagcaaggtgttctactggctggtgatcctgattgtggccctgaacaccctgagcatcgccagcgagcaccacaaccagcccctgtggctgacccggctgcaggacatcgccaacagagtgctgctgagcctcttcaccacagagatgctgatgaagatgtatggcctgggcctgcggcagtacttcatgagcatcttcaacagatttgactgctttgtggtgtgcagcggcatcctggagatcctgctggtggagagcggggccatgacccccctgggcatctctgtgctgcgctgcatccggctgctgcgcatcttcaagatcaccaagtactggaccagcctgagcaacctggtggccagcctgctgaacagcatccgcagcatcgccagcctgctgctgctgctcttcctgttcatcgtcatctttgccctgctgggcatgcagctgtttggaggccgctatgactttgaggacacagaggtgagaagaagcaactttgacaacttcccccaggccctgatcagcgtcttccaggtgctgaccggggaggactggacctccatgatgtacaacggcatcatggcctatggaggccccagctacccaggcatgctggtgtgcatctacttcatcatcctgtttgtgtgtggcaactacatcctgctgaatgtgttcctggccatcgctgtggacaacctggccgaggccgagagcctgaccagcgcccagaaggccaaggccgaggagaagaagaggaggaagatgagcaagggcctgcctgacaagtctgaggaggagaagagcaccatggccaagaagctggagcagaagcccaagggggagggcatccccaccacagccaagctgaagattgatgaatttgagagcaatgtgaatgaggtgaaggacccctaccccagcgctgacttccctggagatgatgaagaagatgagcctgagatccccctgagcccccggccccggcccctggccgagctgcagctgaaggagaaggctgtgcccatccctgaggccagcagcttcttcatcttcagccccaccaacaagatccgggtgctgtgccacagaattgtgaatgccacctggttcaccaacttcatcctgctcttcatcctgctgagcagcgctgccctggccgctgaggaccccatccgggctgacagcatgaggaaccagatcctgaagcactttgatattggcttcacctctgtgttcaccgtggagatcgtgctgaagatgaccacctacggggccttcctgcacaagggcagcttctgcaggaactacttcaacatgctggacctgctggtggtggccgtgtccctcatctccatgggcctggagagcagcgccatctctgtggtgaagatcctgcgggtgctgcgggtgctgcggcccctgcgggccatcaacagagccaagggcctgaagcacgtggtgcagtgcatgtttgtggccatcagcaccatcggcaacatcgtgctggtgaccaccctgctgcagttcatgtttgcctgcattggagtgcagctgttcaagggcaagttcttccgctgcacagacctgagcaagatgacagaggaggagtgccggggctactactacgtgtacaaggatggagaccccatgcagatcgagctgcggcaccgggagtgggtgcacagcgacttccactttgacaacgtgctgagcgccatgatgagcctcttcaccgtgtccacctttgagggctggccccagctgctgtacaaggccatcgacagcaatgcagaagatgtgggccccatctacaacaacagagtggagatggccatcttcttcatcatctacatcatcctgattgccttcttcatgatgaacatctttgtgggctttgtgattgtgaccttccaggagcagggcgagacagagtacaagaactgtgagctggacaagaaccagaggcagtgtgtgcagtatgccctgaaggcccggcccctgcgctgctacatccccaagaacccctaccagtaccaggtgtggtacatcgtgaccagcagctactttgagtacctgatgtttgccctgatcatgctgaacaccatctgcctgggcatgcagcactacaaccagagcgagcagatgaaccacatcagtgacatcctgaatgtggccttcaccatcatcttcaccctggagatgatcctgaagctgatggccttcaaggcccggggctactttggagacccctggaatgtgtttgacttcctgattgtgattggcagcatcattgatgtgatcctgtctgaaattgatgatcctgatgagagcgcccgcatcagcagcgccttcttccgcctcttccgggtgatgaggctcatcaagctgctgagcagagctgagggcgtgaggaccctgctgtggaccttcatcaagagcttccaggccctgccctacgtggccctgctgattgtgatgctgttcttcatctatgctgtgattggcatgcagatgtttgggaagatcgccctggtggatggcacccagatcaacagaaacaacaacttccagaccttcccccaggccgtgctgctgctcttccgctgtgccaccggggaggcctggcaggagatcctgctggcctgcagctatggcaagctgtgtgaccctgagagtgactatgcccctggagaggagtacacctgtggcaccaactttgcctactactacttcatctccttctacatgctgtgtgccttcctggtgatcaacctgtttgtggccgtcatcatggacaactttgactacctgacccgggactggagcatcctgggcccccaccacctggatgagttcaaggccatctgggccgagtatgaccctgaggccaagggccgcatcaagcacctggatgtggtgaccctgctgcggcgcatccagccccccctgggctttgggaagttctgcccccaccgggtggcctgcaagaggctggtgggcatgaacatgcccctgaacagtgatggcaccgtgaccttcaatgccaccctgtttgccctggtgaggacagccctgaagatcaagacagagggcaactttgagcaggccaatgaggagctgcgggccatcatcaagaagatctggaagaggacctccatgaagctgctggaccaggtgatcccccccatcggagatgatgaggtgacagtgggcaagttctacgccaccttcctgatccaggagcacttcaggaagttcatgaagaggcaggaggagtactacggctaccggcccaagaaggacatcgtgcagatccaggccggcctgcggaccatcgaggaggaggccgcccctgagatctgcaggacagtgtctggggacctggccgctgaggaggagctggagcgggccatggtggaggccgccatggaggagggcatcttccggaggactggaggcctgtttggccaggtggacaacttcctggagaggaccaacagcctgccccctgtgatggccaaccagaggcccctgcagtttgctgagattgagatggaggagatggagagccctgtgttcctggaggacttcccccaggaccccaggaccaaccccctggcccgggccaacaccaacaatgccaatgccaacgtggcctacggcaacagcaaccacagcaacagccacgtgttcagctctgtgcactatgagcgggagttccctgaggagacagagaccccagccacccggggccgggccctgggccagccctgccgggtgctgggcccccacagcaagccctgtgtggagatgctgaagggcctgctgacccagagggccatgccccggggccaggcccccccagccccctgccagtgcccccgggtggagagctccatgcctgaggacaggaagagcagcaccccaggcagcctgcacgaggagaccccccacagccgcagcacccgggagaacaccagccgctgcagcgccccagccacagccctgctgatccagaaggccctggtgcggggcggcctgggcaccctggccgcagatgccaacttcatcatggccaccggccaggccctggctgatgcctgccagatggagcctgaggaggtggagatcatggccacagagctgctgaagggccgggaggcccctgagggcatggccagcagcctgggctgcctgaacctgggcagcagcctgggcagcctggaccagcaccagggcagccaggagaccctcatccccccccggctgtag

SEQ ID NO: 266700 - DNA, 5565 bp, Artificial Sequence
  derived and/or modified sequence
atggagcccagcagcccccaggacgagggcctgcggaagaagcagcctaaaaagccagtgcctgaaatccttcctcggccaccaagagcccttttctgtctcactctcgagaaccctctgcggaaagcgtgcatatcaattgtagagtggaaaccattcgagactataatccttctgactatttttgccaactgtgtggccctggctgtctatctgccaatgccggaagatgacaacaactctctgaatttaggactcgagaagttggaatatttctttctgattgtatttagtattgaggctgccatgaaaattattgcttatggctttctgttccatcaagatgcttatctcagatctggatggaatgtattagacttcaccattgtgttcctgggagtgttcactgtgattctcgagcaggtcaacgttatccagtctcataccgcacctatgagcagtaaaggcgccgggctcgacgtaaaggctctcagggccttccgggtgctaaggcctctgaggctggtgtctggtgtcccgagtcttcaggtggtcctgaattcaatatttaaggcaatgctccctctgttccatatcgctcttctggtgctgttcatggtcataatctacgctattatcggattagagctgtttaaagggaagatgcacaagacttgctatttcatcggaaccgacatcgtggccactgtagagaatgaagagccaagcccgtgcgcacgcacaggaagtggtagacggtgcacaataaacggttctgaatgccggggtggctggccaggccccaatcatggcattactcactttgacaacttcggcttctcaatgctgacagtctaccagtgtattaccatggaagggtggaccgacgtgctctactgggtgaacgatgcaattggaaacgagtggccttggatttattttgtgacactcatcctgctggggagctttttcatactgaacctcgtccttggagtcctaagtggcgagtttacaaaggagagggaaaaggcgaaatcccggggtacattccagaaactgcgtgaaaagcagcaactcgacgaggacctgagagggtacatgtcatggattacccagggggaggtgatggatgtggaggacttccgcgaggggaaactgtccctcgatgagggaggctccgacacggaatcactgtacgagatcgcaggtctcaacaaaattatccagttcatccggcattggagacagtggaatcgcattttcaggtggaagtgtcacgacatcgtcaagagtaaggttttttactggctggtcattctcatcgtcgctctgaacaccctgtccatagcatctgagcaccacaatcagcctctgtggctgactcggcttcaggatatcgcgaaccgggttctgctctcccttttcaccactgagatgctgatgaaaatgtatgggctagggctacggcaatatttcatgagtatcttcaacaggtttgattgttttgttgtatgctccggcatcctcgaaattctgcttgtggagagtggagccatgactccgctcggcattagcgtgctaaggtgtattcggctgctgcgcatctttaaaatcacgaaatattggacgtccctcagcaatctggtggcctcacttctgaacagtattagaagtatcgccagcctgctgctcctgctgtttctatttatcgtgatcttcgcccttctagggatgcaactctttggcggaagatatgatttcgaggacacggaagtgcgcaggtccaattttgacaattttccccaggcccttatttccgtgtttcaggttctcacgggagaggactggaccagtatgatgtacaacggcatcatggcgtacgggggacccagctacccgggtatgctggtttgtatttacttcattattttgttcgtatgcggaaactacattttgctgaatgtgtttctggcaatcgcggtggataatctcgcggaggcagagtccctcacatctgcccagaaggccaaagccgaagagaagaaaagacggaaaatgtctaaaggtctccctgataagtcggaagaggagaaatctacaatggccaagaaattagagcagaaacctaaaggggaaggcatcccaaccacagccaaacttaagatcgatgaattcgaatcgaacgtgaatgaggtaaaggacccttatccatcagccgactttccaggcgacgacgaggaggatgagcccgagatcccgttgtcccccaggccccggcctttagccgaattgcagctcaaggaaaaagccgtgccaattcccgaggcctcatctttcttcattttttcaccaactaacaaaatcagagtactgtgccatagaatcgttaatgctacttggtttaccaatttcatacttctctttatcctgttaagctcagcagcactcgccgctgaggatcctattagagccgatagcatgcggaatcagattttgaaacacttcgatatcggattcacatccgtctttactgttgaaatcgtgctgaagatgacaacatatggcgcctttctgcacaagggttccttctgcagaaattacttcaatatgctggatctgctggtggtggctgtaagcttaatttctatgggattggaatcgtccgccatcagcgttgtgaagattctgcgcgttctgcgggttctcaggccactgcgagctatcaacagagccaaggggctgaagcacgtagtccagtgtatgttcgtcgccatttctaccattgggaatatcgtcctcgtcaccacactgttacaatttatgttcgcttgtatcggtgtccagctgttcaaaggtaaattttttagatgtaccgatctctcaaagatgacagaggaagaatgtaggggttattactatgtgtataaagatggcgaccctatgcagatcgagttaaggcatagggagtgggttcacagtgattttcattttgataatgtgctttctgctatgatgagcctgttcaccgtctccacatttgaggggtggcctcagcttctgtataaagccatcgacagtaatgccgaagatgtgggcccaatttataacaacagagttgaaatggccatattctttatcatatacatcatcctgattgccttttttatgatgaatatcttcgtgggcttcgttatcgtaacattccaggagcagggcgaaaccgaatataagaattgtgagcttgacaagaatcagagacagtgcgtccagtatgctctgaaagccaggccacttcgctgctatattcccaagaacccttaccagtaccaggtgtggtatattgtcacaagtagctatttcgagtacctcatgttcgccctaataatgctaaacacaatctgcctcggaatgcaacactacaaccagagcgaacagatgaaccacattagtgatatccttaatgtggctttcaccatcatctttaccctggagatgatcctgaaactcatggcattcaaggcccgtggctacttcggtgatccttggaatgttttcgacttcttgatcgtaataggctcgatcatcgatgtcatactctcagagattgatgaccctgacgaaagcgctcggatctcgtcagcgttctttaggctctttcgagtgatgcgcctgatcaaactcttaagtcgcgcagagggggtgaggactctcttgtggacattcattaagagtttccaagccctgccttatgtggcgctgcttatcgtgatgttgtttttcatttacgccgttattggtatgcaaatgtttgggaagatcgccctggtggacggaacgcagatcaatcggaataataacttccagaccttcccacaggcagtgttgcttctgtttcgctgtgccactggcgaggcctggcaggaaatcctcctggcttgctcttatgggaaactatgcgatcccgaatccgactacgcacccggcgaagaatatacctgcggcacaaactttgcctattactactttatttctttttacatgctgtgtgcttttctcgtgatcaacttgtttgtcgctgtaatcatggataactttgactacctgactagagattggtcaatcttaggcccccatcacctggatgaatttaaggcgatctgggctgagtacgatcctgaggcaaagggccggatcaagcacctggacgtggtgaccctcctccgcaggatccagccacctctcggttttggcaaattctgtccacatagggtggcatgcaaacgcctggtcggtatgaacatgccactcaactccgatggcaccgtaaccttcaacgcgaccctctttgctctggtacgaaccgcccttaagatcaagacagaggggaacttcgaacaggctaacgaggaactgcgagcaattataaaaaagatttggaagcggacatctatgaagcttctagaccaggtaattcctccaattggtgacgatgaagtgacagtaggtaagttctatgccacatttttgatacaggaacacttcagaaagttcatgaagagacaggaggagtactacgggtaccgaccaaaaaaggacattgtccaaatccaggctggacttagaacgatcgaagaggaagccgcaccagagatctgccgaactgtctctggcgacctggccgccgaggaggagttagaaagagctatggtcgaggccgctatggaagaggggatttttaggaggaccggtggactttttggtcaggtcgataactttctagagagaaccaattccctgcctccggtgatggctaatcagaggccactgcagttcgctgaaatagagatggaagagatggagtcgccagtctttctggaagatttcccacaagacccccgaaccaatcctctggcccgggccaacacgaataacgcgaacgccaacgtagcctatggcaatagcaaccactctaactctcatgttttcagtagcgtgcactacgagagggagtttcctgaagagaccgagacgccggccacacgtgggagggctctaggacagccctgccgcgtactgggtcctcacagtaagccttgtgttgagatgctcaaagggctccttacccagagagcaatgccaagaggacaggcaccccccgccccctgtcagtgtcctcgggtggaatcttctatgccagaagaccgcaaatcctccactccgggctccctgcatgaagagacccctcattccaggagcacacgggaaaacacttctcgatgttccgcccctgccactgccctactgatccagaaagctctcgtccgcggcgggctgggtacccttgccgccgacgcaaatttcattatggcgacagggcaggccctggccgacgcttgtcagatggagcctgaggaagtggagatcatggctacggaacttctgaaggggcgcgaagcacctgagggcatggctagctccctcggctgcttaaatctggggagtagcctgggaagtctagaccaacaccaggggagccaggagaccctgattccacctcgcctgtag

SEQ ID NO: 266701 - DNA, 5564 bp, Artificial Sequence
  derived and/or modified sequence
atggagccatcatccccccaggatgaagggctgagaaagaagcagcccaaaaagcctgtgcctgaaatcctaccaaggccacctcgcgctctgttctgtctcaccctggagaatccactgaggaaggcgtgcataagcatcgttgagtggaagccctttgagacgatcattctgcttacaatattcgccaattgtgtcgctctggctgtgtatttgcccatgcccgaagatgacaacaattctttgaatctgggtcttgagaagctcgaatacttcttcctaatcgtgttctccattgaagctgcaatgaagataatcgcgtatgggttcctctttcatcaggacgcctatctgcggtcgggctggaatgtactcgactttaccatcgtgttcctgggagtgttcaccgtgattctcgaacaggtaaacgtcatccagagtcacaccgcacccatgagcagcaaaggagccggtttggacgtaaaggcgttgagagctttccgggtcctgcgccctctgagactagtgagtggggtgccctccctgcaagtggtactgaactcaatcttcaaagccatgcttcccctgtttcacattgccctgctcgtcctgttcatggtgatcatttacgctatcatcggactggagctgttcaaaggaaagatgcacaagacctgctatttcatcggtacggacatcgtggccacagtggaaaatgaagagcctagcccttgtgctcgcacaggtagcgggagacgttgcaccataaatggcagtgagtgtcgcggagggtggcctggaccaaaccatggaatcacacatttcgacaacttcggattctcgatgcttaccgtctaccagtgtatcaccatggaggggtggacagatgtgctctactgggttaatgacgcaattggcaatgagtggccctggatatacttcgtaacattgattcttcttgggagtttctttatattgaacctagtgcttggggtactcagtggcgagttcactaaggagagggagaaagcgaaaagcagggggacattccagaagctgagggaaaaacagcagctagatgaagacctcagaggttatatgtcctggattactcagggcgaagtcatggatgtggaggacttccgcgagggcaaattgtctctggacgagggtggctccgacacggagtcattgtatgagatcgctggtctaaacaagataatccagttcattcgccattggcgccagtggaatcgcatctttcggtggaagtgtcacgatatcgtcaagtccaaagtgttttactggttggtaatcctgattgtcgccctgaacaccctgtcaatcgcctccgagcaccataaccagcctctgtggctcacgcgcttacaagacatagccaacagggtgctgctgagcttgttcactacggagatgcttatgaagatgtatggtttagggctcagacagtacttcatgagtatttttaatcgattcgactgtttcgtggtgtgcagtggaatccttgaaatcttgctcgtggaatcaggtgcaatgactcccctgggcataagcgtgctccgctgcataaggcttctgcgtatcttcaaaatcactaagtactggacaagtctttctaatctggttgcttccttattgaacagtatacgttccatcgcgagtctcctcctgctgctattccttttcattgtcatctttgccctccttgggatgcagctgtttggaggtagatatgattttgaggataccgaggtgcggcgaagcaacttcgacaattttccacaagccctcattagtgtgttccaggtcctgaccggtgaggattggaccagtatgatgtataacggtatcatggcctacggaggaccatcctaccccggaatgctggtctgcatttatttcatcatcctcttcgtttgcggaaactatattttgctaaacgtatttttggccattgctgtcgataatctagccgaagctgaaagtttgacctcagcacagaaggctaaagctgaagagaaaaagcggcgaaaaatgtcaaaaggattacccgacaaaagcgaggaggaaaaaagcacgatggccaaaaagctggaacagaaacccaagggggaagggattcctaccactgctaaactcaaaatcgatgagttcgagagcaacgtgaacgaggtgaaagatccatatcctagcgcagacttcccaggtgacgacgaagaggacgaacctgaaattcccctgagccctcgccctcgccctcttgccgagctgcagctgaaggaaaaagccgtgccaatccccgaggcctctagtttcttcatcttctcccccactaacaagatcagggtcctctgtcatcgcattgttaacgccacatggttcaccaacttcatcctgctgtttattctgctgagctctgctgctttggcggctgaggacccaataagggccgactctatgaggaaccagatcctcaaacactttgacatcggctttacctctgtatttacagtggaaatcgtgctgaagatgaccacatatggtgcatttcttcataaagggtccttttgccgaaattatttcaacatgctggatttgctagttgtcgccgtttccctgatttctatgggccttgagtcatcagcaatatctgtggttaagatcctcagggtcctcagagtactgcgacccctgagagccatcaaccgggctaagggactcaagcacgtggtgcaatgtatgtttgtcgcaataagcaccattgggaacatcgtgctggtgactaccctccttcaattcatgttcgcctgcatcggtgttcaactgtttaaagggaagttcttccgatgcacagacttatcaaaaatgaccgaagaggagtgtagggggtactactacgtctacaaagatggcgatcccatgcagatcgaactgagacaccgagagtgggtgcacagcgattttcattttgataatgtgctgtccgcaatgatgtcattgtttaccgtgtcaactttcgagggctggccccagctactgtataaggcaatagactcgaatgctgaagatgtcggcccaatctacaataacagggtcgaaatggccattttttttatcatctacatcatattgatcgcattttttatgatgaatatattcgtgggcttcgtaattgttacttttcaggagcaaggagagactgaatataaaaattgcgagctggacaaaaaccaaaggcagtgtgttcagtacgccttgaaagccaggcccctgaggtgctatattcctaagaacccataccagtaccaggtgtggtacatagtgacatccagttattttgagtacctcatgttcgcgctgatcatgcttaacaccatttgtcttggcatgcaacattacaatcagagtgagcagatgaaccacatatccgacatcctcaacgtggcgtttaccatcatcttcacccttgagatgattctgaagttgatggcattcaaggcaagagggtactttggagacccttggaatgtgttcgacttcttaatcgtgatcgggtccataatagacgtgattctgagcgaaattgacgatccagatgagagcgcccgaataagctcggcattcttccggcttttcagagtcatgcgtctgattaaattactgtctcgcgcagagggggttagaacccttttgtggacttttattaagtcatttcaggctctcccatatgtcgcgctgctcatcgttatgctgttcttcatctacgccgttatcgggatgcagatgtttggaaagatagcactggtggacgggacacaaatcaataggaacaacaattttcagacctttccacaggccgtgctcctgctgttcaggtgtgcgactggagaggcttggcaagagatcttattggcttgctcctatgggaaattgtgtgacccggagtcggactacgcacccggagaagaatatacatgcggtactaatttcgcctactattatttcatctcattttacatgttatgcgcatttctcgttatcaatctgttcgtcgccgtcattatggacaacttcgattaccttacacgggattggagtatactgggtccccaccacctggatgaattcaaggccatttgggctgagtatgacccagaagcaaagggcagaatcaaacacctggacgtggtgacgttgctgcggaggattcaacccccactggggtttggtaaattttgtccacacagggtggcttgtaaaagactagtaggcatgaatatgccgcttaactctgacgggaccgtcacctttaacgcaacactgtttgctcttgttagaaccgccctgaagatcaagacagaaggaaacttcgaacaggcaaacgaggaattgcgggcaatcataaagaaaatctggaagcgaacatccatgaagctcctggaccaggtgattcccccaattggggacgatgaggtcactgttggaaagttctatgcaaccttcctgatccaggaacatttccgtaagtttatgaagcggcaggaggaatattatgggtatcggccaaaaaaggacattgtacagatccaggcaggtctgcggaccattgaagaggaggcggcacccgagatttgtagaactgtttccggagaccttgcggctgaggaagagctggagcgcgctatggttgaagccgctatggaagaaggaattttccggcgtaccgggggtctctttggccaggtagacaatttcctagagagaactaactctctgccacctgtcatggcaaaccagaggcctcttcagttcgcagagattgaaatggaggaaatggaatcaccagtcttcttggaagacttcccccaagaccctcgcaccaaccctctagcacgggcaaataccaacaacgctaacgctaacgtcgcatatggaaactccaatcattctaatagtcacgtttttagctctgttcactacgagcgggagttcccggaagagaccgagacgcccgcaactcgcggaagggcgttagggcagccatgtagggtcctgggcccacattcaaagccatgcgttgagatgttgaaaggcctgctcacccagcgcgctatgcctagaggacaggctccgccagccccatgtcagtgccctagagttgagagctccatgccggaggaccggaagagctcaactccgggtagcctacacgaggaaacgccccactcaagatctactcgcgaaaacacatcacgatgctccgccccagcgactgcactcctcatccagaaagcactagtccgcggaggcctcggcactctggccgctgacgccaactttataatggctacgggccaggcccttgcggatgcgtgtcagatggagcctgaagaggtcgaaatcatggctactgagctcctcaagggaagagaggccccagagggtatggcttcaagcttggggtgtttgaacctggggagttcgctcggaagcctggatcagcatcaggggagccaggagacactgattcccccaaggctgta

SEQ ID NO: 266702 - DNA, 5994 bp, Artificial Sequence
  derived and/or modified sequence
ctcagccgacagcctcagccagcctagtccccaaggcgggggcattggggacacagggaagggaaagcactggggtgggggagcaggagaaagccagattcccagggaagccatggagccatcctcaccccaggatgaaggcctgaggaagaaacagcccaagaagccagttcctgagattctgccaaggccaccccgggccttgttctgcctgaccctggagaaccccctgaggaaggcctgcatcagcattgtagaatggaagcccttcgagacgatcatcttgctcaccatctttgccaattgtgtggccctggccgtgtacctgcccatgccggaagatgacaacaactctctgaacctcggcctggagaagctggagtatttcttcctcattgtcttctcgattgaagccgccatgaagatcattgcctacggcttcttattccaccaggacgcttacctgcgcagtggctggaatgtgctggacttcaccattgtcttcctgggggtcttcaccgtgattctggaacaggttaacgtcatccaaagccacacagccccaatgagcagcaaaggagccggcttggatgtcaaggccctcagagccttccgagtgctcagacccctccggctggtgtcgggggtgcctagcctgcaggtggtcctgaactccatcttcaaggccatgctccccctctttcacatcgccctgctggtcctctttatggtcatcatctatgccatcatcgggctggagctcttcaagggcaagatgcacaagacctgctacttcattggtacagatatcgtggccacggtggagaatgaagagccatcgccctgcgccaggacgggctcagggcgccggtgcaccatcaatggcagtgagtgccggggcggctggccagggcccaaccatggcatcacccacttcgacaacttcggcttctccatgctcaccgtgtaccagtgcattaccatggagggatggactgacgtcctttactgggtcaatgatgccatcgggaatgagtggccctggatctattttgtcaccctcattttgctgggatccttcttcatcctcaacctggtgctgggtgtcctgagtggggaattcaccaaggagcgggagaaggccaagtccaggggaaccttccagaagctccgggagaagcagcaactagatgaggaccttcggggctacatgagctggatcacgcagggcgaggtcatggatgttgaggacttcagagaaggaaaactgtctttggatgaaggtggctctgacacagagagcctgtatgaaattgcaggcttgaacaaaatcatccagttcatccgacattggaggcagtggaaccgcatctttcgctggaagtgccatgacatcgtgaagtccaaggtcttctattggctggtgattctcatcgttgccctcaacaccctgtctatcgcctcagagcaccacaaccagcctctctggctgacccgtttgcaagacattgccaaccgggtgctgctgtccctcttcaccactgagatgctgatgaagatgtacgggctgggcctgcgccagtacttcatgtctatcttcaaccgcttcgactgcttcgtggtgtgtagcggtatcctggagatcctgctggtggagtcgggtgccatgacacccctgggcatctccgtgctccgctgcatccgcctcctgaggatcttcaagatcaccaaatattggacgtcgctgagcaacctggtggcatccctgctcaactccatccgctccatcgcctccctgctgctgctgctcttcctcttcatcgtcatcttcgccctcctgggcatgcagctctttggggggaggtatgactttgaagacacagaagtacggcgcagcaactttgacaactttccccaagccctcatcagcgtcttccaggtactgacaggggaagactggacctcaatgatgtacaatgggatcatggcctacggcgggccgtcctaccctggcatgcttgtgtgcatttacttcatcatccttttcgtctgtggcaactacatcctgctcaatgtcttcctggccattgccgtggacaacctggccgaggcggagagcctgacttctgcccagaaggccaaggctgaggagaaaaaacgcaggaagatgtccaagggtctcccagacaagtcagaagaggagaagtcaacgatggccaagaagctggagcagaaacccaagggtgagggcatccccaccactgccaagctgaaaatcgatgagtttgaatctaatgtcaatgaggtgaaggatccctacccctcagccgacttcccaggggatgacgaggaagatgagcctgagatcccgctgagcccccgaccacgtcccctggctgagctgcagctgaaagagaaggccgtgcccattccagaagccagctccttcttcatcttcagccccaccaataagatccgtgtcctgtgtcaccgcatcgtcaatgccacctggtttaccaacttcatcctgctcttcatcctgctcagcagcgctgcactggctgcggaagaccccatccgggctgattccatgagaaatcagatccttaaacactttgacatcgggttcacctctgtcttcactgtggagattgtcctcaagatgacgacctacggagccttcctgcacaagggttccttctgccgcaattacttcaacatgctggacctgctggtggtggccgtgtccctcatctccatgggacttgagtccagtgccatctccgtggtgaagatcctgagggtgctgagggtgctccgaccactcagagccatcaacagagccaaggggttgaagcacgtggtgcagtgcatgttcgtggccatcagcaccatcgggaacatcgtgctggtcactaccctcctacagttcatgtttgcctgcatcggcgtccagctcttcaaggggaagttcttcaggtgcaccgacttgtccaagatgacagaggaggagtgcaggggctactactacgtgtacaaggacggggaccccatgcagatagagctgcgtcaccgcgagtgggtacacagcgacttccacttcgacaatgtgctctcagccatgatgtccctcttcacggtctccaccttcgagggatggcctcagctgctgtacaaggccatagactccaatgcggaggacgtgggtcccatctacaacaaccgtgtggagatggccatcttcttcatcatctacatcatcctcattgccttcttcatgatgaacatctttgtgggcttcgtcattgtcaccttccaggagcagggagagactgagtacaagaactgtgagctggacaagaaccagcgccaatgtgtacagtatgccctgaaggcccgcccactgaggtgctacattcccaaaaacccataccagtaccaggtgtggtacattgtcacctcctcctactttgaatacctgatgtttgccctcatcatgctcaacaccatctgcctcggcatgcagcactacaaccagtcggagcagatgaaccacatctcagacatcctcaatgtggccttcactatcatcttcaccctggagatgatcctcaagctcatggccttcaaggccaggggctactttggagacccctggaatgtgtttgacttcctgattgtcattggcagcatcattgatgtcatcctcagtgagatcgacgacccagatgagagtgcccgcatctccagcgccttcttccgcctgttccgtgtcatgaggctgatcaagctgctgagccgggcagaaggagtgcgaaccctcctgtggacgttcatcaagtccttccaggccctaccctacgtggctctgctcatcgtcatgctcttcttcatctacgctgtcatcggcatgcagatgtttgggaagatcgccttggtggatgggacccaaataaaccggaacaacaacttccagaccttcccacaagctgtgctactgctcttcaggtgtgcaacaggtgaggcctggcaggagatcctactggcctgcagctatgggaagctgtgtgacccagagtcggactatgccccaggggaggagtacacatgtggcaccaactttgcatactactacttcatcagcttctacatgctctgtgccttcctggtcatcaacctctttgtggctgtcatcatggacaattttgactacctcacccgggactggtccatcctgggccctcatcacctggatgagttcaaggccatctgggcagagtatgacccagaggctaaggggagaatcaaacacctggacgtggtgaccctgctgagaaggattcagccccctctgggctttgggaagttctgcccacatcgggtagcttgtaagcggctggtgggcatgaacatgcccctgaacagcgacggcacagtcaccttcaatgccacactctttgccctggtccgcacggcactcaagatcaagacggaaggtaactttgagcaggccaacgaggagctgagggccatcatcaagaagatctggaagagaaccagcatgaagctcttggaccaggtcatccctccaataggagatgatgaggtgacagtggggaagttctacgccacattcctcatccaggagcacttccggaagttcatgaaacgccaagaggagtattatggctatcggcccaagaaggacattgtacagatccaggcagggctgcggaccattgaggaagaggcagcccccgagatctgtcgcacggtctcaggagacctggctgctgaggaggagctggagagagccatggtggaggctgcgatggaggagggaatattccggaggactggaggcctgtttggccaggtggacaacttcctggaaaggaccaactccctgccccccgtcatggccaatcagagacccctccagtttgctgagatagagatggaagagatggagtcacctgtcttcttggaggacttcccacaagatccacgcaccaaccccctggctcgtgccaataccaacaatgccaacgccaatgtcgcctatggcaacagcaaccatagcaacagccatgtgttttccagtgtccactatgaaagggagttcccagaagagacagagacgcctgctaccagaggacgagcccttggccaaccctgcagggtcctgggaccccacagcaaaccctgtgtggagatgctgaagggactgctgacccagagggcaatgcccagaggccaggcacctcctgccccctgccagtgccccagggtggagtcctccatgcctgaggacagaaagagctccacaccagggtctcttcatgaggagacaccccacagcaggagcaccagggagaatacttccaggtgctcagcaccagctacagccctgctgatccaaaaggctctggttcgagggggcctgggcaccttggcagctgatgcaaacttcatcatggcaacaggccaggccctggcagatgcctgccaaatggaaccagaggaagtggagatcatggcaacagagctactgaaaggacgagaggccccagagggcatggccagctccctgggatgcctgaacctcgggtcctccctgggcagcctcgaccaacaccagggctcccaggagacccttattcctccaaggctgtgatgcccacacagcatcagcatgggcttagagctggcatgaccaatgggggtggggaagttgctggggtggagaagggctagcccaccgcagcagcctccctccctctcagcagctagatgcatggcctgaggcagggtggtcaggaaccacctcaaaaagtgcggaggaagtagctggacaggccctgcccctcaccagcaagaggcatgattggatggagcttctaatgtcattcaaaaaggcctggtcagtgcctgtctggcctagggccactcccacctgcaggacattaaaatctccaggcctgtgacactggc

SEQ ID NO: 266703 - DNA, 5565 bp, Artificial Sequence
  derived and/or modified sequence
atggagcccagcagcccccaggacgagggcctgagaaagaagcagcccaagaagcccgtgcccgagatcctgcccagaccccccagagccctgttctgcctgaccctggagaaccccctgagaaaggcctgcatcagcatcgtggagtggaagcccttcgagaccatcatcctgctgaccatcttcgccaactgcgtggccctggccgtgtacctgcccatgcccgaggacgacaacaacagcctgaacctgggcctggagaagctggagtacttcttcctgatcgtgttcagcatcgaggccgccatgaagatcatcgcctacggcttcctgttccaccaggacgcctacctgagaagcggctggaacgtgctggacttcaccatcgtgttcctgggcgtgttcaccgtgatcctggagcaggtgaacgtgatccagagccacaccgcccccatgagcagcaagggcgccggcctggacgtgaaggccctgagagccttcagagtgctgagacccctgagactggtgagcggcgtgcccagcctgcaggtggtgctgaacagcatcttcaaggccatgctgcccctgttccacatcgccctgctggtgctgttcatggtgatcatctacgccatcatcggcctggagctgttcaagggcaagatgcacaagacctgctacttcatcggcaccgacatcgtggccaccgtggagaacgaggagcccagcccctgcgccagaaccggcagcggcagaagatgcaccatcaacggcagcgagtgcagaggcggctggcccggccccaaccacggcatcacccacttcgacaacttcggcttcagcatgctgaccgtgtaccagtgcatcaccatggagggctggaccgacgtgctgtactgggtgaacgacgccatcggcaacgagtggccctggatctacttcgtgaccctgatcctgctgggcagcttcttcatcctgaacctggtgctgggcgtgctgagcggcgagttcaccaaggagagagagaaggccaagagcagaggcaccttccagaagctgagagagaagcagcagctggacgaggacctgagaggctacatgagctggatcacccagggcgaggtgatggacgtggaggacttcagagagggcaagctgagcctggacgagggcggcagcgacaccgagagcctgtacgagatcgccggcctgaacaagatcatccagttcatcagacactggagacagtggaacagaatcttcagatggaagtgccacgacatcgtgaagagcaaggtgttctactggctggtgatcctgatcgtggccctgaacaccctgagcatcgccagcgagcaccacaaccagcccctgtggctgaccagactgcaggacatcgccaacagagtgctgctgagcctgttcaccaccgagatgctgatgaagatgtacggcctgggcctgagacagtacttcatgagcatcttcaacagattcgactgcttcgtggtgtgcagcggcatcctggagatcctgctggtggagagcggcgccatgacccccctgggcatcagcgtgctgagatgcatcagactgctgagaatcttcaagatcaccaagtactggaccagcctgagcaacctggtggccagcctgctgaacagcatcagaagcatcgccagcctgctgctgctgctgttcctgttcatcgtgatcttcgccctgctgggcatgcagctgttcggcggcagatacgacttcgaggacaccgaggtgagaagaagcaacttcgacaacttcccccaggccctgatcagcgtgttccaggtgctgaccggcgaggactggaccagcatgatgtacaacggcatcatggcctacggcggccccagctaccccggcatgctggtgtgcatctacttcatcatcctgttcgtgtgcggcaactacatcctgctgaacgtgttcctggccatcgccgtggacaacctggccgaggccgagagcctgaccagcgcccagaaggccaaggccgaggagaagaagagaagaaagatgagcaagggcctgcccgacaagagcgaggaggagaagagcaccatggccaagaagctggagcagaagcccaagggcgagggcatccccaccaccgccaagctgaagatcgacgagttcgagagcaacgtgaacgaggtgaaggacccctaccccagcgccgacttccccggcgacgacgaggaggacgagcccgagatccccctgagccccagacccagacccctggccgagctgcagctgaaggagaaggccgtgcccatccccgaggccagcagcttcttcatcttcagccccaccaacaagatcagagtgctgtgccacagaatcgtgaacgccacctggttcaccaacttcatcctgctgttcatcctgctgagcagcgccgccctggccgccgaggaccccatcagagccgacagcatgagaaaccagatcctgaagcacttcgacatcggcttcaccagcgtgttcaccgtggagatcgtgctgaagatgaccacctacggcgccttcctgcacaagggcagcttctgcagaaactacttcaacatgctggacctgctggtggtggccgtgagcctgatcagcatgggcctggagagcagcgccatcagcgtggtgaagatcctgagagtgctgagagtgctgagacccctgagagccatcaacagagccaagggcctgaagcacgtggtgcagtgcatgttcgtggccatcagcaccatcggcaacatcgtgctggtgaccaccctgctgcagttcatgttcgcctgcatcggcgtgcagctgttcaagggcaagttcttcagatgcaccgacctgagcaagatgaccgaggaggagtgcagaggctactactacgtgtacaaggacggcgaccccatgcagatcgagctgagacacagagagtgggtgcacagcgacttccacttcgacaacgtgctgagcgccatgatgagcctgttcaccgtgagcaccttcgagggctggccccagctgctgtacaaggccatcgacagcaacgccgaggacgtgggccccatctacaacaacagagtggagatggccatcttcttcatcatctacatcatcctgatcgccttcttcatgatgaacatcttcgtgggcttcgtgatcgtgaccttccaggagcagggcgagaccgagtacaagaactgcgagctggacaagaaccagagacagtgcgtgcagtacgccctgaaggccagacccctgagatgctacatccccaagaacccctaccagtaccaggtgtggtacatcgtgaccagcagctacttcgagtacctgatgttcgccctgatcatgctgaacaccatctgcctgggcatgcagcactacaaccagagcgagcagatgaaccacatcagcgacatcctgaacgtggccttcaccatcatcttcaccctggagatgatcctgaagctgatggccttcaaggccagaggctacttcggcgacccctggaacgtgttcgacttcctgatcgtgatcggcagcatcatcgacgtgatcctgagcgagatcgacgaccccgacgagagcgccagaatcagcagcgccttcttcagactgttcagagtgatgagactgatcaagctgctgagcagagccgagggcgtgagaaccctgctgtggaccttcatcaagagcttccaggccctgccctacgtggccctgctgatcgtgatgctgttcttcatctacgccgtgatcggcatgcagatgttcggcaagatcgccctggtggacggcacccagatcaacagaaacaacaacttccagaccttcccccaggccgtgctgctgctgttcagatgcgccaccggcgaggcctggcaggagatcctgctggcctgcagctacggcaagctgtgcgaccccgagagcgactacgcccccggcgaggagtacacctgcggcaccaacttcgcctactactacttcatcagcttctacatgctgtgcgccttcctggtgatcaacctgttcgtggccgtgatcatggacaacttcgactacctgaccagagactggagcatcctgggcccccaccacctggacgagttcaaggccatctgggccgagtacgaccccgaggccaagggcagaatcaagcacctggacgtggtgaccctgctgagaagaatccagccccccctgggcttcggcaagttctgcccccacagagtggcctgcaagagactggtgggcatgaacatgcccctgaacagcgacggcaccgtgaccttcaacgccaccctgttcgccctggtgagaaccgccctgaagatcaagaccgagggcaacttcgagcaggccaacgaggagctgagagccatcatcaagaagatctggaagagaaccagcatgaagctgctggaccaggtgatcccccccatcggcgacgacgaggtgaccgtgggcaagttctacgccaccttcctgatccaggagcacttcagaaagttcatgaagagacaggaggagtactacggctacagacccaagaaggacatcgtgcagatccaggccggcctgagaaccatcgaggaggaggccgcccccgagatctgcagaaccgtgagcggcgacctggccgccgaggaggagctggagagagccatggtggaggccgccatggaggagggcatcttcagaagaaccggcggcctgttcggccaggtggacaacttcctggagagaaccaacagcctgccccccgtgatggccaaccagagacccctgcagttcgccgagatcgagatggaggagatggagagccccgtgttcctggaggacttcccccaggaccccagaaccaaccccctggccagagccaacaccaacaacgccaacgccaacgtggcctacggcaacagcaaccacagcaacagccacgtgttcagcagcgtgcactacgagagagagttccccgaggagaccgagacccccgccaccagaggcagagccctgggccagccctgcagagtgctgggcccccacagcaagccctgcgtggagatgctgaagggcctgctgacccagagagccatgcccagaggccaggccccccccgccccctgccagtgccccagagtggagagcagcatgcccgaggacagaaagagcagcacccccggcagcctgcacgaggagaccccccacagcagaagcaccagagagaacaccagcagatgcagcgcccccgccaccgccctgctgatccagaaggccctggtgagaggcggcctgggcaccctggccgccgacgccaacttcatcatggccaccggccaggccctggccgacgcctgccagatggagcccgaggaggtggagatcatggccaccgagctgctgaagggcagagaggcccccgagggcatggccagcagcctgggctgcctgaacctgggcagcagcctgggcagcctggaccagcaccagggcagccaggagaccctgatcccccccagactgtag

SEQ ID NO: 266704 - protein, 364 aa, Artificial Sequence
  derived and/or modified sequence
MMLKGITRLISRIHKLDPGRFLHMGTQARQSIAAHLDNQVPVESPRAISRTNENDPVKTFSEACLMVRKPALELLHYLKNTSFAYPAIRYLLYGEKGTGKTLSLCHVIHFCAKQDWLILHIPDAHLWVKNCRDLLQSSYNKQRFDQPLEASTWLKNFKTTNERFLNQIKVQEKYVWNKRESTEKGSPLGEVVEQGITRVRNATDAVGIVLKELKRQSSLGMFHLLVAVDGINALWGRTTLKREDKSPIAPEELALVHNLRKMMKNDWHGGAIVSALSQTGSLFKPRKAYLPQELLGKEGFDALDPFIPILVSNYNPKEFESCIQYYLENNWLQHEKAPTEEGKKELLFLSNANPSLLERHCAYL

SEQ ID NO: 266705 - DNA, 1095 bp, Artificial Sequence
  derived and/or modified sequence
atgatgctcaaagggattactcgcctgatatcccgcatccacaaactggacccgggtcggtttctccacatgggcactcaggcccggcagtccatcgctgcacatctcgataaccaggtcccagtagaatcaccaagggctatctctaggacaaatgagaacgacccggtgaaaacattcagcgaagcctgcttaatggtgcgcaaacccgcacttgagttattgcactacctgaagaacacttcttttgcctacccggctattcgctatctgctgtacggcgaaaaaggcaccgggaagacactctcattatgccatgttattcacttttgcgctaagcaggattggctgatcctgcatattcccgatgcgcacctgtgggtgaagaattgcagggacctcctccagagctcttacaataaacagcggttcgaccagcctctggaggcttcaacctggctgaagaattttaagacgactaatgagagattcttgaatcagatcaaggttcaggagaagtacgtatggaataagcgtgaatcgacagagaaagggtcacctctgggagaggttgtggagcaaggcatcacgagagtgcggaatgctaccgatgccgtcggcatagttctgaaggaacttaagagacagagcagcctcgggatgtttcacctcctggtggctgtggatggaatcaacgccttgtgggggcggacaacactgaagagagaggacaagagccccatcgcccccgaagaactcgccttggtgcacaatctgcggaagatgatgaaaaatgattggcatggcggcgcgattgtctctgccctgagccagactggtagcctgtttaagccccgcaaggcttacctcccacaagaactgcttggaaaggaggggtttgacgcccttgatccattcatcccaattctcgtgtcaaattacaacccaaaagaatttgagtcctgcatccagtattatctggagaacaattggctccagcacgagaaagctcccactgaagagggcaaaaaggaacttctgtttctgtccaacgcaaaccccagcctccttgaaaggcattgtgcctacttatag

SEQ ID NO: 266706 - DNA, 1095 bp, Artificial Sequence
  derived and/or modified sequence
atgatgctgaagggcatcaccaggctcatcagccgcatccacaagctggaccccggccgcttcctgcacatgggcacccaggcccggcagagcattgctgcccacctggacaaccaggtgcctgtggagagcccccgggccatcagcaggaccaatgaaaatgaccctgtgaagaccttcagcgaggcctgcctgatggtgaggaagccagccctggagctgctgcactacctgaagaacaccagctttgcctacccagccatccgctacctgctgtatggagagaagggcaccgggaagaccctgagcctgtgccacgtgatccacttctgtgccaagcaggactggctgatcctgcacatcccagatgcccacctgtgggtgaagaactgccgggacctgctgcagagcagctacaacaagcagagatttgaccagcccctggaggccagcacctggctgaagaacttcaagaccaccaatgaacgcttcctgaaccagatcaaggtgcaggagaagtatgtgtggaacaagcgggagagcacagagaagggcagccccctgggggaggtggtggagcagggcatcaccagggtgagaaatgccacagatgctgtgggcatcgtgctgaaggagctgaagaggcagagcagcctgggcatgttccacctgctggtggccgtggatggcatcaatgccctgtggggccgcaccaccctgaagcgggaggacaagagccccatcgcccctgaggagctggccctggtgcacaacctgaggaagatgatgaagaatgactggcacggcggggccatcgtgtctgccctgagccagacaggcagcctcttcaagcccaggaaggcctacctgccccaggagctgctgggcaaggagggctttgatgccctggaccccttcatccccatcctggtgagcaactacaaccccaaggagtttgagagctgcatccagtactacctggagaacaactggctgcagcacgagaaggcccccacagaggagggcaagaaggagctgctcttcctgagcaatgccaaccccagcctgctggagcggcactgtgcctacctgtag

SEQ ID NO: 266707 - DNA, 1095 bp, Artificial Sequence
  derived and/or modified sequence
atgatgctgaagggcatcacccggctgatcagccggatccacaagttagatcctggaagatttctgcatatgggcacccaggcccggcaaagcattgcagcccatctcgacaaccaggtgccagtggaaagcccaagagccattagcaggacaaatgagaatgacccggttaagacgttctctgaagcctgtctaatggtccggaaacctgctttagagcttctgcactaccttaaaaatacatcctttgcctatcccgctatccgctatctcctttacggtgagaaagggacaggtaaaaccctgtcactttgtcatgtgatccacttttgtgcgaagcaggactggttgatcctccacattcccgatgcccatctatgggtgaagaattgtcgtgaccttctacagtcctcttacaataagcagagattcgaccagcctctagaggctagtacgtggctaaaaaatttcaagactacaaatgaacgcttcctgaaccagattaaagtgcaagaaaagtatgtgtggaacaagcgggagagcacagaaaaagggtccccacttggagaagtcgtggaacaggggatcactcgagtaaggaacgcaactgatgccgtgggaatagttttgaaggagctgaagcgccaatcttcactgggaatgtttcacctgctcgtggccgtggatggcattaatgcattatgggggaggaccaccctgaaacgtgaggacaagtcccctatcgcccctgaagagctcgcactggtacacaatcttcgcaaaatgatgaagaacgattggcatgggggagccattgtatctgcactgtctcagacaggttccctgttcaaacctcgaaaggcttaccttcctcaggagttattgggcaaggagggatttgacgcactggaccccttcataccgatccttgttagcaattataaccccaaggaatttgagtcttgtatacagtactatctagaaaacaactggctccagcacgagaaagcacccacagaggaaggtaaaaaagaactcctgtttctttctaacgctaacccctcattgctggaacgccactgtgcttacctttag

SEQ ID NO: 266708 - DNA, 1095 bp, Artificial Sequence
  derived and/or modified sequence
atgatgctgaagggaataaccagacttatttcccggatccacaaacttgacccaggacgcttcctgcacatgggaacccaagcccgacagagtattgccgcacatttagacaaccaggtgcccgttgagtcacctagagccatcagtcgcaccaacgagaatgacccagtcaaaaccttctctgaagcctgtttaatggtgaggaaaccagctctggagctgctccattatcttaagaacacatccttcgcttaccctgctatacggtacctgctgtacggggagaaaggcacaggtaaaacgctgtccctttgccacgtaatccatttttgcgctaagcaagactggctgattctgcacatcccagatgcacacctgtgggtgaagaactgcagggatcttctccagtctagttacaataagcaacggttcgaccaacctctggaagctagcacctggctgaaaaatttcaagacaactaatgaaagattcctcaatcagattaaagtacaggaaaaatacgtttggaacaagagagaatccacagaaaaaggttctcccctcggcgaagttgtggagcaggggattacacgggtcagaaacgcaacagacgccgtggggatcgtgttgaaggagctaaaacgacagtcttccctgggaatgtttcacttattggtggcagtcgacggtatcaacgcactgtggggaaggacaaccctgaagcgagaagataaaagtccgattgcccctgaggagctggccctggtgcacaacctccggaaaatgatgaagaacgactggcacgggggagcaatcgtcagcgccctgagtcagaccggatccctttttaagccccgaaaagcatatcttcctcaggagctgctgggaaaagagggctttgatgccctggacccattcatccccattttagtttctaactacaaccccaaggaattcgagagttgtatccaatactaccttgagaataactggctacaacacgagaaagctcccaccgaggagggcaaaaaagaactgctctttctgagcaacgcgaacccttccctgctcgaaagacattgcgcttacctgtag

SEQ ID NO: 266709 - DNA, 1095 bp, Artificial Sequence
  derived and/or modified sequence
atgatgctgaagggcatcaccagactgatcagcagaatccacaagctggaccccggcagattcctgcacatgggcacccaggccagacagagcatcgccgcccacctggacaaccaggtgcccgtggagagccccagagccatcagcagaaccaacgagaacgaccccgtgaagaccttcagcgaggcctgcctgatggtgagaaagcccgccctggagctgctgcactacctgaagaacaccagcttcgcctaccccgccatcagatacctgctgtacggcgagaagggcaccggcaagaccctgagcctgtgccacgtgatccacttctgcgccaagcaggactggctgatcctgcacatccccgacgcccacctgtgggtgaagaactgcagagacctgctgcagagcagctacaacaagcagagattcgaccagcccctggaggccagcacctggctgaagaacttcaagaccaccaacgagagattcctgaaccagatcaaggtgcaggagaagtacgtgtggaacaagagagagagcaccgagaagggcagccccctgggcgaggtggtggagcagggcatcaccagagtgagaaacgccaccgacgccgtgggcatcgtgctgaaggagctgaagagacagagcagcctgggcatgttccacctgctggtggccgtggacggcatcaacgccctgtggggcagaaccaccctgaagagagaggacaagagccccatcgcccccgaggagctggccctggtgcacaacctgagaaagatgatgaagaacgactggcacggcggcgccatcgtgagcgccctgagccagaccggcagcctgttcaagcccagaaaggcctacctgccccaggagctgctgggcaaggagggcttcgacgccctggaccccttcatccccatcctggtgagcaactacaaccccaaggagttcgagagctgcatccagtactacctggagaacaactggctgcagcacgagaaggcccccaccgaggagggcaagaaggagctgctgttcctgagcaacgccaaccccagcctgctggagagacactgcgcctacctgtag

SEQ ID NO: 266710 - DNA, 1470 bp, Artificial Sequence
  derived and/or modified sequence
gcagtctcaggacgggcgctttggagccggccccaggcagcgtgtgtcggtcgcctagtctggagaactagtcctcgactcacgtgcaaggatgatgctgaaaggaataacaaggcttatctctaggatccataagttggaccctgggcgttttttacacatggggacccaggctcgccaaagcattgctgctcacctagataaccaggttccagttgagagtccgagagctatttcccgcaccaatgagaatgacccggtgaagacattcagtgaagcttgcctgatggtaaggaaaccagccctagaacttctgcattacctgaaaaacaccagttttgcttatccagctatacgatatcttctgtatggagagaagggaacaggaaaaaccctaagtctttgccatgttattcatttctgtgcaaaacaggactggctgatactacatattccagatgctcatctttgggtgaaaaattgtcgggatcttctgcagtccagctacaacaaacagcgctttgatcaacctttagaggcttcaacctggctgaagaatttcaaaactacaaatgagcgcttcctgaaccagataaaagttcaagagaagtatgtctggaataagagagaaagcactgagaaagggagtcctctgggagaagtggttgaacagggcataacacgggtgaggaacgccacagatgcagttggaattgtgctgaaagagctaaagaggcaaagttctttgggtatgtttcacctcctagtggccgtggatggaatcaatgctctttggggaagaaccactctgaaaagagaagataaaagcccgattgcccccgaggaattagcacttgttcacaacttgaggaaaatgatgaaaaatgattggcatggaggcgccattgtgtcggctttgagccagactgggtctctctttaagccccggaaagcctatctgccccaggagttgctgggaaaggaaggatttgatgccctggatccctttattcccatcctggtttccaactataacccaaaggaatttgaaagttgtattcagtattatttggaaaacaattggcttcaacatgagaaagctcctacagaagaagggaaaaaagagctgctgttcctaagtaacgcgaacccctcgctgctggagcggcactgtgcctacctctaagccaagatcacagcatgtgaggaagacagtggacatctgctttatgctggacccagtaagatgaggaagtcgggcagtacacaggaagaggagccaggcccttgtacctatgggattggacaggactgcagttggctctggacctgcattaaaatgggtttcactgtgaatgcgtgacaataagatattcccttgttcctaaaactttatatcagtttattggatgtggtttttcacatttaagataattatggctcttttcctaaaaaataaaatatctttct

SEQ ID NO: 266711 - protein, 357 aa, Artificial Sequence
  derived and/or modified sequence
MMLKGITRLISRIHKAKHGDQHEGQHYNISPQDLETVFPHGLPPRFVMQVKTFSEACLMVRKPALELLHYLKNTSFAYPAIRYLLYGEKGTGKTLSLCHVIHFCAKQDWLILHIPDAHLWVKNCRDLLQSSYNKQRFDQPLEASTWLKNFKTTNERFLNQIKVQEKYVWNKRESTEKGSPLGEVVEQGITRVRNATDAVGIVLKELKRQSSLGMFHLLVAVDGINALWGRTTLKREDKSPIAPEELALVHNLRKMMKNDWHGGAIVSALSQTGSLFKPRKAYLPQELLGKEGFDALDPFIPILVSNYNPKEFESCIQYYLENNWLQHEKAPTEEGKKELLFLSNANPSLLERHCAYL

SEQ ID NO: 266712 - DNA, 1074 bp, Artificial Sequence
  derived and/or modified sequence
atgatgcttaaggggataacccggctgattagccggatccacaaggccaagcacggcgatcagcacgaagggcagcactacaacattagccctcaggatctcgaaaccgtattcccccacggcctcccacccagattcgtcatgcaggtgaagacatttagtgaggcttgtttgatggtcaggaaaccggcactagagcttctccattacctgaaaaatactagctttgcctaccctgcaatcaggtacctgctgtacggcgagaaaggcaccggaaagactctctctctgtgccatgtcattcacttttgtgctaagcaagattggctcatactgcatattccagacgctcatctctgggtgaaaaactgccgggacctcttgcagagcagctacaataaacagcgcttcgatcagcctttggaggcatccacttggctcaaaaatttcaaaactactaatgagcgcttcctcaaccagatcaaggtgcaggagaaatacgtgtggaataaacgggaaagcacagaaaagggttctcccctgggcgaggtggtggagcaggggattaccagggttcgcaatgccacggatgctgtgggaattgttctcaaagagctgaaaaggcagtcttcactcgggatgtttcatcttctcgtagccgtagacggaataaacgccctgtgggggcgcacaacgttgaaacgtgaggacaagtcccccatcgctccagaagagctggccctggtgcacaacttgaggaagatgatgaagaatgactggcatgggggcgcgatcgtttctgccctgtcccaaacgggctctctcttcaaaccccggaaggcttatctgcctcaggaattgctaggcaaggaggggttcgacgcgctcgaccctttcattcctatcttagtgtccaactacaatcctaaagagtttgagtcgtgtatccagtactacctcgagaacaattggttgcaacatgagaaggcacccactgaagagggaaagaaagaattactgttcctgtctaacgccaacccgtccctgctggagcgacactgtgcctacttgtag

SEQ ID NO: 266713 - DNA, 1074 bp, Artificial Sequence
  derived and/or modified sequence
atgatgctgaagggcatcaccaggctcatcagccgcatccacaaggccaagcacggggaccagcacgagggccagcactacaacatcagcccccaggacctggagaccgtcttcccccacggcctgcccccaagatttgtgatgcaggtgaagaccttcagcgaggcctgcctgatggtgaggaagccagccctggagctgctgcactacctgaagaacaccagctttgcctacccagccatccgctacctgctgtatggagagaagggcaccgggaagaccctgagcctgtgccacgtgatccacttctgtgccaagcaggactggctgatcctgcacatcccagatgcccacctgtgggtgaagaactgccgggacctgctgcagagcagctacaacaagcagagatttgaccagcccctggaggccagcacctggctgaagaacttcaagaccaccaatgaacgcttcctgaaccagatcaaggtgcaggagaagtatgtgtggaacaagcgggagagcacagagaagggcagccccctgggggaggtggtggagcagggcatcaccagggtgagaaatgccacagatgctgtgggcatcgtgctgaaggagctgaagaggcagagcagcctgggcatgttccacctgctggtggccgtggatggcatcaatgccctgtggggccgcaccaccctgaagcgggaggacaagagccccatcgcccctgaggagctggccctggtgcacaacctgaggaagatgatgaagaatgactggcatggaggagccatcgtgtctgccctgagccagacaggcagcctcttcaagcccaggaaggcctacctgccccaggagctgctgggcaaggagggctttgatgccctggaccccttcatccccatcctggtgagcaactacaaccccaaggagtttgagagctgcatccagtactacctggagaacaactggctgcagcacgagaaggcccccacagaggagggcaagaaggagctgctcttcctgagcaatgccaaccccagcctgctggagcggcactgtgcctacctgtag

SEQ ID NO: 266714 - DNA, 1074 bp, Artificial Sequence
  derived and/or modified sequence
atgatgctgaagggcatcacccggctgatcagccggatccacaaggcgaaacatggggaccagcacgaaggccagcactataacattagtccacaagaccttgaaaccgtcttccctcatggactcccccctcggtttgttatgcaggtgaagaccttcagtgaagcctgcttgatggtgagaaagcccgccctagagctcctccactatctcaaaaacaccagcttcgcctaccccgccatccgatatctattgtacggcgagaaaggcacaggaaagaccctatcactgtgccacgtgattcatttttgcgctaaacaagactggctcatcctgcacatacccgatgcccacctctgggtgaagaattgcagagacctattgcagagctcttacaacaagcaacggtttgaccaacccctggaggcttccacgtggttgaagaattttaagacaacaaacgaacggttcttgaatcagatcaaggtccaggagaagtatgtctggaacaaaagagagagcacagagaagggatcccccctgggggaagtagtggaacaaggaatcactagggtccgaaacgcaacggacgcagtgggtatcgtgcttaaagaactgaaaaggcaaagctctttgggaatgtttcacttgctggtcgccgtggacggcattaatgccctttggggccggacgactctaaagcgggaagacaaaagccccatcgcccctgaggagttggcccttgtgcataacctgaggaaaatgatgaaaaatgactggcatggcggggctattgtgtctgccctatcacagacaggatcactgttcaagccacgtaaggcctacctgcctcaggagctgctcggtaaggaaggatttgacgccctggatccgttcatcccaattctcgtgtcaaattacaatccaaaagagtttgagtcatgcatccagtattacctcgagaataactggttacagcatgagaaggctcctactgaggagggcaagaaggagctcctttttctaagcaatgccaatccaagcctcttggagagacactgtgcctatctgtag

SEQ ID NO: 266715 - DNA, 1074 bp, Artificial Sequence
  derived and/or modified sequence
atgatgctgaaggggattacaagactgatttcccgcatccacaaagccaaacatggggaccaacatgaaggccagcactataacatcagcccccaggacctggaaaccgtatttccacacggactcccccctcgctttgtcatgcaggtcaaaacctttagtgaggcttgtctcatggtgagaaagcctgcactggagctactccactatctgaaaaatacctcattcgcataccctgcaataagatacctgctgtatggagagaaggggaccggaaaaacgttatctttgtgtcatgtcattcacttttgcgctaagcaggactggttaatcctgcacataccggatgcccacctctgggtgaagaattgtagagatctcctccaatcctcttataataagcagaggtttgaccagccactagaagcaagtacttggctcaagaattttaaaaccaccaatgagcggtttctgaaccagataaaggtacaggaaaaatatgtgtggaacaaaagagagtctactgagaagggctctcctctgggcgaagtggtcgagcagggaattacccgagtgaggaatgcaacagacgccgtgggtatagtgctgaaggaactgaagcgacaaagttccttggggatgttccacctgctggtcgccgtcgacggaatcaacgctctatggggacgaacgacactgaaaagagaagataaaagccctattgctcctgaggagttggcccttgtccataacctaagaaagatgatgaagaatgactggcatggcggtgcaattgtctccgccttgtcacaaacaggaagtctgttcaagccaagaaaagcctacctgcctcaggaactcctcggcaaggagggattcgacgccctagatcctttcatacccatactggttagcaattataaccccaaagaattcgagagctgtattcaatattatctcgagaataactggctgcagcacgagaaggccccaactgaggagggcaaaaaagaactcttgtttcttagcaacgcaaacccatctttactcgagagacactgtgcatacctgtag

SEQ ID NO: 266716 - DNA, 1074 bp, Artificial Sequence
  derived and/or modified sequence
atgatgctgaagggcatcaccagactgatcagcagaatccacaaggccaagcacggcgaccagcacgagggccagcactacaacatcagcccccaggacctggagaccgtgttcccccacggcctgccccccagattcgtgatgcaggtgaagaccttcagcgaggcctgcctgatggtgagaaagcccgccctggagctgctgcactacctgaagaacaccagcttcgcctaccccgccatcagatacctgctgtacggcgagaagggcaccggcaagaccctgagcctgtgccacgtgatccacttctgcgccaagcaggactggctgatcctgcacatccccgacgcccacctgtgggtgaagaactgcagagacctgctgcagagcagctacaacaagcagagattcgaccagcccctggaggccagcacctggctgaagaacttcaagaccaccaacgagagattcctgaaccagatcaaggtgcaggagaagtacgtgtggaacaagagagagagcaccgagaagggcagccccctgggcgaggtggtggagcagggcatcaccagagtgagaaacgccaccgacgccgtgggcatcgtgctgaaggagctgaagagacagagcagcctgggcatgttccacctgctggtggccgtggacggcatcaacgccctgtggggcagaaccaccctgaagagagaggacaagagccccatcgcccccgaggagctggccctggtgcacaacctgagaaagatgatgaagaacgactggcacggcggcgccatcgtgagcgccctgagccagaccggcagcctgttcaagcccagaaaggcctacctgccccaggagctgctgggcaaggagggcttcgacgccctggaccccttcatccccatcctggtgagcaactacaaccccaaggagttcgagagctgcatccagtactacctggagaacaactggctgcagcacgagaaggcccccaccgaggagggcaagaaggagctgctgttcctgagcaacgccaaccccagcctgctggagagacactgcgcctacctgtag

SEQ ID NO: 266717 - DNA, 1449 bp, Artificial Sequence
  derived and/or modified sequence
gcagtctcaggacgggcgctttggagccggccccaggcagcgtgtgtcggtcgcctagtctggagaactagtcctcgactcacgtgcaaggatgatgctgaaaggaataacaaggcttatctctaggatccataaggccaagcatggggatcagcacgagggtcagcactacaacatctccccccaggatttggagactgtatttccccatggccttcctcctcgctttgtgatgcaggtgaagacattcagtgaagcttgcctgatggtaaggaaaccagccctagaacttctgcattacctgaaaaacaccagttttgcttatccagctatacgatatcttctgtatggagagaagggaacaggaaaaaccctaagtctttgccatgttattcatttctgtgcaaaacaggactggctgatactacatattccagatgctcatctttgggtgaaaaattgtcgggatcttctgcagtccagctacaacaaacagcgctttgatcaacctttagaggcttcaacctggctgaagaatttcaaaactacaaatgagcgcttcctgaaccagataaaagttcaagagaagtatgtctggaataagagagaaagcactgagaaagggagtcctctgggagaagtggttgaacagggcataacacgggtgaggaacgccacagatgcagttggaattgtgctgaaagagctaaagaggcaaagttctttgggtatgtttcacctcctagtggccgtggatggaatcaatgctctttggggaagaaccactctgaaaagagaagataaaagcccgattgcccccgaggaattagcacttgttcacaacttgaggaaaatgatgaaaaatgattggcatggaggcgccattgtgtcggctttgagccagactgggtctctctttaagccccggaaagcctatctgccccaggagttgctgggaaaggaaggatttgatgccctggatccctttattcccatcctggtttccaactataacccaaaggaatttgaaagttgtattcagtattatttggaaaacaattggcttcaacatgagaaagctcctacagaagaagggaaaaaagagctgctgttcctaagtaacgcgaacccctcgctgctggagcggcactgtgcctacctctaagccaagatcacagcatgtgaggaagacagtggacatctgctttatgctggacccagtaagatgaggaagtcgggcagtacacaggaagaggagccaggcccttgtacctatgggattggacaggactgcagttggctctggacctgcattaaaatgggtttcactgtgaatgcgtgacaataagatattcccttgttcctaaaactttatatcagtttattggatgtggtttttcacatttaagataattatggctcttttcctaaaaaataaaatatctttct

SEQ ID NO: 266718 - protein, 170 aa, Artificial Sequence
  derived and/or modified sequence
MKGLFQNPAVQFHSKELYVAADEASIAPILAEAQAHFGRRLGLGSYPDWGSNYYQVKLTLDSEEEGPLEECLAYLTARLPQGSLVPYMPNAVEQASEAVYKLAESGNYLMFQTPSRSCISAASPLSLSWNSFYRTLSREQAIPENQIASPPSEAKGAEEPWMGPFPGQQG

SEQ ID NO: 266719 - DNA, 1111 bp, Artificial Sequence
  derived and/or modified sequence
gactattccaaaacccagctgttcagttccactcaaaggagctatatgtggctgctgatgaagcctccatcgcccccattctggctgaggcccaggcccactttggacgtaggcttggcctgggttcctaccctgactggggcagcaactactatcaggtgaagctgactctagactcagaggaagaaggacccctggaggaatgcttggcctacctgactgcccgtttgccccagggatcgctggtcccctacatgcccaacgctgtggagcaggccagtgaggctgtatacaaactcgctgaatcagggtcttctttggggaaaaaggtggcaggtgccctacagaccattgagacctccctggctcagtacagcctcacccagctctgtgtgggcttcaacgggggcaaagactgcactgccctcctgcacctcttccatgcagctgtgcagaggaaattacctgatgttccaaaccccctccagatcctgtatatccgcagcatctcccctttccctgagctggaacagtttctacaggacactatcaagaggtactaggggcctggaggtttgggctccaagagaagcttgacagagcccacgcccgacccctacttctgtttcttcctaaggtataatctgcagatgttggaagctgagggcagcatgaagcaggccctgggtgaactgcaggcacggcacccccagctggaggctgtccttatgggcacccgccggactgacccctactcctgtagcctctgccctttcagccccactgacccaggctggcccgcattcatgcgcatcaacccactgctggactggacctacagagacatctgggattttctgcgtcagctgtttgtcccatactgtatcctgtatgaccgaggatacacatcactggggagtcgggagaataccgtgcggaacccggccctgaagtgcctgagcccaggaggacaccccacataccgtccagcctatctactggagaacgaagaagaggagcggaactcccgcacatgacctcccaccctaggagggagggaaggacaccgtcctagggtataacctggcaataaaccgtgcctctcactgtg

SEQ ID NO: 266720 - DNA, 387 bp, Artificial Sequence
  derived and/or modified sequence
atgctggaagctgagggctccatgaagcaagcgttgggggagcttcaagccagacatccccagctagaggctgttttaatgggcacacggcgcaccgacccatattcgtgcagcctgtgccccttttcccccacagaccccggctggcccgctttcatgaggattaatccccttctggattggacctaccgagacatttgggacttcctgaggcagttattcgtgccgtattgcattctttatgacagagggtacacatccctgggttcacgagaaaacactgtgcgcaaccctgccttgaaatgcctcagcccaggggggcatccgacttacaggcctgcctatctgctcgagaacgaggaagaagagcgaaattctcgtacctag

SEQ ID NO: 266721 - DNA, 387 bp, Artificial Sequence
  derived and/or modified sequence
atgctggaggccgagggctccatgaagcaggccctgggggagctgcaggcccggcacccccagctggaggccgtgctgatgggcaccaggagaacagacccctacagctgcagcctgtgccccttcagccccacagatcctggctggccagccttcatgaggatcaaccccctgctggactggacctacagagacatctgggacttcctgcggcagctgtttgtgccctactgcatcctgtatgaccggggctacaccagcctgggcagccgggagaacacagtgaggaacccagccctgaagtgcctgagccctgggggccaccccacctacagacctgcctacctgctggagaatgaggaggaggagaggaacagcaggacatag

SEQ ID NO: 266722 - DNA, 387 bp, Artificial Sequence
  derived and/or modified sequence
atgctggaggccgagggcagcatgaagcaggccctgggcgagctgcaagctcggcatccccagctcgaggctgtccttatggggacccgacgaacagacccttattcttgttcactttgccctttttcgcctacagacccagggtggcccgcctttatgcggataaatcccttgttggattggacctatcgggacatttgggacttcttgagacagctttttgtgccttattgcatactatacgaccgcggctacacttctctgggttctcgagagaatactgtgagaaatcccgccctgaagtgcctctcccccggtggacatcccacatatcgtcctgcgtacttgcttgaaaacgaagaggaggaacggaactctcgcacctag

SEQ ID NO: 266723 - DNA, 387 bp, Artificial Sequence
  derived and/or modified sequence
atgcttgaagccgaagggtctatgaagcaagctttgggcgaattacaggccaggcatcctcagttagaggccgtcctcatgggtacacgcagaaccgacccttattcatgtagcctatgtccgtttagccccactgaccctggctggcccgcattcatgcgcatcaatccactgttggattggacctaccgcgatatctgggattttcttagacagctgttcgtgccttattgtattctgtacgatcggggttataccagcttgggtagccgcgagaacaccgtacgcaatcctgcgctcaaatgcctgagccctggcggacatcccacctacagacccgcatacttgttggagaatgaggaagaggaaagaaactcacgcacctag

SEQ ID NO: 266724 - DNA, 387 bp, Artificial Sequence
  derived and/or modified sequence
atgctggaggccgagggcagcatgaagcaggccctgggcgagctgcaggccagacacccccagctggaggccgtgctgatgggcaccagaagaaccgacccctacagctgcagcctgtgccccttcagccccaccgaccccggctggcccgccttcatgagaatcaaccccctgctggactggacctacagagacatctgggacttcctgagacagctgttcgtgccctactgcatcctgtacgacagaggctacaccagcctgggcagcagagagaacaccgtgagaaaccccgccctgaagtgcctgagccccggcggccaccccacctacagacccgcctacctgctggagaacgaggaggaggagagaaacagcagaacctag

SEQ ID NO: 266725 - protein, 219 aa, Artificial Sequence
  derived and/or modified sequence
MLKCLSEGQPPPSYNWTRLDGPLPSGVRVDGDTLGFPPLTTEHSGIYVCHVSNEFSSRDSQVTVDVLDPQEDSGKQVDLVSASVVVVGVIAALLFCLLVVVVVLMSRYHRRKAQQMTQKYEEELTLTRENSIRRLHSHHTDPRSQSEEPEGRSYSTLTTVREIETQTELLSPGSGRAEEEEDQDEGIKQAMNHFVQENGTLRAKPTGNGIYINGRGHLV

SEQ ID NO: 266726 - DNA, 660 bp, Artificial Sequence
  derived and/or modified sequence
atgttgaaatgccttagcgagggtcagccaccccccagctacaattggaccaggcttgacggccctttgccttctggagtacgggtggatggggacaccctcggatttcctccgctcaccaccgaacacagcggcatttatgtctgccacgtcagcaacgaatttagttcccgtgatagtcaagtaacagtcgatgtgctggatccccaggaggactcagggaaacaggtggacctggtttccgcctcggtcgtggtggtgggggttattgctgcactgctgttctgtctactggtggtagttgtggtacttatgtctagataccataggcgaaaggcccagcaaatgacacaaaaatacgaggaggagctcacacttaccagagaaaattccatccgccgcctgcactctcatcatacggatccccgctcccaatcagaggagccagaaggccgttcctacagcacactgacaactgtgcgggaaattgagactcagaccgaactgctgagtccaggctctggaagagccgaggaggaggaggatcaggacgaagggattaaacaagccatgaaccacttcgttcaagagaatggcactctgcgggctaagcctacggggaacggcatctatatcaacggccgcggacacttggtctag

SEQ ID NO: 266727 - DNA, 660 bp, Artificial Sequence
  derived and/or modified sequence
atgctgaagtgcctgtctgagggccagcccccacccagctacaactggacccggctggatggccccctgcccagcggcgtgcgggtggatggagacaccctgggcttcccccccctgaccacagagcacagcggcatctacgtgtgccacgtgtccaatgagttcagcagccgggacagccaggtgacagtggatgtgctggacccccaggaggacagcggcaagcaggtggacctggtgtctgcctctgtggtggtggtgggcgtgattgctgccctgctcttctgcctgctggtggtggtggtggtgctgatgagccgctaccacaggaggaaggcccagcagatgacccagaagtatgaggaggagctgaccctgaccagagaaaattccatccggcggctgcacagccaccacacagaccccaggagccagagcgaggagcctgagggccgcagctacagcaccctgaccaccgtgcgggagattgagacccagacagagctgctgagccctggcagcggccgggcagaggaggaggaggaccaggatgagggcatcaagcaggccatgaaccactttgtgcaggagaatggcaccctgcgggccaagcccactggaaatggcatctacatcaatggccggggccacctggtgtag

SEQ ID NO: 266728 - DNA, 660 bp, Artificial Sequence
  derived and/or modified sequence
atgctgaagtgcctgagcgagggccagcccccccccagctacaactggacaaggctggatgggccattgccctccggggtccgcgttgatggagatacattggggtttccacccctgaccacagagcattcggggatctacgtgtgccacgtttccaacgagttttcgtctcgggactcacaggtgaccgtagacgtacttgatccacaggaggactctggaaaacaggtggaccttgtgtcggcgtccgtggttgttgtgggggtaatcgctgcactcctgttttgcctcctagtggtagtggtggtcctgatgagtagataccaccgtaggaaggcccagcagatgacacagaaatacgaggaagagcttaccctgacccgtgagaactccatccggcggctgcactcacaccataccgaccccaggagccaaagcgaggagcccgaaggaaggtcgtactctaccttgactactgtgcgagaaatcgaaactcagaccgagctgctcagtcccgggagtggccgagcagaggaggaagaagatcaggacgagggcattaaacaggccatgaaccatttcgtacaggaaaacgggaccctgcgggcgaagcccacaggcaacgggatttacatcaacggccgcggtcaccttgtctag

SEQ ID NO: 266729 - DNA, 989 bp, Artificial Sequence
  derived and/or modified sequence
attccagtccttgctgaggcctctgtgaggggccttgaagaccaaaatctgtggcacattggcagagaaggagctatgctcaagtgcctgagtgaagggcagccccctccctcatacaactggacacggctggatgggcctctgcccagtggggtacgagtggatggggacactttgggctttcccccactgaccactgagcacagcggcatctacgtctgccatgtcagcaatgagttctcctcaagggattctcaggtcactgtggatgttcttgacccccaggaagactctgggaagcaggtggacctagtgtcagcctcggtggtggtggtgggtgtgatcgccgcactcttgttctgccttctggtggtggtggtggtgctcatgtcccgataccatcggcgcaaggcccagcagatgacccagaaatatgaggaggagctgaccctgaccagggagaactccatccggaggctgcattcccatcacacggaccccaggagccagagtgaagagcccgagggccgcagttactccacgctgaccacggtgagggagatagaaacacagactgaactgctgtctccaggctctgggcgggccgaggaggaggaagatcaggatgaaggcatcaaacaggccatgaaccattttgttcaggagaatgggaccctacgggccaagcccacgggcaatggcatctacatcaatgggcggggacacctggtctgacccaggcctgcctcccttccctaggcctggctccttctgttgacatgggagattttagctcatcttgggggcctccttaaacacccccatttcttgcggaagatgctccccatcccactgactgcttgacctttacctccaacccttctgttcatcgggagggctccaccaattgagtctctcccaccatgcatgcaggtcactgtgtgtgtgcatgtgtgcctgtgtgagtgttgactgactgtgtgtgtgtg

SEQ ID NO: 266730 - DNA, 660 bp, Artificial Sequence
  derived and/or modified sequence
atgcttaagtgcttatcagaaggacaacccccaccctcctacaattggacaaggctcgacgggcctttaccttcgggagtgagggtggacggggatacactcggattccctccactgaccacagagcacagcggaatctatgtgtgtcacgtttccaatgagttcagctcaagggactcgcaggtgacagtggacgttctggacccacaggaggacagcggcaagcaggtggatctggtctctgcatccgtggtggtggtgggtgtgatcgccgctctgctgttctgccttctggtggtggtcgtcgtgctgatgtctaggtatcaccggagaaaagcacagcagatgacccagaagtatgaggaagaactgacactgacgagggagaactctattaggagactgcacagccatcacacagatcctaggagccagtcggaggagccagagggcagatcttactccactttgactaccgtgcgcgagattgagacccaaaccgagttgctctcccctggatcaggtcgcgctgaggaggaggaagaccaggacgaggggattaagcaggcaatgaatcactttgtgcaggagaacgggacactccgggcaaagcctacggggaatgggatctacatcaatgggagagggcacctggtgtag

SEQ ID NO: 266731 - DNA, 660 bp, Artificial Sequence
  derived and/or modified sequence
atgctgaagtgcctgagcgagggccagcccccccccagctacaactggaccagactggacggccccctgcccagcggcgtgagagtggacggcgacaccctgggcttcccccccctgaccaccgagcacagcggcatctacgtgtgccacgtgagcaacgagttcagcagcagagacagccaggtgaccgtggacgtgctggacccccaggaggacagcggcaagcaggtggacctggtgagcgccagcgtggtggtggtgggcgtgatcgccgccctgctgttctgcctgctggtggtggtggtggtgctgatgagcagataccacagaagaaaggcccagcagatgacccagaagtacgaggaggagctgaccctgaccagagagaacagcatcagaagactgcacagccaccacaccgaccccagaagccagagcgaggagcccgagggcagaagctacagcaccctgaccaccgtgagagagatcgagacccagaccgagctgctgagccccggcagcggcagagccgaggaggaggaggaccaggacgagggcatcaagcaggccatgaaccacttcgtgcaggagaacggcaccctgagagccaagcccaccggcaacggcatctacatcaacggcagaggccacctggtgtag

SEQ ID NO: 266732 - protein, 567 aa, Artificial Sequence
  derived and/or modified sequence
MFVPRSLKIKRNANDDGKSCVAKIIKPDPEDLQLDKSRDVPVDAVATEAATIDRHISESCPFPSPGGQLAEVHSVSPEQGAKDSHPSEEPVKSFSKTQRWAEPGEPICVVCGRYGEYICDKTDEDVCSLECKAKHLLQVKEKEEKSKLSNPQKADSEPESPLNASYVYKEHPFILNLQEDQIENLKQQLGILVQGQEVTRPIIDFEHCSLPEVLNHNLKKSGYEVPTPIQMQMIPVGLLGRDILASADTGSGKTAAFLLPVIMRALFESKTPSALILTPTRELAIQIERQAKELMSGLPRMKTVLLVGGLPLPPQLYRLQQHVKVIIATPGRLLDIIKQSSVELCGVKIVVVDEADTMLKMGFQQQVLDILENIPNDCQTILVSATIPTSIEQLASQLLHNPVRIITGEKNLPCANVRQIILWVEDPAKKKKLFEILNDKKLFKPPVLVFVDCKLGADLLSEAVQKITGLKSISIHSEKSQIERKNILKGLLEGDYEVVVSTGVLGRGLDLISVRLVVNFDMPSSMDEYVHQLNIIWVVPFSGININASLIALLYSLLTTINMKFTP

SEQ ID NO: 266733 - protein, 580 aa, Artificial Sequence
  derived and/or modified sequence
MFVPRSLKIKRNANDDGKSCVAKIIKPDPEDLQLDKSRDVPVDAVATEAATIDRHISESCPFPSPGGQLAEVHSVSPEQGAKDSHPSEEPVKSFSKTQRWAEPGEPICVVCGRYGEYICDKTDEDVCSLECKAKHLLQVKEKEEKSKLSNPQKADSEPESPLNASYVYKEHPFILNLQEDQIENLKQQLGILVQGQEVTRPIIDFEHCSLPEVLNHNLKKSGYEVPTPIQMQMIPVGLLGRDILASADTGSGKTAAFLLPVIMRALFESKTPSALILTPTRELAIQIERQAKELMSGLPRMKTVLLVGGLPLPPQLYRLQQHVKVIIATPGRLLDIIKQSSVELCGVKIVVVDEADTMLKMGFQQQVLDILENIPNDCQTILVSATIPTSIEQLASQLLHNPVRIITGEKNLPCANVRQIILWVEDPAKKKKLFEILNDKKLFKPPVLVFVDCKLGADLLSEAVQKITGLKSISIHSEKSQIERKNILKGLLEGDYEVVVSTGVLGRGLDLISVRLVVNFDMPSSMDEYVHQENTYKSTWRNPQHFQQDVRMTLGYVGKAQWEEDNQLKVKLGLKKNCSS

SEQ ID NO: 266734 - DNA, 1704 bp, Artificial Sequence
  derived and/or modified sequence
atgttcgtgcccagaagcctgaagatcaagagaaacgccaacgacgacggcaagagctgcgtggccaagatcatcaagcccgaccccgaggacctgcagctggacaagagcagagacgtgcccgtggacgccgtggccaccgaggccgccaccatcgacagacacatcagcgagagctgccccttccccagccccggcggccagctggccgaggtgcacagcgtgagccccgagcagggcgccaaggacagccaccccagcgaggagcccgtgaagagcttcagcaagacccagagatgggccgagcccggcgagcccatctgcgtggtgtgcggcagatacggcgagtacatctgcgacaagaccgacgaggacgtgtgcagcctggagtgcaaggccaagcacctgctgcaggtgaaggagaaggaggagaagagcaagctgagcaacccccagaaggccgacagcgagcccgagagccccctgaacgccagctacgtgtacaaggagcaccccttcatcctgaacctgcaggaggaccagatcgagaacctgaagcagcagctgggcatcctggtgcagggccaggaggtgaccagacccatcatcgacttcgagcactgcagcctgcccgaggtgctgaaccacaacctgaagaagagcggctacgaggtgcccacccccatccagatgcagatgatccccgtgggcctgctgggcagagacatcctggccagcgccgacaccggcagcggcaagaccgccgccttcctgctgcccgtgatcatgagagccctgttcgagagcaagacccccagcgccctgatcctgacccccaccagagagctggccatccagatcgagagacaggccaaggagctgatgagcggcctgcccagaatgaagaccgtgctgctggtgggcggcctgcccctgcccccccagctgtacagactgcagcagcacgtgaaggtgatcatcgccacccccggcagactgctggacatcatcaagcagagcagcgtggagctgtgcggcgtgaagatcgtggtggtggacgaggccgacaccatgctgaagatgggcttccagcagcaggtgctggacatcctggagaacatccccaacgactgccagaccatcctggtgagcgccaccatccccaccagcatcgagcagctggccagccagctgctgcacaaccccgtgagaatcatcaccggcgagaagaacctgccctgcgccaacgtgagacagatcatcctgtgggtggaggaccccgccaagaagaagaagctgttcgagatcctgaacgacaagaagctgttcaagccccccgtgctggtgttcgtggactgcaagctgggcgccgacctgctgagcgaggccgtgcagaagatcaccggcctgaagagcatcagcatccacagcgagaagagccagatcgagagaaagaacatcctgaagggcctgctggagggcgactacgaggtggtggtgagcaccggcgtgctgggcagaggcctggacctgatcagcgtgagactggtggtgaacttcgacatgcccagcagcatggacgagtacgtgcaccagctgaacatcatctgggtggtgcccttcagcggcatcaacatcaacgccagcctgatcgccctgctgtacagcctgctgaccaccatcaacatgaagttcaccccctag

SEQ ID NO: 266735 - DNA, 1743 bp, Artificial Sequence
  derived and/or modified sequence
atgttcgtgcccagaagcctgaagatcaagagaaacgccaacgacgacggcaagagctgcgtggccaagatcatcaagcccgaccccgaggacctgcagctggacaagagcagagacgtgcccgtggacgccgtggccaccgaggccgccaccatcgacagacacatcagcgagagctgccccttccccagccccggcggccagctggccgaggtgcacagcgtgagccccgagcagggcgccaaggacagccaccccagcgaggagcccgtgaagagcttcagcaagacccagagatgggccgagcccggcgagcccatctgcgtggtgtgcggcagatacggcgagtacatctgcgacaagaccgacgaggacgtgtgcagcctggagtgcaaggccaagcacctgctgcaggtgaaggagaaggaggagaagagcaagctgagcaacccccagaaggccgacagcgagcccgagagccccctgaacgccagctacgtgtacaaggagcaccccttcatcctgaacctgcaggaggaccagatcgagaacctgaagcagcagctgggcatcctggtgcagggccaggaggtgaccagacccatcatcgacttcgagcactgcagcctgcccgaggtgctgaaccacaacctgaagaagagcggctacgaggtgcccacccccatccagatgcagatgatccccgtgggcctgctgggcagagacatcctggccagcgccgacaccggcagcggcaagaccgccgccttcctgctgcccgtgatcatgagagccctgttcgagagcaagacccccagcgccctgatcctgacccccaccagagagctggccatccagatcgagagacaggccaaggagctgatgagcggcctgcccagaatgaagaccgtgctgctggtgggcggcctgcccctgcccccccagctgtacagactgcagcagcacgtgaaggtgatcatcgccacccccggcagactgctggacatcatcaagcagagcagcgtggagctgtgcggcgtgaagatcgtggtggtggacgaggccgacaccatgctgaagatgggcttccagcagcaggtgctggacatcctggagaacatccccaacgactgccagaccatcctggtgagcgccaccatccccaccagcatcgagcagctggccagccagctgctgcacaaccccgtgagaatcatcaccggcgagaagaacctgccctgcgccaacgtgagacagatcatcctgtgggtggaggaccccgccaagaagaagaagctgttcgagatcctgaacgacaagaagctgttcaagccccccgtgctggtgttcgtggactgcaagctgggcgccgacctgctgagcgaggccgtgcagaagatcaccggcctgaagagcatcagcatccacagcgagaagagccagatcgagagaaagaacatcctgaagggcctgctggagggcgactacgaggtggtggtgagcaccggcgtgctgggcagaggcctggacctgatcagcgtgagactggtggtgaacttcgacatgcccagcagcatggacgagtacgtgcaccaggagaacacctacaagagcacctggagaaacccccagcacttccagcaggacgtgagaatgaccctgggctacgtgggcaaggcccagtgggaggaggacaaccagctgaaggtgaagctgggcctgaagaagaactgcagcagctag

SEQ ID NO: 266736 - DNA, 1976 bp, Artificial Sequence
  derived and/or modified sequence
acgagcgggtcagggcttgtcgggcggaagcctggcctggagcctggaagggggagacggcccgagcgggagcgggagcggacgcggcctcagtcctgcgcggaatattgaaggatgtttgttccaagatctctaaaaatcaagaggaatgctaatgatgatggcaaaagttgtgtggctaagataattaaaccagacccagaagaccttcagttggacaaaagcagagatgttcccgttgatgctgtagctacagaagcagccacaatagacaggcacatcagcgaatcatgccctttccccagcccaggtggccagttggcagaggttcattcagtaagtcccgagcagggtgcgaaggacagccatccttctgaagagcccgttaagtcattttccaaaacacagcgctgggcagaaccaggggaacccatctgtgttgtctgtggtcgttatggagagtatatctgtgataagacagatgaagatgtgtgtagtttggagtgtaaagcgaaacatcttctacaagttaaggaaaaggaagagaaatcaaaactcagcaatccacagaaggctgattctgagccagagtctccactgaatgcttcctatgtctacaaagagcacccctttattttgaaccttcaggaagaccagattgaaaatcttaaacagcagctgggaattttagttcaagggcaagaagtcaccaggcccattattgactttgaacattgtagtctccctgaggtcttaaatcacaacttgaagaaatcaggctatgaggtgccaactcccattcaaatgcagatgattcctgtgggacttctgggaagagacattctggccagtgcagatactggctcaggaaaaacagctgcttttcttcttcctgttatcatgcgagctttattcgagagcaaaactccatctgcgctcattcttacaccaaccagagagttagccattcagatagagagacaagctaaagaattgatgagtggcctgccacgcatgaaaactgtgcttcttgtagggggcttacccttacccccacagctttatcgtctgcaacaacatgttaaggttatcatagcaacccctgggcgacttctggatataataaagcagagctctgtagaactctgtggtgtaaagattgtggtagtagatgaagctgataccatgttaaagatgggttttcaacaacaagtgcttgacattttggaaaacattcctaatgattgtcagaccattttggtttcagccacaattccaactagcatagaacagctagcaagccagcttctgcataatcctgtgagaattatcactggagaaaagaacctaccttgtgccaatgtacgtcagattattttgtgggtagaagacccagccaaaaagaaaaaattatttgaaattttaaatgataagaaactctttaagcctccagtgttagtatttgtggactgcaaactaggagcagatcttttgagtgaagccgttcagaaaatcacagggctgaaaagcatatctatacattcagagaagtcgcaaatagaaaggaaaaacatattgaagggattacttgaaggagactatgaagttgtagtgagcacaggagtcttgggacgaggcctagacttgatcagtgtcaggctggttgtcaattttgatatgccttcaagtatggatgagtatgtccatcagctgaatattatttgggttgtgcccttctctggaattaatatcaacgcatctcttattgccttgttatacagtctactcaccacaatcaatatgaagtttactccataaacagaggtatggtacaagaggtaacgtgtcatccaaggtgactttcctggcagccaccagtaaactgactccggacagataggactcttttgttgccgccaaggcatacttacaatgacctcagaggctctagggccacagtgtgaaaaccaaccaat

SEQ ID NO: 266737 - DNA, 2900 bp, Artificial Sequence
  derived and/or modified sequence
gctccgctccgcaccaccaaccccgggccgcagtcctgacgagcgggtcagggcttgtcgggcggaagcctggcctggagcctggaagggggagacggcccgagcgggagcgggagcggacgcggcctcagtcctgcgcggaatattgaaggatgtttgttccaagatctctaaaaatcaagaggaatgctaatgatgatggcaaaagttgtgtggctaagataattaaaccagacccagaagaccttcagttggacaaaagcagagatgttcccgttgatgctgtagctacagaagcagccacaatagacaggcacatcagcgaatcatgccctttccccagcccaggtggccagttggcagaggttcattcagtaagtcccgagcagggtgcgaaggacagccatccttctgaagagcccgttaagtcattttccaaaacacagcgctgggcagaaccaggggaacccatctgtgttgtctgtggtcgttatggagagtatatctgtgataagacagatgaagatgtgtgtagtttggagtgtaaagcgaaacatcttctacaagttaaggaaaaggaagagaaatcaaaactcagcaatccacagaaggctgattctgagccagagtctccactgaatgcttcctatgtctacaaagagcacccctttattttgaaccttcaggaagaccagattgaaaatcttaaacagcagctgggaattttagttcaagggcaagaagtcaccaggcccattattgactttgaacattgtagtctccctgaggtcttaaatcacaacttgaagaaatcaggctatgaggtgccaactcccattcaaatgcagatgattcctgtgggacttctgggaagagacattctggccagtgcagatactggctcaggaaaaacagctgcttttcttcttcctgttatcatgcgagctttattcgagagcaaaactccatctgcgctcattcttacaccaaccagagagttagccattcagatagagagacaagctaaagaattgatgagtggcctgccacgcatgaaaactgtgcttcttgtagggggcttacccttacccccacagctttatcgtctgcaacaacatgttaaggttatcatagcaacccctgggcgacttctggatataataaagcagagctctgtagaactctgtggtgtaaagattgtggtagtagatgaagctgataccatgttaaagatgggttttcaacaacaagtgcttgacattttggaaaacattcctaatgattgtcagaccattttggtttcagccacaattccaactagcatagaacagctagcaagccagcttctgcataatcctgtgagaattatcactggagaaaagaacctaccttgtgccaatgtacgtcagattattttgtgggtagaagacccagccaaaaagaaaaaattatttgaaattttaaatgataagaaactctttaagcctccagtgttagtatttgtggactgcaaactaggagcagatcttttgagtgaagccgttcagaaaatcacagggctgaaaagcatatctatacattcagagaagtcgcaaatagaaaggaaaaacatattgaagggattacttgaaggagactatgaagttgtagtgagcacaggagtcttgggacgaggcctagacttgatcagtgtcaggctggttgtcaattttgatatgccttcaagtatggatgagtatgtccatcaggaaaatacctacaagtctacttggaggaatccccagcattttcaacaggatgtcagaatgaccttgggctatgttggcaaagcacaatgggaagaagacaaccaattgaaggtcaaactaggccttaaaaaaaattgttcttcctaaatgaaactttatgtaagacccaagcttcctttatgtaaaaataggatactcactaggctttggggctgacaatggtttttaaatcttgctaatcttccctggaatgaaaccagcatgactcaaagagaaaaagagagtctataatattttctaatccctgagttcttttctttatatattaaaaaggattactaggctgggtgtggtggctcacgcctgtaatcccagcactttgggaggccgaggggagtggatcacctgagttcgagaccagcctaaccaacatggagaaaccctgtctctactaaaaatacaaaattagccaggcgtggtggcgcatgcctgtaatcccagctactcaggaggctgcggcaggagaattgcttgaactcgggaggcagagccaagatcgcaccactgcactccagcctgggcaacaagagtgaaactctgtctcaaaataatattaatgataataataataataataatagggattacttgcataattgttcttttaaaattattggcagtattgctgaatgtatttagattttttcaccaagtgacaacaactgaattcataaagattcatcaacaagacctgataaaaaaaaatgtaagcatattatagtggatacttccaagactcttggtctaacatgtattagaaagcagaaggagcccaggcacaggggctcccgccggtaatcccaaagctttgggaagccaaggcaggtggatcgcttgagctcaggagttagagaccagcctgggcaacatggtgaaatcccgtcaccacaaaaaaatgcaaaaattaactgggcgtggtggcatgcacctgtagtcccagctactctggaggctgaggtgaggggaatcacctgagccgggggaatcacctgagcccagggaagttgaggctgctgtgagccatggtcatgacactgccctccagcctggacaacagattgagaccctgtctcaaaaaaaaaaaaaaaaaaa

SEQ ID NO: 266738 - DNA, 1704 bp, Artificial Sequence
  derived and/or modified sequence
atgttcgtccctcgctctcttaagatcaagcgcaatgcgaacgacgatgggaagtcttgtgtcgccaaaatcatcaaaccagatccagaggatcttcagctggataagtctcgagatgtccccgtagacgctgtggccacggaagcagctacaatcgatagacatatctctgagtcatgtccatttccctctccaggggggcagctagccgaggtccactccgtctctcccgagcagggcgccaaagattcacatcctagtgaggaacccgtcaagtcctttagtaagacccagcgttgggctgagcctggggagcccatctgcgtggtgtgtggacgttatggcgagtacatctgtgacaagaccgatgaggacgtctgcagccttgagtgcaaggccaagcatcttctgcaggtcaaggagaaagaagagaagagcaaactgagcaaccctcagaaggcagactccgagccagaatcccccctgaacgccagttatgtgtataaagaacatcccttcatactgaatttgcaagaggaccagatcgagaatctgaagcaacaactggggatactcgtgcagggccaagaggtcacaagacccataattgatttcgagcactgttcgcttccagaggtcttgaaccacaatcttaagaaatccggatacgaggtaccgactcccatccagatgcagatgataccagtgggtcttctaggaagggatattctggcgtcagccgatacaggatcgggaaagacggctgcattcttgctgcccgtgattatgcgtgctctctttgaatctaaaaccccaagcgcccttatcctcaccccaacaagggagctggctattcagatcgagcggcaagctaaagagctgatgagtggcctcccccgcatgaagaccgtcttgctcgtgggcggactccccctacctccccagctgtaccgacttcagcaacacgttaaagtcattattgcaacgccaggcaggctactggacataattaaacagtccagtgtggaattgtgcggagtgaagattgtggtggtcgacgaagcagacacaatgctgaagatgggatttcaacagcaggtgctggatattctggagaacattccaaacgattgccaaacaatcctggtgtccgctactattcctactagcatagagcagttggctagccagctgctgcacaaccccgtgaggatcatcacaggcgagaaaaatctgccatgcgctaacgtgagacagataatactatgggtcgaagaccccgctaagaagaagaagttgttcgaaattctgaatgacaaaaagctgttcaaaccacccgtcctcgtcttcgttgactgcaagcttggcgccgacctcctgtcagaagccgtacagaaaatcacgggcttgaaatcgatctcaattcatagtgagaagtcacagatcgagagaaaaaacatcctcaaaggactactagagggggactatgaggtggtcgtgtccacaggcgttctgggccgcggtttggacctgatctctgttcgcttagtggtgaactttgatatgccttctagcatggatgagtacgttcatcagctcaatattatttgggtcgtgccattctcagggataaacatcaatgctagcctgatcgccctactgtactctttactcacaacaatcaatatgaaattcaccccctag

SEQ ID NO: 266739 - DNA, 1743 bp, Artificial Sequence
  derived and/or modified sequence
atgtttgtacctcgttccctgaagattaaacggaatgccaatgatgatggcaagagttgtgtggcgaaaatcataaagcccgatccggaggacctacaactggataaatcccgcgacgtgcccgtcgacgctgtggcgacggaggcagcaaccattgataggcacatctccgaaagctgcccttttccttcacccggcggacaacttgctgaagtccattcagtctcacctgagcaaggggccaaggattcccacccatcagaggaaccagtgaagtccttttcaaaaactcagcggtgggcagagcccggagagcccatttgtgtggtctgtggccggtacggtgagtatatctgtgacaagacggacgaggacgtctgcagtttggagtgcaaggcaaagcacctgcttcaggtgaaagagaaggaggagaagtcaaaattgagtaacccacagaaggcagacagcgaacctgagtcccccctgaacgcctcctacgtctacaaggagcacccttttatactcaatctacaggaagatcagatagaaaacctgaaacagcagcttggcatactcgttcaaggacaggaagtgaccaggcctattattgacttcgaacactgttcactaccggaggtactcaatcataacctcaagaagagcgggtacgaggtgcctacccctatccagatgcaaatgattccagtcgggcttctcggcagagacatcctggccagtgcagacactggatctggaaagactgcagcttttctgctgccggtaatcatgcgagctcttttcgagtcaaaaactcccagtgccctgatattgactcctacgcgggaactggctatccaaatcgagcgccaggcaaaggagctgatgagcggcctcccgagaatgaagacggtcctgttggtggggggcttaccgcttccgccgcagctgtaccgtctgcagcagcacgttaaagttatcatcgcaacacccggtagactcctcgatatcatcaagcaatcctccgtcgagctctgcggagtgaaaatcgtggtcgtggatgaggccgatactatgctcaagatggggttccagcagcaggtgctcgatatattggagaacatacctaatgattgccagaccatcctcgtgtccgctaccatccctacgtctattgagcaacttgccagccagcttctgcacaacccagtgcgcattatcacaggagagaaaaacctcccctgcgcgaacgtccggcaaattattctctgggttgaggatcctgctaagaagaaaaaattgttcgaaattctaaacgacaaaaaactcttcaagccccctgttctggtgttcgttgactgcaagctgggagcggacctgttatcagaggctgttcagaaaattacagggttgaagagcatttcaatacacagcgagaaatcccaaatcgagcgcaaaaatatacttaaaggactcctagagggggattacgaggtggtggtgagtaccggcgtgcttggaagaggtctggacctcatttccgttcggctggtggtcaacttcgacatgccctccagtatggatgagtatgtgcaccaggagaatacctacaagtctacatggcgcaacccccaacacttccagcaggatgtcagaatgactttggggtatgtgggtaaggcccagtgggaagaagataaccagctaaaggtgaagctgggtctgaagaaaaactgtagtagttag

SEQ ID NO: 266740 - DNA, 1704 bp, Artificial Sequence
  derived and/or modified sequence
atgtttgtgcccaggagcctgaagatcaagagaaatgccaatgatgatggcaagagctgtgtggccaagatcatcaagccagaccctgaggacctgcagctggacaagagcagagatgtgcctgtggatgctgtggccacagaagctgccaccatcgacagacacatcagcgagagctgccccttccccagccctgggggccagctggccgaggtgcacagcgtgtccccagagcagggcgccaaggacagccaccccagcgaggagcctgtgaagagcttcagcaagacccagcgctgggccgagcctggagagcccatctgtgtggtgtgtggccgctacggggagtacatctgtgacaagacagatgaagatgtgtgcagcctggagtgcaaggccaagcacctgctgcaggtgaaggagaaggaggagaagagcaagctgagcaacccccagaaggctgacagcgagcctgagagccccctgaatgccagctatgtgtacaaggagcaccccttcatcctgaacctgcaggaggaccagatcgagaacctgaagcagcagctgggcatcctggtgcagggccaggaggtgacccggcccatcatcgactttgagcactgcagcctgcctgaggtgctgaaccacaacctgaagaagagcggctatgaggtgcccacccccatccagatgcagatgatccctgtgggcctgctgggccgggacatcctggccagcgctgacaccggcagcggcaagacagctgccttcctgctgcccgtcatcatgagggccctgtttgagagcaagaccccatctgccctgatcctgacccccacccgggagctggccatccagatcgagcggcaggccaaggagctgatgagcggcctgcccaggatgaagacagtgctgctggtgggcggcctgcccctgcccccccagctgtaccgcctgcagcagcacgtgaaggtgatcatcgccaccccaggccgcctgctggacatcatcaagcagagctctgtggagctgtgtggggtgaagatcgtggtggtggatgaagctgacaccatgctgaagatgggcttccagcagcaggtgctggacatcctggagaacatccccaatgactgccagaccatcctggtgtctgccaccatccccaccagcattgagcagctggccagccagctgctgcacaaccctgtgcgcatcatcactggagagaagaacctgccctgtgccaacgtgcggcagatcatcctgtgggtggaggaccctgccaagaagaagaagctgtttgagatcctgaatgacaagaagctgttcaagccccctgtgctggtgtttgtggactgcaagctgggcgctgacctgctgtctgaggccgtgcagaagatcaccggcctgaagagcatcagcatccacagcgagaagagccagatcgagaggaagaacatcctgaagggcctgctggagggggactatgaggtggtggtgtccactggagtgctgggccggggcctggacctgatctctgtgcggctggtggtgaactttgacatgcccagctccatggatgaatatgtgcaccagctgaacatcatctgggtggtgcccttcagcggcatcaacatcaatgccagcctgattgccctgctgtacagcctgctgaccaccatcaacatgaagttcaccccctag

SEQ ID NO: 266741 - DNA, 1743 bp, Artificial Sequence
  derived and/or modified sequence
atgtttgtgcccaggagcctgaagatcaagagaaatgccaatgatgatggcaagagctgtgtggccaagatcatcaagccagaccctgaggacctgcagctggacaagagcagagatgtgcctgtggatgctgtggccacagaagctgccaccatcgacagacacatcagcgagagctgccccttccccagccctgggggccagctggccgaggtgcacagcgtgtccccagagcagggcgccaaggacagccaccccagcgaggagcctgtgaagagcttcagcaagacccagcgctgggccgagcctggagagcccatctgtgtggtgtgtggccgctacggggagtacatctgtgacaagacagatgaagatgtgtgcagcctggagtgcaaggccaagcacctgctgcaggtgaaggagaaggaggagaagagcaagctgagcaacccccagaaggctgacagcgagcctgagagccccctgaatgccagctatgtgtacaaggagcaccccttcatcctgaacctgcaggaggaccagatcgagaacctgaagcagcagctgggcatcctggtgcagggccaggaggtgacccggcccatcatcgactttgagcactgcagcctgcctgaggtgctgaaccacaacctgaagaagagcggctatgaggtgcccacccccatccagatgcagatgatccctgtgggcctgctgggccgggacatcctggccagcgctgacaccggcagcggcaagacagctgccttcctgctgcccgtcatcatgagggccctgtttgagagcaagaccccatctgccctgatcctgacccccacccgggagctggccatccagatcgagcggcaggccaaggagctgatgagcggcctgcccaggatgaagacagtgctgctggtgggcggcctgcccctgcccccccagctgtaccgcctgcagcagcacgtgaaggtgatcatcgccaccccaggccgcctgctggacatcatcaagcagagctctgtggagctgtgtggggtgaagatcgtggtggtggatgaagctgacaccatgctgaagatgggcttccagcagcaggtgctggacatcctggagaacatccccaatgactgccagaccatcctggtgtctgccaccatccccaccagcattgagcagctggccagccagctgctgcacaaccctgtgcgcatcatcactggagagaagaacctgccctgtgccaacgtgcggcagatcatcctgtgggtggaggaccctgccaagaagaagaagctgtttgagatcctgaatgacaagaagctgttcaagccccctgtgctggtgtttgtggactgcaagctgggcgctgacctgctgtctgaggccgtgcagaagatcaccggcctgaagagcatcagcatccacagcgagaagagccagatcgagaggaagaacatcctgaagggcctgctggagggggactatgaggtggtggtgtccactggagtgctgggccggggcctggacctgatctctgtgcggctggtggtgaactttgacatgcccagctccatggatgaatatgtgcaccaggagaacacctacaagagcacctggaggaacccccagcacttccagcaggatgtgaggatgaccctgggctacgtgggcaaggcccagtgggaggaggacaaccagctgaaggtgaagctgggcctgaagaagaactgcagcagctag

SEQ ID NO: 266742 - DNA, 1704 bp, Artificial Sequence
  derived and/or modified sequence
atgttcgtgccccggagcctgaagatcaagcggaacgccaacgacgacggtaaatcctgtgtggctaaaatcatcaaacctgaccccgaggacctgcagctcgacaagagccgggatgttcctgtcgatgcggtggctaccgaagccgccaccattgatcgccatattagtgagtcctgcccttttccatctcccggcgggcagctggccgaagtccactctgtgtcacctgagcaaggtgccaaggactctcatccatccgaggaacctgtgaagagcttttctaagacgcagcggtgggccgagcctggcgagcctatctgcgtcgtctgtggaaggtacggcgagtacatttgtgacaagaccgatgaggacgtgtgctcactcgagtgtaaagccaagcatcttctgcaggtgaaggagaaagaagagaagagcaaactgtcaaatccacagaaggcagattcagaacccgaaagccctctgaatgccagctacgtgtacaaagaacatcctttcatcctgaacctacaagaggaccaaatcgagaacttaaagcagcaacttgggatactggtgcaggggcaggaagtgactaggcccataattgatttcgaacactgttccctgccagaagttctgaatcacaatctgaagaagagtggatatgaggtccccacccccattcagatgcagatgattccagtgggactattggggagggacatcctcgcaagcgccgataccggatctgggaagaccgccgctttcctgctcccagtgattatgcgggctctcttcgagagcaaaaccccttctgctctgattcttactcccaccagggagctggcaatccagattgagaggcaggccaaggagctgatgtccggactaccccggatgaaaacagtgctccttgtgggcgggctccctctgccaccccagctgtatcgtctacagcaacacgtgaaggttatcatagccactccagggaggctgttagatataataaaacagagcagcgtggagttgtgcggtgtgaagatcgtggtggtagacgaggctgacaccatgctgaaaatggggtttcaacagcaggtgcttgacatcctggagaatatccctaatgattgtcagacaattttagtatccgccacgatacctaccagtatcgagcagcttgcctcgcaactgctccacaaccccgttcggattattactggggaaaagaatctgccctgtgccaatgtgaggcagatcattctgtgggtagaagaccccgccaaaaaaaaaaaactgtttgaaattcttaatgataagaagcttttcaagccgccagtgctggtttttgtggattgtaaactgggggccgatttgcttagcgaagcagtacagaagatcacagggctgaagagtatcagtattcactctgagaagagccagattgagcgcaaaaacatcttaaagggcttgcttgagggagattacgaagtggtggtttccactggcgtgctcggccgcggattggacctaatctctgtgcgtctggtggtgaatttcgacatgccttcgtccatggacgagtacgtgcaccaactcaacatcatctgggtcgtgcccttttccggcatcaacataaacgcttctctaattgccctgttgtattcactgctgacaaccataaatatgaaattcacaccctag

SEQ ID NO: 266743 - DNA, 1743 bp, Artificial Sequence
  derived and/or modified sequence
atgttcgtgccccggagcctgaagatcaagcggaacgccaacgacgacggcaaaagttgtgtcgcaaagatcattaagccagatccggaggatctacagctggataagtcgcgcgatgtcccagtggacgcagtggctacagaagcggccacaatagatagacacatctctgagagctgcccattccctagtccagggggccagttggccgaggtccacagcgtttcacctgaacagggggctaaggactcccacccctcagaggagcccgtgaaatcctttagcaagacccagagatgggcagaacctggcgaacccatttgcgtggtttgcggcagatatggggaatatatctgcgacaagactgatgaggatgtgtgctcgctggagtgcaaggccaaacatttgttgcaggtgaaagagaaggaggagaagtctaaattatccaatcctcagaaggcagactctgagcccgagagtccgctgaatgcttcttatgtatataaggagcaccctttcattcttaatctgcaggaggatcagatagaaaacctgaagcagcagctcggtatattggtgcaagggcaggaggtcacacgccctatcatcgacttcgagcattgttctcttcccgaggttctgaaccacaacctgaagaagtctggttacgaggtgcccacacccatacagatgcagatgatcccggtgggactgctgggtcgggatattctggctagcgcagataccggatcaggcaaaaccgcagccttcctgctgccagtcatcatgcgcgctctgtttgaaagtaagactccatcagcactaatcctgacacctactagagaacttgccatccaaatcgaacggcaagctaaagaactgatgtccggccttccaaggatgaaaacagtgctgctcgtagggggtcttccgttgccaccacagttatatcggctacagcaacatgtgaaagtaataatcgcaaccccgggccggctgctggatatcataaaacaaagttcagtcgaactttgcggtgtcaagattgtcgtggttgatgaggccgacactatgcttaaaatggggttccagcagcaggttcttgacatccttgaaaacatcccaaacgattgtcagacaattcttgtttccgcaaccatccctacatcgattgagcagctggcttctcagctgctgcataatcctgtgcgaatcatcactggagagaaaaatctaccatgtgccaatgttcgacaaatcatcctatgggtggaggatccagccaagaagaaaaagttattcgaaattctcaacgataagaaactgtttaaaccaccggtgttggtcttcgtggactgtaagctgggagccgatttgctctccgaagccgtgcaaaagatcacgggccttaaatcaatcagcattcattctgaaaagtcgcaaatcgaaagaaagaatatcctcaagggattgctggagggggactacgaggttgtggtgtctactggtgtgctaggccggggcttggatctcatttcagttaggcttgtcgtgaacttcgatatgcccagctccatggatgaatatgtgcaccaggagaacacctacaagtccacctggagaaacccacaacactttcaacaggacgttagaatgacgctcggctacgtgggcaaggcgcagtgggaagaagacaaccaactcaaggtgaaactgggacttaagaagaactgctcaagctag

SEQ ID NO: 266744 - DNA, 1704 bp, Artificial Sequence
  derived and/or modified sequence
atgtttgttccacggagcttgaaaatcaaaaggaacgccaacgacgacgggaagagctgtgtagcaaagattattaaacccgatcccgaggatctccagctggataaaagtcgggacgtacctgttgacgcagtggctacagaagccgcaactatcgatagacatatctcagaatcttgtccatttcctagccccggtggccagctcgcagaagttcacagcgtcagcccagagcagggagccaaagatagccacccgtctgaggagcctgtgaagtctttcagcaaaacacaacggtgggcggagccaggcgaaccaatctgtgtggtgtgtggaaggtatggggagtacatctgtgacaaaactgatgaggacgtgtgcagcctcgagtgtaaggctaaacatctactgcaggtaaaagagaaagaggagaaatctaaactgtctaacccccagaaggccgattctgaacctgagtcacctttgaatgccagctacgtgtataaagaacaccctttcatcctcaacctccaggaagatcaaatcgaaaacctcaaacagcagctcgggatcttagttcagggacaagaagttaccaggccaattatagacttcgagcactgctccctgcctgaagtgctcaatcataatctgaagaaaagcggatatgaggttccgacgcccattcagatgcagatgatccccgtgggcctcctgggcagagatatcttagctagtgctgatactggtagcggaaagactgccgcatttctccttccagtcattatgcgggcattgttcgaatctaagactcctagcgcgctgatcctaacacccacacgagaacttgctatacagattgagaggcaggcaaaggagctgatgagcgggctgcccaggatgaaaaccgtcttgttggtcggtggcctcccacttccacctcagctgtacaggctgcagcaacacgttaaggtcattatcgctacacctggaagacttctggacataatcaagcaatcaagtgtggagctctgtggagttaagatagtagttgtggatgaggcagacactatgctaaagatgggtttccagcaacaggtcctcgacatcctcgaaaacataccgaacgattgccagaccattcttgtatctgctactataccgacctcaattgaacagctggccagccagttgctgcacaaccccgtacgaataatcactggcgagaaaaaccttccctgcgctaacgtgcggcagatcatcctgtgggtagaagacccagctaaaaagaaaaaactgttcgaaatcctgaacgataaaaagttattcaaacccccagtcttggtgttcgttgattgcaaacttggcgctgacctgttatctgaagcagtccaaaaaattacaggcctgaagtctatcagcatccatagtgagaagtctcagattgagagaaaaaatattcttaaagggctgctggagggggactacgaggtggtggtttcaactggagtgttgggcaggggattagacctcatcagcgttaggctggtagttaactttgacatgcccagctcgatggatgaatatgtgcatcaactgaacattatctgggtggtgcccttctcaggcattaacattaacgctagtcttatcgctctgttgtacagcttactgacaactattaacatgaagtttacaccatag

SEQ ID NO: 266745 - DNA, 1743 bp, Artificial Sequence
  derived and/or modified sequence
atgtttgttcctcggagcctaaagatcaagcgcaatgccaacgacgatggtaagtcctgtgtagctaagatcataaagcccgatcccgaagatctccagctggataaatcaagagacgttccagtcgacgcagtggcaaccgaggcagcaactattgacaggcatattagtgagagctgtcctttcccctccccaggagggcaactggcagaagtccactccgtctcgcccgaacagggcgctaaagattcgcacccctccgaagagccagtgaaaagtttctctaaaactcagcgctgggccgagcccggagagcccatttgtgtggtgtgtggtagatacggtgagtacatatgcgacaagacggacgaagacgtctgctccctggaatgcaaggcgaagcaccttctgcaagtgaaggagaaagaagagaaatcaaaactgtcaaacccccaaaaagccgactcagaacccgaatctcccctgaatgcttcttatgtctacaaagagcacccgttcattttgaatctacaggaagatcagatagagaatcttaagcagcaactgggcatattggtgcagggacaagaagtgacccggccaatcatcgactttgagcactgcagcctgcccgaggtgctgaatcataacctcaagaagtcgggttatgaagtcccaacccctattcagatgcagatgattccagtcggcctcctgggacgggatatcctagcctcggccgatacaggcagcggtaagacagcagcttttctgcttcccgtgatcatgcgagcattattcgaaagcaaaacaccctcagccctgatcctcacgcctacgagagagctggccatacagattgaacgccaggccaaggagctgatgtccggactccccaggatgaagacggtgcttctcgtgggcggtttacctctgccaccccagctgtaccgactccagcaacacgtgaaggtcataatcgccacacccggacggctgctcgatattattaagcagtcatccgttgagctctgtggtgtgaagatagtggtggtggatgaggccgatacaatgttgaagatggggtttcaacaacaggtgctcgacatcctggagaatatccctaacgattgtcagaccattctggtgtccgccaccattccaacaagtatcgaacagttggcgagccagctgctgcacaatcccgtgcggataatcacaggcgagaagaatctcccctgtgcaaatgtccggcagatcatcctctgggtggaggacccagcgaaaaagaaaaagctgtttgagatcctgaatgacaaaaaactctttaagcctcctgtgctggtgttcgttgattgtaagctgggggctgatctccttagtgaagccgtacaaaagataaccggcctgaagagcattagcatccattccgagaagtcccagatagagcgaaaaaatatcctgaagggcctcttggaaggcgactacgaagtggttgtctccacaggcgtcctaggacggggactggacctcatcagtgtccggctagtcgtcaactttgacatgcctagctccatggacgaatacgtccaccaggagaacacttacaaatcaacatggaggaacccccagcattttcaacaggacgtcaggatgactcttggatatgtagggaaggcccagtgggaggaagacaaccagctgaaggttaagctggggctgaaaaagaactgttcaagctag

SEQ ID NO: 266746 - protein, 205 aa, Artificial Sequence
  derived and/or modified sequence
MKTVLLVGGLPLPPQLYRLQQHVKDKKLFKPPVLVFVDCKLGADLLSEAVQKITGLKSISIHSEKSQIERKNILKGLLEGDYEVVVSTGVLGRGLDLISVRLVVNFDMPSSMDEYVHQIGRVGRLGQNGTAITFINNNSKRLFWDIAKRVKPTGSILPPQLLNSPYLHDQKRKEQQKDKQTQNDLVTGANLMDIIRKHDKSNSQK

SEQ ID NO: 266747 - DNA, 618 bp, Artificial Sequence
  derived and/or modified sequence
atgaagaccgtgctgctggtgggcggcctgcccctgcccccccagctgtacagactgcagcagcacgtgaaggacaagaagctgttcaagccccccgtgctggtgttcgtggactgcaagctgggcgccgacctgctgagcgaggccgtgcagaagatcaccggcctgaagagcatcagcatccacagcgagaagagccagatcgagagaaagaacatcctgaagggcctgctggagggcgactacgaggtggtggtgagcaccggcgtgctgggcagaggcctggacctgatcagcgtgagactggtggtgaacttcgacatgcccagcagcatggacgagtacgtgcaccagatcggcagagtgggcagactgggccagaacggcaccgccatcaccttcatcaacaacaacagcaagagactgttctgggacatcgccaagagagtgaagcccaccggcagcatcctgcccccccagctgctgaacagcccctacctgcacgaccagaagagaaaggagcagcagaaggacaagcagacccagaacgacctggtgaccggcgccaacctgatggacatcatcagaaagcacgacaagagcaacagccagaagtag

SEQ ID NO: 266748 - DNA, 486 bp, Artificial Sequence
  derived and/or modified sequence
atgttcgtgcccagaagcctgaagatcaagagaaacgccaacgacgacggcaagagctgcgtggccaagatcatcaagcccgaccccgaggacctgcagctggacaagagcagagacgtgcccgtggacgccgtggccaccgaggccgccaccatcgacagacacatcagcgagagctgccccttccccagccccggcggccagctggccgaggtgcacagcgtgagccccgagcagggcgccaaggacagccaccccagcgaggagcccgtgaagagcttcagcaagacccagagatgggccgagcccggcgagcccatctgcgtggtgtgcggcagatacggcgagtacatctgcgacaagaccgacgaggacgtgtgcagcctggagtgcaaggccaagcacctgctgcaggtgaaggagaaggaggagaagagcaagctgagcaacccccagaaggccgacagcgagcccgagagcccctag

SEQ ID NO: 266749 - DNA, 369 bp, Artificial Sequence
  derived and/or modified sequence
atggtggtggtggagaagggcgccagcctgatgagcagagccagcctgatgcccgcccaggccagagcccccttccagagactgagagactgcagaggccccgccgacagcagccacgccttcaagctgcagtgcttccccagccactgcagaagacccccctgggtgatcagcagaaagggcagagccatcaacaagtacagcatctgcatcagctgcgtggccctgcacctggagatcagcttcatctggcagctgctgcagaacgagcccaacctggagggcggcctgggcagattcatgctggccagcctgagcctgcagcaggtgatcagcatcctggccttcaccagagtgaagcagctgtag

SEQ ID NO: 266750 - DNA, 1977 bp, Artificial Sequence
  derived and/or modified sequence
cgcggtggccccgcctccccgccgcccggaaagcgggctgcggccccctcccaaaacccggggaagtggattctactctacgctccgctccgctccgctccgcaccaccaaccccgggccgcagtcctgacgagcgggtcagggcttgtcgggcggaagcctggcctggagcctggaagggggagacggcccgagcgggagcgggagcggacgcggcctcagtcctgcgcggaatattgaaggatgtttgttccaagatctctaaaaatcaagaggaatgctaatgatgatggcaaaagttgtgtggctaagataattaaaccagacccagaagaccttcagttggacaaaagcagagatgttcccgttgatgctgtagctacagaagcagccacaatagacaggcacatcagcgaatcatgccctttccccagcccaggtggccagttggcagaggttcattcagtaagtcccgagcagggtgcgaaggacagccatccttctgaagagcccgttaagtcattttccaaaacacagcgctgggcagaaccaggggaacccatctgtgttgtctgtggtcgttatggagagtatatctgtgataagacagatgaagatgtgtgtagtttggagtgtaaagcgaaacatcttctacaagttaaggaaaaggaagagaaatcaaaactcagcaatccacagaaggctgattctgagccagagtctccactgaatgcttcctatgtctacaaagagcacccctttattttgaaccttcaggaagaccagattgaaaatcttaaacagcagctgggaattttagttcaagggcaagaagtcaccaggcccattattgactttgaacattgtagtctccctgaggtcttaaatcacaacttgaagaaatcaggctatgaggtgccaactcccattcaaatgcagatgattcctgtgggacttctgggaagagacattctggccagtgcagatactggctcaggaaaaacagctgcttttcttcttcctgttatcatgcgagctttattcgagagcaaaactccatctgcgctcattcttacaccaaccagagagttagccattcagatagagagacaagctaaagaattgatgagtggcctgccacgcatgaaaactgtgcttcttgtagggggcttacccttacccccacagctttatcgtctgcaacaacatgttaaggataagaaactctttaagcctccagtgttagtatttgtggactgcaaactaggagcagatcttttgagtgaagccgttcagaaaatcacagggctgaaaagcatatctatacattcagagaagtcgcaaatagaaaggaaaaacatattgaagggattacttgaaggagactatgaagttgtagtgagcacaggagtcttgggacgaggcctagacttgatcagtgtcaggctggttgtcaattttgatatgccttcaagtatggatgagtatgtccatcagattggaagagtaggaagattaggtcaaaatggaacagcgattactttcatcaataataattcaaaaagactcttctgggatattgcaaaacgagtaaagcccacaggatccattcttccccctcagttattaaattccccataccttcatgaccagaagagaaaggaacaacagaaagataaacagacacagaatgatctggttacaggagctaatcttatggatattatcagaaaacatgataaaagtaattctcagaaatgattttctctgccacttgaatatttttttttattgtatatagtcagcaaaaaattatggtttgcataaatggaaatgtacatgaattttaaaaattttaagatatttttaatttaataaaatttatataactatattgtatttatttcccttaattcttataaattaaaaacatcagaaaatgaattattaaataaaagacagtgttttcttttctgg

SEQ ID NO: 266751 - DNA, 635 bp, Artificial Sequence
  derived and/or modified sequence
tggggcgctaggccgcggcggcagaactggtgcccctgcgcggccttcctcccatccttacagttccccgtgtcccaggcctctacccggaaccggagccccgcccgtctcctagcagctccgtgacgtgaagcgcctcgggaatattgaaggatgtttgttccaagatctctaaaaatcaagaggaatgctaatgatgatggcaaaagttgtgtggctaagataattaaaccagacccagaagaccttcagttggacaaaagcagagatgttcccgttgatgctgtagctacagaagcagccacaatagacaggcacatcagcgaatcatgccctttccccagcccaggtggccagttggcagaggttcattcagtaagtcccgagcagggtgcgaaggacagccatccttctgaagagcccgttaagtcattttccaaaacacagcgctgggcagaaccaggggaacccatctgtgttgtctgtggtcgttatggagagtatatctgtgataagacagatgaagatgtgtgtagtttggagtgtaaagcgaaacatcttctacaagttaaggaaaaggaagagaaatcaaaactcagcaatccacagaaggctgattctgagccagagtctcc

SEQ ID NO: 266752 - DNA, 618 bp, Artificial Sequence
  derived and/or modified sequence
atgaaaaccgttctgctggttgggggccttccattgccccctcagctctaccgtttacagcagcacgtgaaggacaagaaactgtttaaacctccagtgcttgtgtttgtagactgtaagctcggggcagacctgctgtcagaagccgtgcaaaaaatcacaggcttgaagagtatcagcatccatagcgagaaaagccagatcgaacggaagaatatcctgaaagggctgttggaaggcgattatgaggtggtggtgagcacgggtgtccttggtaggggactggacctcatctccgtgagactggtggttaactttgatatgccttctagtatggacgagtatgtgcaccagatcggtcgagtaggccgcctgggtcagaatggaactgccattacctttatcaataacaactcaaaaaggcttttttgggatatcgcgaagcgtgtcaagcccaccggctccattctgcccccacagctgttaaattctccataccttcacgaccagaaacggaaggagcagcagaaggacaaacagacccagaatgacctcgttaccggagcaaacctgatggatatcatccgcaaacacgacaagtccaactcccagaaatag

SEQ ID NO: 266753 - DNA, 486 bp, Artificial Sequence
  derived and/or modified sequence
atgttcgtgcccaggagtctcaaaattaaacgcaatgctaacgacgacggaaaatcttgcgtggctaaaatcataaagcccgatcccgaggacttgcagcttgacaaatccagggatgtacctgtggatgctgttgccactgaggcagctacaattgataggcacatttctgagagttgccccttccccagccctggaggccagctcgcggaggtccactccgtgagcccagagcaaggcgccaaagactcccatccatccgaggagcctgtgaagagcttcagtaagactcagcgatgggcagagccaggtgaaccgatctgtgtggtttgcggacgctatggggagtacatctgtgacaaaaccgatgaggatgtctgctcattggagtgcaaggctaagcatctgctacaggtgaaagagaaagaagagaagagtaagttgagcaatccccagaaggcggactctgagcctgagagcccttag

SEQ ID NO: 266754 - DNA, 618 bp, Artificial Sequence
  derived and/or modified sequence
atgaagacagtgctgctggtgggcggcctgcccctgcccccccagctgtaccgcctgcagcagcacgtgaaggacaagaagctgttcaagccccctgtgctggtgtttgtggactgcaagctgggcgctgacctgctgtctgaggccgtgcagaagatcaccggcctgaagagcatcagcatccacagcgagaagagccagatcgagaggaagaacatcctgaagggcctgctggagggggactatgaggtggtggtgtccactggagtgctgggccggggcctggacctgatctctgtgcggctggtggtgaactttgacatgcccagctccatggatgaatatgtgcaccagatcggccgggtgggccgcctgggccagaatggaacagccatcaccttcatcaacaacaacagcaagaggctcttctgggacatcgccaagagggtgaagcccaccggcagcatcctgcccccccagctgctgaacagcccctacctgcatgaccagaagaggaaggagcagcagaaggacaagcagacccagaatgacctggtgactggagccaacctgatggacatcatcaggaagcatgacaagagcaacagccagaagtag

SEQ ID NO: 266755 - DNA, 486 bp, Artificial Sequence
  derived and/or modified sequence
atgtttgtgcccaggagcctgaagatcaagagaaatgccaatgatgatggcaagagctgtgtggccaagatcatcaagccagaccctgaggacctgcagctggacaagagcagagatgtgcctgtggatgctgtggccacagaagctgccaccatcgacagacacatcagcgagagctgccccttccccagccctgggggccagctggccgaggtgcacagcgtgtccccagagcagggcgccaaggacagccaccccagcgaggagcctgtgaagagcttcagcaagacccagcgctgggccgagcctggagagcccatctgtgtggtgtgtggccgctacggggagtacatctgtgacaagacagatgaagatgtgtgcagcctggagtgcaaggccaagcacctgctgcaggtgaaggagaaggaggagaagagcaagctgagcaacccccagaaggctgacagcgagcctgagagcccctag

SEQ ID NO: 266756 - DNA, 618 bp, Artificial Sequence
  derived and/or modified sequence
atgaagaccgtgctgctggtgggcggcctgcccctgcccccccagttgtatcgcctgcagcagcacgttaaagacaagaaacttttcaagccccctgtgcttgtgttcgtggactgcaagttaggcgccgaccttttgtcggaggctgttcaaaaaattacaggccttaagtccatttctatacactcagagaaaagtcagattgaacgcaaaaacatactcaagggcctgctggaaggtgattacgaagtagtcgtctccaccggcgtgcttggcaggggactggatctgatcagcgtccgactggtggtaaacttcgatatgccatcaagtatggatgaatacgtgcatcagatcggtagagtgggaagactgggccagaacgggacggctataacatttatcaacaataactccaaaagacttttctgggacatcgccaaacgagtgaaacctacagggagtattctgcctccccagctccttaacagtccgtacctccacgatcagaagagaaaggagcagcagaaagacaagcagacacagaacgatctggtcacaggcgccaacctgatggacataattagaaagcatgataagtccaactcgcagaaatag

SEQ ID NO: 266757 - DNA, 486 bp, Artificial Sequence
  derived and/or modified sequence
atgttcgtgccccggagcctgaagatcaagcggaacgccaacgacgatggtaaaagttgtgtggctaagatcatcaagcccgatccagaggaccttcagcttgataagagccgtgacgtgccagtggacgccgtggccacagaggcagctacaattgatcgacatatttccgaaagctgcccatttccttcccctggcgggcagctcgcagaagttcactcagtgtctcccgagcaaggggctaaggattctcacccatccgaggagcctgtgaagtctttttcaaagacacaacggtgggccgagccaggggaacccatttgcgtggtttgcggccgttacggtgaatacatttgcgataaaacagatgaggacgtctgttcgctggaatgtaaagccaaacacctgctccaggtgaaagaaaaagaggagaagagtaagctgagcaatccccagaaggccgactccgaacctgagtcaccctag

SEQ ID NO: 266758 - DNA, 618 bp, Artificial Sequence
  derived and/or modified sequence
atgaaaacagtgctgctggtgggaggcctgcctctgccacctcagttgtacaggctgcagcagcacgtcaaagacaagaagctgtttaaaccccctgtattggtttttgtggactgtaagctgggagcagatctgctgtctgaggcagtgcaaaaaataacaggactgaagtccataagtatccacagcgagaagtcccagatcgaacggaaaaacatcctgaagggactccttgagggggactacgaggtggtcgtgtctacgggagttcttggtcgtggtctcgatctcatatcggttcggttagtcgttaatttcgatatgcccagcagtatggatgaatacgtgcatcagattgggagggtagggcgtttgggccagaatggaactgctatcacattcataaataacaacagtaagagacttttttgggacatcgcgaaacgagtgaagcccacgggcagcatcctcccaccacaattgctgaactccccttatttgcacgatcagaagcggaaggaacagcagaaggataaacagacccaaaatgatctagtgaccggtgctaatctgatggatatcatacgcaagcatgataagtcaaactcacagaaatag

SEQ ID NO: 266759 - DNA, 486 bp, Artificial Sequence
  derived and/or modified sequence
atgtttgttccaagatccctgaagatcaaaaggaacgctaatgacgatggaaaatcctgcgtggccaagatcattaaaccggacccagaggatcttcagcttgacaagtcacgagatgtgccggtcgacgcggtcgccactgaggctgccacaattgaccgccacatatctgaaagctgtccttttccgagtcctgggggtcagcttgccgaggtgcacagcgttagccctgaacagggcgcaaaggattctcacccctcggaagagccggtaaagtccttttccaaaacccagaggtgggcagagcccggagagccaatctgcgttgtctgcgggcgttatggagagtatatttgcgacaaaaccgacgaagatgtctgtagcctggaatgcaaggccaaacatctgctgcaggtgaaggagaaggaggagaagtcgaaattgtcaaatccccagaaagccgatagcgagcctgagtccccttag

SEQ ID NO: 266760 - protein, 550 aa, Artificial Sequence
  derived and/or modified sequence
MASASSGPSSSVGFSSFDPAVPSCTLSSAASGIKRPMASEVPYASGMPIKKIGHRSVDSSGETTYKKTTSSALKGAIQLGITHTVGSLSTKPERDVLMQDFYVVESIFFPSEGSNLTPAHHYNDFRFKTYAPVAFRYFRELFGIRPDDYLYSLCSEPLIELCSSGASGSLFYVSSDDEFIIKTVQHKEAEFLQKLLPGYYMNLNQNPRTLLPKFYGLYCVQAGGKNIRIVVMNNLLPRSVKMHIKYDLKGSTYKRRASQKEREKPLPTFKDLDFLQDIPDGLFLDADMYNALCKTLQRDCLVLQSFKIMDYSLLMSIHNIDHAQREPLSSETQYSVDTRRPAPQKALYSTAMESIQGEARRGGTMETDDHMGGIPARNSKGERLLLYIGIIDILQSYRFVKKLEHSWKALVHDGDTVSVHRPGFYAERFQRFMCNTVFKKIPLKPSPSKKFRSGSSFSRRAGSSGNSCITYQPSVSGEHKAQVTTKAEVEPGVHLGRPDVLPQTPPLEEISEGSPIPDPSFSPLVGETLQMLTTSTTLEKLEVAESEFTH

SEQ ID NO: 266761 - DNA, 1653 bp, Artificial Sequence
  derived and/or modified sequence
atggcaagtgcctcatcaggcccttccagctccgtcggtttcagttcatttgaccctgccgtgccctcctgtacactctcttctgcagcaagtggcatcaaacggccgatggcgagcgaagtcccgtatgcttctggaatgccgattaaaaagatcggacaccgatctgtggatagtagcggtgagacaacctataagaagacaacctcttctgctttgaagggggctattcaactgggaattacgcacacggtgggtagcctctcaacaaagccggagagagatgtccttatgcaagacttctacgttgtggaatccatatttttcccatctgaaggatccaatttgactcccgcccatcactacaacgatttccgatttaaaacatatgcccccgtggcgtttaggtatttccgagagctgttcgggataagacctgatgactatttgtatagtttgtgtagcgaacccctgatcgagctgtgttcttccggtgcctcagggagcttgttctacgtaagcagcgacgatgagtttataattaagaccgttcaacataaagaggccgaattccttcagaagttgctgcccgggtactacatgaatctgaatcaaaatccgcgcaccttgctccccaagttctatggcctgtactgtgtccaggcgggaggtaaaaacatacgcatcgttgtaatgaacaatcttctgccacgcagtgtgaagatgcacatcaagtatgatctgaaagggtccacctataaacgtagggcgagtcagaaggaacgagagaagcctttaccgacctttaaggacctagattttttgcaggatattccagatggactgttcctagacgccgacatgtacaacgcgctctgcaaaactctgcaaagagattgtctggtactgcagagcttcaagatcatggattattccctcctaatgtctatccacaacattgaccatgcccagcgcgagcctctgtcgagcgaaacccagtacagcgtagatactcggcggccggccccacagaaggctttatactccacagcaatggaaagtattcagggggaggccagacgaggaggaacgatggagaccgatgatcatatgggcgggatacccgcccggaatagtaagggagaacgcctcctcctctatattgggatcatcgatattttgcagagctaccggtttgttaagaagttggaacactcctggaaggcactggtgcacgacggtgacacagtctctgttcatcgcccggggttctacgcagagcgcttccaacgattcatgtgtaacacagtcttcaaaaagatccctttgaaaccttcacccagtaagaaatttcgctccggcagctcattctctcgccgcgctgggagcagcgggaatagctgcattacctatcagccctcagtctccggtgagcataaggcccaggtgactactaaagccgaggtggagcctggcgtgcatctcggtaggccagacgtacttccccagactccccctttggaagagatctccgagggtagcccaatcccggatccttcctttagcccactggtgggagagacactccagatgctgaccacatctacgacgctggaaaagctggaagtggccgagtctgaatttactcattag

SEQ ID NO: 266762 - DNA, 1653 bp, Artificial Sequence
  derived and/or modified sequence
atggccagcgccagcagcggccccagcagctctgtgggcttcagcagctttgatcctgctgtgcccagctgcaccctgagcagcgctgccagcggcatcaagaggcccatggccagcgaggtgccctatgccagcggcatgcccatcaagaagattggccacaggtctgtggacagcagcggggagaccacctacaagaagaccaccagcagcgccctgaagggggccatccagctgggcatcacccacacagtgggcagcctgagcaccaagccagagagagatgtgctgatgcaggacttctacgtggtggagagcatcttcttccccagcgagggcagcaacctgaccccagcccaccactacaatgacttccgcttcaagacctacgcccctgtggccttccgctacttccgggagctgtttggcatccggccagatgactacctgtacagcctgtgcagcgagcccctgattgagctgtgcagcagcggggccagcggcagcctcttctacgtgtccagtgatgatgagttcatcatcaagacagtgcagcacaaggaggccgagttcctgcagaagctgctgcccggctactacatgaacctgaaccagaaccccaggaccctgctgcccaagttctacggcctgtactgtgtgcaggccggcggcaagaacatcagaattgtggtgatgaacaacctgctgcccaggtctgtgaagatgcacatcaagtatgacctgaagggcagcacctacaagagaagagccagccagaaggagcgggagaagcccctgcccaccttcaaggacctggacttcctgcaggacatcccagatggcctcttcctggatgctgacatgtacaatgccctgtgcaagaccctgcagagggactgcctggtgctgcagagcttcaagatcatggactacagcctgctgatgagcatccacaacatcgaccacgcccagcgggagcccctgagcagcgagacccagtacagcgtggacaccaggaggcctgccccccagaaggccctgtacagcacagccatggagagcatccagggcgaggcccggcggggcggcaccatggagacagatgaccacatgggcggcatcccagccaggaacagcaagggggagcggctgctgctgtacatcggcatcatcgacatcctgcagagctacagatttgtgaagaagctggagcacagctggaaggccctggtgcatgatggagacacagtgtctgtgcaccggcccggcttctacgccgagcgcttccagcgcttcatgtgcaacacagtgttcaagaagatccccctgaagcccagccccagcaagaagttccgcagcggcagcagcttcagcagaagagctggcagcagcggcaacagctgcatcacctaccagcccagcgtgtctggagagcacaaggcccaggtgaccaccaaggccgaggtggagcccggggtgcacctgggccgcccagatgtgctgccccagaccccacccctggaggagatcagcgagggcagccccatcccagaccccagcttcagccccctggtgggggagaccctgcagatgctgaccaccagcaccaccctggagaagctggaggtggccgagagcgagttcacccactag

SEQ ID NO: 266763 - DNA, 1653 bp, Artificial Sequence
  derived and/or modified sequence
atggccagcgccagcagcggccccagcagcagcgtgggcttcagcagcttcgatccagcggtgcctagctgcacactcagtagcgccgcctccgggattaagaggccaatggccagcgaggtcccctacgcatcaggcatgccaatcaagaagatcgggcaccgaagcgtagactcctccggggagaccacatacaagaagaccacaagttctgccttaaagggtgccattcagctaggtattacacatactgtcggctcactgtccacgaagcccgagagggacgtgctcatgcaggatttctatgttgtcgagtccatattctttccaagcgaaggaagcaacctaactcccgcccatcactacaacgattttcgatttaagacctacgcacctgtggccttccggtattttcgggagctcttcggaattcgtcccgatgactatttgtattctctttgcagcgaacccctaattgaactgtgttcaagtggcgccagtggcagcctgttttacgtgagcagtgacgatgaatttatcatcaaaacagtgcagcataaagaagccgagtttctgcaaaagctcctcccaggctactatatgaacctcaaccaaaaccctcggaccctgctgcccaagttctatggcctctactgtgtccaggccggcgggaagaacattaggatcgtcgtcatgaataatctcttaccaagaagcgtaaagatgcatattaaatatgatctgaagggcagtacctacaaacggcgggcatcacaaaaagagcgggagaaacctctgcctacgtttaaggacctggacttcctgcaagatatccccgacgggctctttctggacgccgacatgtataacgctctgtgcaagactttgcagagagactgccttgtcctacagagtttcaaaattatggattacagcctcctgatgtcaatacataacattgatcatgcacaaagagaaccactgtcctctgaaactcagtattccgttgatacacgccggcccgcgcctcagaaggcactgtattccaccgccatggaatccatccagggagaggctcgacgaggaggcacaatggaaactgacgaccatatgggtgggataccagctagaaattccaagggcgagaggctgcttttgtacattggaatcattgacattctccagtcctatagatttgtgaagaagctggagcattcgtggaaggccctggtgcacgacggggacactgtgtcagtgcatagacctggcttctatgctgaaaggttccaacgatttatgtgtaataccgtcttcaagaagattccgctgaagccaagtccctccaagaaatttagatctggctcatccttctctaggcgtgcaggctcttcaggcaatagctgcatcacatatcagcccagtgtcagtggcgaacataaggcccaggtgacaaccaaggcagaggtagaacccggggtgcatctgggacgccccgacgtgctgccccagaccccccccctggaagaaatctcagagggctcgccaattccagatccatcattcagtcccctggtgggagagaccctgcagatgctgactacttcaacaacattggagaagctcgaggtcgctgaaagtgaattcacacactag

SEQ ID NO: 266764 - DNA, 3737 bp, Artificial Sequence
  derived and/or modified sequence
gattttttgcttggctacccggagtgaagcggccgggttgggcgattaacaggccgtggttaggaaggacggagaaggggcgttcgctcctttgggacttttcatgcctcgtttttttttcagatgtggcttggtctgggcgcaaggtcccagcagccagcttaagcttactcttctgtgaaaggggaaagtatcccctgtggaaagcggttaaacttgtggagggggtgcgggacgtgagttcttccccatgccaggcgaatggtgtggccttgagctggtccaggagccggctcgacgtgtctgagggaggccccggagggggcggggaggtggcccacagaacgcgggttctgtaaagagacgttgggaagattcgattccgagaagaggaagaaccggattgaaagagagccaggccgctgagggggagggggctgctaagatggcgtcggcctcctccgggccgtcgtcttcggtcggtttttcatcctttgatcccgcggtcccttcctgtaccttgtcctcagcagcatctggaatcaagagacccatggcatctgaggtgccttatgcctctggcatgcccatcaagaaaataggccatagaagtgttgattcctcaggagagacaacatataaaaagacaacctcatcagccttgaaaggtgccatccagttaggcattacccacactgtggggagcctgagtaccaaaccagagcgtgatgtcctcatgcaagatttctacgtggttgagagtatcttctttcccagtgaagggagcaacctgacccctgctcatcactacaatgactttcgtttcaagacctatgcacctgttgccttccgctacttccgggagctatttggtatccggcccgatgattacttgtattccctctgcagtgagccgctgattgaactctgtagctctggagctagtggttccctattctatgtgtccagcgacgatgagttcattattaagacagtccaacataaagaggcggaatttctgcagaagctgcttccaggatactacatgaacctcaaccagaaccctcggactttgctgcctaaattctatggactgtactgtgtgcaggcaggtggcaagaacattcggattgtggtgatgaacaatcttttaccaagatcggtaaaaatgcatatcaaatatgacctcaaaggctcaacctacaaacggcgggcttcccagaaagagcgagagaagcctcttcccacatttaaagacctagacttcttacaagacatccctgatggtctttttttggatgctgacatgtacaacgctctctgtaagaccctgcagcgtgactgtttggtgctgcagagcttcaagataatggattacagcctcttgatgtcaatccataatatagatcatgcacaacgagagcccttaagcagtgaaacacagtactcagttgatactcgaagaccggccccccaaaaggctctgtattccacagccatggaatccatccagggagaggctcgacggggtggtaccatggagactgatgaccatatgggtggcatccctgcccggaatagtaaaggggaaaggcttctgctttatattggcatcattgacattctacagtcttacaggtttgttaagaagttggagcactcttggaaagccctggtacatgacggagacactgtctcagtgcatcgcccaggcttctacgctgaacggttccagcgcttcatgtgcaacacagtatttaagaagattcccttgaagccttctccttccaaaaagtttcggtctggctcatctttctctcggcgagcaggctccagtggcaactcctgcattacttaccagccatcggtctctggggaacacaaggcacaagtgacaacaaaggcagaagtggagccaggcgttcaccttggtcgtcctgatgttttacctcagactccacctttggaggaaatcagtgagggctcgcctattcctgaccccagtttctcacctctagttggagagactttgcaaatgctaactacaagtacaaccttggaaaagcttgaagttgcagagtcagagttcacccattaagcgcaaagcctcagaagacctggaacaagattctgccatctctgtgatcccaagatgtcagcccttgccccagcaatgctgaattttcttctacttggtcatcaaaaaaggagtgtaatagaagtgaggggagctgctcctccatcttcttcctgaagaagaaccttctctccttcctcttcctcatgaatgggccttagtgcctcagagagttgaggaccgcagcatcccctccactccagagttgggtggtatggattttcaactggccaaccctttgcctccactattgaatttttttcagacccccattcttcatgctggaaatgggattgctggacttggcagctttctttcccctcgtctttgactaggaaccggactcttaatttcctcaggacagactagctggcacattatccctaccttagttctttctctctgactcctggaagaatactcctgtaatctctgtaaaggtttttgggggataagggtgtttaaccacctcccagctttcttcttctttttttttttctgaaaaaaggaaaaagcacacagcacacaatttcaagccattttcagatcagaactccagaagtgttgacaagatgcctattcgtagagttccctcagaagagccatggtgtttatgaagagaagagtagtgattgctctgccagaagcagctcctctttaaactcctcctctcttgatgaatttcttaaggctgaaggaatgaagagagtgggacatggggtaatctttatcccttttgttaaaacaggaggcagccatgggctgggagatcatagcccttcctaggcagaatcctgttcactgccaggctatagtaattattactattttgcaatttgaaatatattctggttgtttttctaaatgtgaagacttaccaaatgaattttagatcattctccagaggagattttttttgctcttctcatcttttccaacagtgttctcctgtttgtggagctaaggtaaagaggggacacttctgtctgtttaacagacagtccatatctgtgaggccagcaaatattttcttaaactcatggggagacagcagattcttgccttggtgaggtcattgctgtgccatatgtcctacccccctgtcttcatgcagggaagttggaaatgggggctacatatgccctctcctccccgtctacaagagttgtggttttccatctgatccttccactcttgtcaggggaagaagggggcctggtatctcaggcagattgttgaattcctgttctatcccttctctatcccaccctgccttgataatatgttagcccataccccaaataactgtctatattagacacccccagccagtttctggctgcctgtctttgctgccatgttttttacaagaaggaaagaattcttgctatttttttttcataatttactatttatgatgtatttaagtgttttattaaggacagagttctgttaggggtgggagggaatatttgagggagggctgggtcttagggaaaggaatggggaagcaacatttttattaagtgttactatttgcctctactttgtattgttcagaaatggcaaatacaatataaaagtgatatatggttttaat

SEQ ID NO: 266765 - DNA, 1653 bp, Artificial Sequence
  derived and/or modified sequence
atggcttccgctagctctggaccatcaagctcagttggcttttcctcgttcgaccctgctgtcccatcatgcaccctttcttctgctgcctccggaattaagagacccatggcctccgaggtgccctacgccagcggtatgcccattaagaagattggacaccggtccgttgattcaagcggagaaacgacctacaagaagactaccagcagcgccctgaaaggggcaatccagctggggattacacatactgtgggctctctctcgactaagccagaacgcgatgtgctgatgcaggatttctacgtggtagaaagcatttttttcccttccgaaggctctaatctgaccccggcacatcactacaacgattttagatttaaaacgtatgctcccgttgcctttcgatattttagggagctcttcggaatccggcctgacgattacctatactccctctgcagtgagcctctgatagaattatgcagctccggcgcttcaggcagcctcttctatgtaagcagcgatgacgaattcattattaaaactgttcaacacaaggaagctgagtttttgcagaaacttctgcctgggtattatatgaaccttaaccagaatccccgaaccttacttccgaagttctacggactgtactgcgtccaagccggaggcaagaacattaggatcgtggtgatgaacaatctgctgcccaggtccgttaaaatgcatataaagtacgacctgaaagggagtacttacaagagacgcgcatcccagaaagagagagagaaacccttaccaaccttcaaagacctcgacttcttgcaggatatccccgacgggcttttccttgacgccgatatgtataacgccctgtgtaaaacactgcagcgtgattgcctggtgcttcagtcctttaaaatcatggattactctctgctcatgtctatacataacattgaccatgcccagcgcgagcccctgagttcagagacacagtatagcgttgatacacggaggccagcaccgcaaaaggcgttgtatagcacagcaatggagagtatacagggagaggccaggagaggcggaacaatggaaaccgatgaccacatgggtggaatccccgctagaaattccaagggagagaggttattgctttacatcgggattatcgacatcttgcaatcctacagatttgttaagaaactcgagcacagctggaaagcactggtgcatgatggtgacaccgtatcagtgcatagacctgggttctatgccgagcgcttccagaggtttatgtgtaataccgtgtttaagaaaatccctctgaagccgtcaccgagtaagaaatttcgcagcggctcgtccttctctcgcagagcgggtagcagcgggaatagttgcatcacttaccagccctcagtgagcggtgagcacaaggcccaggttaccaccaaggcagaagtggagcctggggtgcatttaggcagaccggacgtgctccctcagacgccccctctggaggagatctccgagggcagtcccattccagaccccagctttagccctctcgtaggagaaaccctccaaatgcttaccacctcaaccacactggagaagctcgaggtggcagaaagtgaatttacgcactag

SEQ ID NO: 266766 - DNA, 1653 bp, Artificial Sequence
  derived and/or modified sequence
atggccagcgccagcagcggccccagcagcagcgtgggcttcagcagcttcgaccccgccgtgcccagctgcaccctgagcagcgccgccagcggcatcaagagacccatggccagcgaggtgccctacgccagcggcatgcccatcaagaagatcggccacagaagcgtggacagcagcggcgagaccacctacaagaagaccaccagcagcgccctgaagggcgccatccagctgggcatcacccacaccgtgggcagcctgagcaccaagcccgagagagacgtgctgatgcaggacttctacgtggtggagagcatcttcttccccagcgagggcagcaacctgacccccgcccaccactacaacgacttcagattcaagacctacgcccccgtggccttcagatacttcagagagctgttcggcatcagacccgacgactacctgtacagcctgtgcagcgagcccctgatcgagctgtgcagcagcggcgccagcggcagcctgttctacgtgagcagcgacgacgagttcatcatcaagaccgtgcagcacaaggaggccgagttcctgcagaagctgctgcccggctactacatgaacctgaaccagaaccccagaaccctgctgcccaagttctacggcctgtactgcgtgcaggccggcggcaagaacatcagaatcgtggtgatgaacaacctgctgcccagaagcgtgaagatgcacatcaagtacgacctgaagggcagcacctacaagagaagagccagccagaaggagagagagaagcccctgcccaccttcaaggacctggacttcctgcaggacatccccgacggcctgttcctggacgccgacatgtacaacgccctgtgcaagaccctgcagagagactgcctggtgctgcagagcttcaagatcatggactacagcctgctgatgagcatccacaacatcgaccacgcccagagagagcccctgagcagcgagacccagtacagcgtggacaccagaagacccgccccccagaaggccctgtacagcaccgccatggagagcatccagggcgaggccagaagaggcggcaccatggagaccgacgaccacatgggcggcatccccgccagaaacagcaagggcgagagactgctgctgtacatcggcatcatcgacatcctgcagagctacagattcgtgaagaagctggagcacagctggaaggccctggtgcacgacggcgacaccgtgagcgtgcacagacccggcttctacgccgagagattccagagattcatgtgcaacaccgtgttcaagaagatccccctgaagcccagccccagcaagaagttcagaagcggcagcagcttcagcagaagagccggcagcagcggcaacagctgcatcacctaccagcccagcgtgagcggcgagcacaaggcccaggtgaccaccaaggccgaggtggagcccggcgtgcacctgggcagacccgacgtgctgccccagaccccccccctggaggagatcagcgagggcagccccatccccgaccccagcttcagccccctggtgggcgagaccctgcagatgctgaccaccagcaccaccctggagaagctggaggtggccgagagcgagttcacccactag

SEQ ID NO: 266767 - protein, 180 aa, Artificial Sequence
  derived and/or modified sequence
MAALLMPRRNKGMRTRLGCLSHKSDSCSDFTAILPDKPNRALKRLSTEEATRWADSFDVLLSHKYGVAAFRAFLKTEFSEENLEFWLACEEFKKTRSTAKLVSKAHRIFEEFVDVQAPREVNIDFQTREATRKNLQEPSLTCFDQAQGKVHSLMEKDSYPRFLRSKMYLDLLSQSQRRLS

SEQ ID NO: 266768 - protein, 57 aa, Artificial Sequence
  derived and/or modified sequence
MAALLMPRRNKGMRTRLGCLSHKSDSCSDFTAILPDKPNRALKRLSTEEATRWADSF

SEQ ID NO: 266769 - DNA, 543 bp, Artificial Sequence
  derived and/or modified sequence
atggccgccctgctgatgcccagaagaaacaagggcatgagaaccagactgggctgcctgagccacaagagcgacagctgcagcgacttcaccgccatcctgcccgacaagcccaacagagccctgaagagactgagcaccgaggaggccaccagatgggccgacagcttcgacgtgctgctgagccacaagtacggcgtggccgccttcagagccttcctgaagaccgagttcagcgaggagaacctggagttctggctggcctgcgaggagttcaagaagaccagaagcaccgccaagctggtgagcaaggcccacagaatcttcgaggagttcgtggacgtgcaggcccccagagaggtgaacatcgacttccagaccagagaggccaccagaaagaacctgcaggagcccagcctgacctgcttcgaccaggcccagggcaaggtgcacagcctgatggagaaggacagctaccccagattcctgagaagcaagatgtacctggacctgctgagccagagccagagaagactgagctag

SEQ ID NO: 266770 - DNA, 174 bp, Artificial Sequence
  derived and/or modified sequence
atggccgccctgctgatgcccagaagaaacaagggcatgagaaccagactgggctgcctgagccacaagagcgacagctgcagcgacttcaccgccatcctgcccgacaagcccaacagagccctgaagagactgagcaccgaggaggccaccagatgggccgacagcttctag

SEQ ID NO: 266771 - DNA, 543 bp, Artificial Sequence
  derived and/or modified sequence
atggcagcgctgttgatgccccggaggaataagggtatgagaaccagactgggttgcctctcacacaagtccgattcgtgttccgacttcactgcgattctgcccgataaacctaaccgtgcactgaagcgcctctcaactgaagaggctactaggtgggctgactcttttgacgtactgctgagccataagtacggtgtcgccgcttttcgcgcgttcctcaagaccgagtttagcgaagaaaatctggagttctggttggcgtgcgaggagttcaagaaaacacgatccaccgcaaaactcgtgtccaaggcccataggattttcgaggagttcgtagacgtccaggctcctcgcgaggtgaatatagattttcaaacacgggaagccacgcgcaagaatctgcaagagccttccctcacttgtttcgatcaggcccagggcaaggtccactcactgatggaaaaggacagctaccctagattcctccggtcgaagatgtatctggatctcctgagccagagccagagaagattatcatag

SEQ ID NO: 266772 - DNA, 543 bp, Artificial Sequence
  derived and/or modified sequence
atggccgcgctcctcatgcccaggagaaacaaagggatgcgcacccgcctcggatgcctttcacacaagagcgatagttgtagtgactttacagcaatactaccggacaagcccaatcgggccctcaagaggctgtctacagaggaggcaacccggtgggcagattcatttgacgtgttgctctcgcataaatacggagtagctgcttttcgagcgttcctcaaaacagaattcagtgaggagaacctggaattttggttagcatgcgaggagttcaagaagacgcgtagcacggccaagttagtgtccaaagctcatcgtattttcgaagagtttgtcgacgtgcaggcccctcgagaggtgaatatcgatttccagactagagaagccactagaaaaaatttacaggagccgtccctcacttgctttgatcaagcccagggaaaggttcattccttaatggagaaagactcctatccgcggttcttaaggtcgaagatgtatctggatctcctttctcagagtcagagacgcctgtcctag

SEQ ID NO: 266773 - DNA, 543 bp, Artificial Sequence
  derived and/or modified sequence
atggccgctctgctgatgcccagaaggaacaaagggatgcgcacaaggctgggctgccttagtcacaagagcgacagctgttctgatttcacagccatattaccagataaaccgaaccgcgcgcttaaacgacttagcactgaagaagccacgagatgggctgattcattcgacgtacttcttagtcataagtatggcgtggccgccttcagagctttcctcaagaccgagttcagcgaagaaaatctggagttctggctagcctgcgaggaattcaagaaaactaggagtactgccaagctcgtcagcaaagctcacagaatattcgaagaattcgtcgacgtgcaggcccctagagaagtcaatatcgattttcagacccgcgaagccacaagaaaaaacttgcaggagcctagcctcacctgctttgatcaagcccagggcaaagtgcatagcttaatggagaaagacagctatccaagattcctacgctctaagatgtacctcgacctgctctcacagtcgcagcgcaggctgtcgtag

SEQ ID NO: 266774 - DNA, 174 bp, Artificial Sequence
  derived and/or modified sequence
atggcagcattactgatgccacgacggaacaaaggtatgcggactcgtctgggctgtctcagtcacaagtcagattcctgtagcgattttaccgccatcctgcctgacaagccaaaccgggctctgaaacgcctgtcaactgaggaagcaaccaggtgggcggattcattctag

SEQ ID NO: 266775 - DNA, 543 bp, Artificial Sequence
  derived and/or modified sequence
atggccgccctgctgatgcccaggagaaataaaggcatgaggacccggctgggctgcctgagccacaagagtgacagctgcagcgacttcaccgccatcctgcctgacaagcccaacagagccctgaagaggctgagcacagaggaggccacccgctgggccgacagctttgatgtgctgctgagccacaagtatggagtggccgccttccgggccttcctgaagacagagttcagcgaggagaacctggagttctggctggcctgtgaggagttcaagaagaccaggagcacagccaagctggtgtccaaggcccaccgcatctttgaggagtttgtggatgtgcaggccccccgggaggtgaacatcgacttccagacccgggaggccaccaggaagaacctgcaggagcccagcctgacctgctttgaccaggcccagggcaaggtgcacagcctgatggagaaggacagctacccccgcttcctgcggagcaagatgtacctggacctgctgagccagagccagaggcggctgtcctag

SEQ ID NO: 266776 - DNA, 174 bp, Artificial Sequence
  derived and/or modified sequence
atggccgccctgctgatgcccaggagaaataaaggcatgaggacccggctgggctgcctgagccacaagagtgacagctgcagcgacttcaccgccatcctgcctgacaagcccaacagagccctgaagaggctgagcacagaggaggccacccgctgggccgacagcttctag

SEQ ID NO: 266777 - DNA, 543 bp, Artificial Sequence
  derived and/or modified sequence
atggccgccctgctgatgccccggcggaacaagggcatgcggaccagactgggctgcctgagccacaaatctgactcctgctcagatttcaccgcaatactaccagataaaccaaatcgcgcactaaaacggctctcaacagaagaagccacaagatgggctgattcgttcgacgtgcttctgtcccataaatacggagtcgcagctttccgggccttcttgaagaccgagtttagtgaggaaaacctggaattttggctggcgtgcgaagagttcaagaagaccagaagtactgctaagctagtgtcaaaagctcatagaatctttgaggagtttgtggacgtgcaggccccccgcgaagtgaatatagactttcagacaagggaggctacacgaaagaatctacaggaaccatccttaacatgctttgatcaggcccaagggaaggtgcacagcttaatggaaaaagactcttacccgagattcctgcggagtaagatgtatctggaccttctgtcgcaatctcagagacgcctttcgtag

SEQ ID NO: 266778 - DNA, 543 bp, Artificial Sequence
  derived and/or modified sequence
atggccgccctgctgatgccccggcggaacaagggcatgcggaccaggttgggatgcctaagccacaagagcgattcctgcagcgacttcacagctatcctcccagacaagcctaacagagcccttaagcgtctgtcgactgaagaggctacgcggtgggctgattcgtttgacgtactactctcccataagtacggagtagccgcctttagagcgttcttgaagacggagttcagcgaagagaacctcgaattctggctagcgtgtgaggagtttaaaaaaacaaggagcacggctaagctagtaagcaaggctcatcgcatttttgaagagtttgtggacgttcaggcaccacgagaggttaacatcgatttccagacccgggaggcaacccggaaaaacctacaggaaccttctctcacatgctttgaccaggcgcagggtaaagttcactcattgatggaaaaggattcataccctcgtttcctgagaagcaaaatgtacctagatctgctaagccagagccagcgccgcctgtcttag

SEQ ID NO: 266779 - DNA, 543 bp, Artificial Sequence
  derived and/or modified sequence
atggccgccctgctgatgccccggcggaacaagggcatgcggacccgactggggtgtctgtcccacaaatcagactcctgctcagacttcactgctatcttgcctgataagcctaaccgggccctgaagagactgtcgacagaagaggccacaaggtgggccgactcctttgacgtgctgctgtcacacaaatacggcgtggccgcattccgcgccttccttaaaactgagttcagcgaggagaacttggagttttggcttgcctgtgaggagttcaaaaaaacacgttccactgccaagctggtttccaaagcccacagaatatttgaagagtttgtggacgtgcaggctcctcgggaagttaacatcgactttcagacccgcgaagccacaagaaagaacctgcaggaaccttctctgacctgtttcgatcaggcccaagggaaagttcattcactgatggaaaaagactcatatcccaggtttctgcgatcgaagatgtacctggacttgctgtcccagagccagagacggctgagctag

SEQ ID NO: 266780 - DNA, 174 bp, Artificial Sequence
  derived and/or modified sequence
atggccgccctgctgatgccccggcggaacaagggcatgcggaccagattaggatgtctgtcccataagtctgattcttgttcagacttcacagctattctgccagacaagccaaaccgggcccttaagagactgtccactgaagaagccactagatgggccgactccttttag

SEQ ID NO: 266781 - DNA, 543 bp, Artificial Sequence
  derived and/or modified sequence
atggctgctctgctgatgcccagaagaaacaaaggtatgcggacccggcttggctgtctcagtcataaaagtgactcttgttctgatttcacagcgatattgcccgacaagcccaatcgtgctctgaaaaggttgtccacagaagaggccactaggtgggccgacagcttcgacgtgttgctgagtcacaaatacggcgtggctgcgttccgggcattccttaagaccgaatttagtgaagagaatctggagttctggctggcttgcgaagagttcaagaaaacgcgtagcaccgcaaagcttgtctcaaaagcacaccgtattttcgaggagtttgtggacgtgcaggctccaagagaggtgaacattgacttccagactagagaggccacccgcaagaacctgcaagagccgtccttgacatgcttcgaccaggcccaggggaaagtgcacagcctcatggagaaggactcctacccccgattcttacgaagcaaaatgtacctggacctcctcagtcagagccaacgcaggctctcctag

SEQ ID NO: 266782 - DNA, 543 bp, Artificial Sequence
  derived and/or modified sequence
atggctgccctattaatgcctcggagaaacaaaggcatgaggacacgtcttgggtgtctgtcccataaaagtgacagctgcagtgacttcacagccattttaccggacaagccaaatagggccctgaagcggctgtccacagaggaagccactagatgggccgatagctttgacgtgcttttgagtcacaaatacggcgttgccgcattcagggcctttctcaagacggagtttagcgaagaaaaccttgagttttggttggcctgcgaagagttcaagaagacccggagcaccgccaaactggttagcaaagcacataggattttcgaagagtttgtggatgtgcaggccccacgtgaggtgaacatcgatttccagaccagggaggcaacaagaaagaacctgcaggagcccagtttgacatgtttcgatcaggctcaaggcaaagtgcattcactgatggagaaagattcatatccacgttttcttcgctccaagatgtatcttgatctcctgtcgcagtcccagcgaaggctcagctag

SEQ ID NO: 266783 - DNA, 543 bp, Artificial Sequence
  derived and/or modified sequence
atggcagctctgctgatgccccgtcggaataaaggcatgcggactagactcgggtgcctatcccacaaaagcgattcctgcagcgatttcacggcaatattgcccgacaagccaaaccgcgcacttaaaagactgagtacagaggaagctacacgatgggccgattctttcgatgtattgctgagtcacaagtacggggttgctgcgttcagggcttttttgaagaccgagttctctgaagagaacctcgaattttggctcgcctgcgaggagttcaaaaaaaccagaagcacggcaaaactggtcagtaaagcccatagaatctttgaggagttcgtggacgtgcaggcgccacgtgaagttaatatcgattttcagaccagagaagccacacggaaaaacttacaggaaccctctctcacgtgttttgaccaggcacagggcaaggttcattcccttatggaaaaggattcctatcccagattcctcagatctaaaatgtacctggacttgctgagccagagccaaaggcgcctatcatag

SEQ ID NO: 266784 - DNA, 174 bp, Artificial Sequence
  derived and/or modified sequence
atggctgcactgttgatgccccgaagaaataaggggatgaggactcggttaggatgtctatcccacaagtcggacagctgttctgacttcactgcaattctgccagacaaaccaaatcgggctttaaagaggcttagcacagaagaagctactcgctgggcagactccttttag

SEQ ID NO: 266785 - protein, 174 aa, Artificial Sequence
  derived and/or modified sequence
MTTKNLETKVTVTSSPIRGAGDGMETEEPPKSVEVTSGVQSRKHHSLQSPWKKAVPSESPGVLQLGKMLTEKAMEVKAVRILVPKAAITHDIPNKNTKVKSLGHHKGEFLGQSEGVIEPNKELSEVKNVLEKLKNSERRLLQDKEGLSNQLRVQTEVRRALIDKMSTTLYVWTF

SEQ ID NO: 266786 - protein, 127 aa, Artificial Sequence
  derived and/or modified sequence
MTTKNLETKVTVTSSPIRGAGDGMETEEPPKSVEVTSGVQSRKHHSLQSPWKKAVPSESPGVLQLGKMLTEKAMEVKAVRILVPKAAITHDIPNKNTKVKSLGHHKGEFLGQSEGVIEPNKELSEVK

SEQ ID NO: 266787 - protein, 250 aa, Artificial Sequence
  derived and/or modified sequence
MTTKNLETKVTVTSSPIRGAGDGMETEEPPKSVEVTSGVQSRKHHSLQSPWKKAVPSESPGVLQLGKMLTEKAMEVKAVRILVPKAAITHDIPNKNTKVKSLGHHKGEFLGQSEGVIEPNKELSEVKNVLEKLKNSERRLLQDKEGLSNQLRVQTEVNRELKKLLVASVGDDLQYHFERLAREKNQLILENEALGRNTAQLSEQLERMSIQCDVWRSKFLASRVMADELTNSRAALQRQNRDAHGAIQDL

SEQ ID NO: 266788 - DNA, 525 bp, Artificial Sequence
  derived and/or modified sequence
atgaccaccaagaacctggagaccaaggtgaccgtgaccagcagccccatcagaggcgccggcgacggcatggagaccgaggagccccccaagagcgtggaggtgaccagcggcgtgcagagcagaaagcaccacagcctgcagagcccctggaagaaggccgtgcccagcgagagccccggcgtgctgcagctgggcaagatgctgaccgagaaggccatggaggtgaaggccgtgagaatcctggtgcccaaggccgccatcacccacgacatccccaacaagaacaccaaggtgaagagcctgggccaccacaagggcgagttcctgggccagagcgagggcgtgatcgagcccaacaaggagctgagcgaggtgaagaacgtgctggagaagctgaagaacagcgagagaagactgctgcaggacaaggagggcctgagcaaccagctgagagtgcagaccgaggtgagaagagccctgatcgacaagatgagcaccaccctgtacgtgtggaccttctag

SEQ ID NO: 266789 - DNA, 384 bp, Artificial Sequence
  derived and/or modified sequence
atgaccaccaagaacctggagaccaaggtgaccgtgaccagcagccccatcagaggcgccggcgacggcatggagaccgaggagccccccaagagcgtggaggtgaccagcggcgtgcagagcagaaagcaccacagcctgcagagcccctggaagaaggccgtgcccagcgagagccccggcgtgctgcagctgggcaagatgctgaccgagaaggccatggaggtgaaggccgtgagaatcctggtgcccaaggccgccatcacccacgacatccccaacaagaacaccaaggtgaagagcctgggccaccacaagggcgagttcctgggccagagcgagggcgtgatcgagcccaacaaggagctgagcgaggtgaagtag

SEQ ID NO: 266790 - DNA, 753 bp, Artificial Sequence
  derived and/or modified sequence
atgaccaccaagaacctggagaccaaggtgaccgtgaccagcagccccatcagaggcgccggcgacggcatggagaccgaggagccccccaagagcgtggaggtgaccagcggcgtgcagagcagaaagcaccacagcctgcagagcccctggaagaaggccgtgcccagcgagagccccggcgtgctgcagctgggcaagatgctgaccgagaaggccatggaggtgaaggccgtgagaatcctggtgcccaaggccgccatcacccacgacatccccaacaagaacaccaaggtgaagagcctgggccaccacaagggcgagttcctgggccagagcgagggcgtgatcgagcccaacaaggagctgagcgaggtgaagaacgtgctggagaagctgaagaacagcgagagaagactgctgcaggacaaggagggcctgagcaaccagctgagagtgcagaccgaggtgaacagagagctgaagaagctgctggtggccagcgtgggcgacgacctgcagtaccacttcgagagactggccagagagaagaaccagctgatcctggagaacgaggccctgggcagaaacaccgcccagctgagcgagcagctggagagaatgagcatccagtgcgacgtgtggagaagcaagttcctggccagcagagtgatggccgacgagctgaccaacagcagagccgccctgcagagacagaacagagacgcccacggcgccatccaggacctgtag

SEQ ID NO: 266791 - DNA, 525 bp, Artificial Sequence
  derived and/or modified sequence
atgacgacgaaaaatctggagactaaagtcacagtaacctcctcccccatccgaggcgcgggagatggaatggaaaccgaagagccacccaaatcggtcgaagtgacctccggggtgcagtcccggaagcaccattctcttcaaagtccctggaagaaagctgttcctagtgaatcacccggggtgctgcagctaggtaaaatgcttactgagaaggcaatggaagtcaaggccgtacgaatcctggttcctaaagccgctattactcacgacattccaaataagaacaccaaggtgaagagcctcggccaccacaaaggggaatttctgggtcaaagtgagggcgtcatcgaacccaacaaggagctaagtgaggtgaagaacgttctggaaaagttgaagaattctgaacgccgacttctgcaggataaagaaggcctgagcaaccagctaagagtgcaaactgaagtcaggcgggccctaatagacaaaatgtcgacaactctttatgtctggacattttag

SEQ ID NO: 266792 - DNA, 1295 bp, Artificial Sequence
  derived and/or modified sequence
ttgtttaacagctggcccggaagtttaagtgaatatgcggcttgggctccaaaagttgctgtacggtattttattttaaagtagaaatctgtccgcttttcacttacggaggccttacagtgtgtgttctgtgttacttgagtttatacgcactgcagaatttgtttaccctgctcttttggaaacgtattccggaagcgaaaccctgagtaatcggaagtggttaggagtgagagagctgctggatatgcggagggactgggcgggtcggcttccgaatggaagaggtctgtgagaagttaacctggtgataccgatccgaagagcctatcaagtgaagccccctgaaatacggagaataagaatcttagaggttgttcagcagaagtcttggagtgcattttcagtggttaaggtgaaaaaatgactactaaaaatttagaaaccaaagtcaccgttacttcatccccaatccgaggagcaggagatggaatggaaactgaggaaccacctaaatctgttgaagttacctccggagtccaatctagaaagcatcatagtcttcagagtccatggaagaaagcagttccatcagagagcccaggagttcttcagctagggaaaatgctcactgaaaaagcaatggaagttaaagctgtaagaatattagttcccaaagctgctataactcatgatatccccaacaaaaatacaaaggttaagtctctgggacatcataaaggagaattccttggtcagtcagagggagttatagaacctaataaggaactctcagaggtaaagaatgtattggaaaagctcaagaattctgaaagaaggttactacaggacaaagaaggtctttcaaaccagctccgtgtacagacagaggtaagaagagccttaatcgataaaatgagtactactctttacgtctggaccttttaaacgtgcatgttagaaaactacatttctttatgggaatgtcattcatcctagcttgtcagttctctaaaatgcttcctcttaaatttctcattctttctcagttctctagggatactttatattgggaacttatactctaaacctcattgaagatggaggtgtgaggtgctttggacaagaccaccaataagttgtaaaagtaggttacaattataaactgccagaccaaagattgaccaagtcaggcatagtaattgaccagcagtccttgttttaaggatccgtaaattccaagtagttttgcttgtgtatacgggatacttggaataaagagaatggcgatataa

SEQ ID NO: 266793 - DNA, 384 bp, Artificial Sequence
  derived and/or modified sequence
atgaccaccaaaaacctcgagacaaaggtaactgtgaccagcagtcctatccggggggccggagatggaatggagaccgaggaaccccctaaatcggttgaggtcacttctggggtccaatccaggaagcatcacagcctccagtccccatggaaaaaggcagtaccgtcagagagtcccggagttctgcagctgggcaagatgcttactgagaaggcaatggaagtgaaggcagttaggatcctagtgcccaaggctgccatcacacacgatattcccaacaaaaataccaaggtcaagtctctgggccatcataagggcgaatttcttggccagagtgaaggtgtgattgaaccaaataaggaactcagcgaagtgaagtag

SEQ ID NO: 266794 - DNA, 753 bp, Artificial Sequence
  derived and/or modified sequence
atgaccaccaaaaacttggaaaccaaggtgaccgtcacgagttcacctattcgtggtgctggcgacggaatggagaccgaagaaccccccaaatccgtggaagttacatccggagttcagtccaggaagcatcattcattgcagtctccttggaagaaggctgtgccttctgaatctcccggggtccttcaactgggaaagatgctcaccgagaaagccatggaggtgaaggctgttaggattttagtgccaaaagccgccattactcatgatatcccgaacaagaataccaaggtgaagtccttaggccaccataaaggggaattcctgggccaaagcgaaggcgtcatcgaacctaacaaggaactgtcggaggttaaaaatgtgttagaaaagttaaagaactccgagcgtaggttactgcaggacaaggaaggtttaagtaaccagctaagggtccagaccgaggtgaatagagagttgaagaagttactggttgcgtcagttggggacgacttgcagtaccacttcgagcgtctagctcgagagaagaaccagctgattctggagaatgaggcccttggcaggaacaccgcccagctgtccgagcagctggagaggatgtctatacagtgcgatgtgtggcgatcaaaattccttgcttcccgcgtgatggcagacgaacttactaatagtagagcggcgttgcagcgtcagaacagggacgcccatggtgccatacaggacctgtag

SEQ ID NO: 266795 - DNA, 525 bp, Artificial Sequence
  derived and/or modified sequence
atgaccaccaagaacctggagaccaaggtgacagtgaccagcagccccatcagaggagctggagatggcatggagacagaggagccccccaagtctgtggaggtgaccagcggcgtgcagagcaggaagcaccacagcctgcagagcccctggaagaaggctgtgcccagcgagagccctggggtgctgcagctgggcaagatgctgacagagaaggccatggaggtgaaggctgtgcgcatcctggtgcccaaggccgccatcacccatgacatccccaacaagaacaccaaggtgaagagcctgggccaccacaagggggagttcctgggccagagcgagggcgtgattgagcccaacaaggagctgtctgaggtgaagaatgtgctggagaagctgaagaacagcgagcggcggctgctgcaggacaaggagggcctgagcaaccagctgcgggtgcagacagaggtgcggcgggccctgattgacaagatgagcaccaccctgtatgtgtggaccttctag

SEQ ID NO: 266796 - DNA, 384 bp, Artificial Sequence
  derived and/or modified sequence
atgaccaccaagaacctggagaccaaggtgacagtgaccagcagccccatcagaggagctggagatggcatggagacagaggagccccccaagtctgtggaggtgaccagcggcgtgcagagcaggaagcaccacagcctgcagagcccctggaagaaggctgtgcccagcgagagccctggggtgctgcagctgggcaagatgctgacagagaaggccatggaggtgaaggctgtgcgcatcctggtgcccaaggccgccatcacccatgacatccccaacaagaacaccaaggtgaagagcctgggccaccacaagggggagttcctgggccagagcgagggcgtgattgagcccaacaaggagctgtctgaggtgaagtag

SEQ ID NO: 266797 - DNA, 753 bp, Artificial Sequence
  derived and/or modified sequence
atgaccaccaagaacctggagaccaaggtgacagtgaccagcagccccatcagaggagctggagatggcatggagacagaggagccccccaagtctgtggaggtgaccagcggcgtgcagagcaggaagcaccacagcctgcagagcccctggaagaaggctgtgcccagcgagagccctggggtgctgcagctgggcaagatgctgacagagaaggccatggaggtgaaggctgtgcgcatcctggtgcccaaggccgccatcacccatgacatccccaacaagaacaccaaggtgaagagcctgggccaccacaagggggagttcctgggccagagcgagggcgtgattgagcccaacaaggagctgtctgaggtgaagaatgtgctggagaagctgaagaacagcgagcggcggctgctgcaggacaaggagggcctgagcaaccagctgcgggtgcagacagaggtgaaccgggagctgaagaagctgctggtggcctctgtgggagatgacctgcagtaccactttgagcggctggcccgggagaagaaccagctgatcctggagaatgaggccctgggcaggaacacagcccagctgtctgagcagctggagaggatgagcatccagtgtgatgtgtggaggagcaagttcctggccagccgggtgatggctgatgagctgaccaacagccgggccgccctgcagaggcagaacagagatgcccacggggccatccaggacctgtag

SEQ ID NO: 266798 - DNA, 525 bp, Artificial Sequence
  derived and/or modified sequence
atgaccaccaagaacctggagaccaaggtgaccgtgaccagcagccccataagaggtgcaggcgacggcatggaaacagaagaacctccaaaatcggtggaggttaccagcggcgttcagtcccgaaaacatcactccctgcagagcccctggaagaaggccgtgccatccgagtctcccggtgtcttacaactcgggaagatgctcaccgagaaagccatggaggttaaggctgtgagaatcctggtgccgaaagcggccattacccacgatatccccaataagaatacaaaggttaaaagtttggggcaccataaaggtgaatttttgggacagtccgagggggtgattgagcctaataaagagctatctgaagtgaagaatgtgctcgagaagctgaagaacagcgaacgcagactgctgcaggataaagaaggcctcagcaaccagctgcgcgttcagaccgaagtgagacgcgctctgattgacaaaatgagtaccactctctacgtgtggaccttttag

SEQ ID NO: 266799 - DNA, 384 bp, Artificial Sequence
  derived and/or modified sequence
atgaccaccaagaacctggagaccaaggtgaccgtgaccagcagccctattcgcggcgccggtgacggaatggaaaccgaggagcctcctaagtccgtcgaggttaccagtggcgtacaaagtcgcaaacaccattctctgcagagcccttggaaaaaagccgtgccatcggagtccccgggcgtcctgcagcttgggaaaatgctgactgaaaaggctatggaggtgaaagcagtgaggattttagttcctaaagccgccatcacacacgacattcctaacaagaacactaaggtgaaaagtttgggacatcacaagggagaatttctgggccagtcagaaggggtgatcgaaccgaataaagaactgagcgaggtgaagtag

SEQ ID NO: 266800 - DNA, 753 bp, Artificial Sequence
  derived and/or modified sequence
atgaccaccaagaacctggagaccaaggtgaccgtgaccagcagcccgatccgcggggccggcgacgggatggagaccgaggaaccccctaaatctgttgaggttacctctggcgtacagagccgaaagcaccactcgttacaatccccgtggaagaaggcagtcccctccgagagccctggagtcttgcaactcggcaaaatgcttaccgaaaaggccatggaagtcaaggctgtccgcattttggttcccaaggcggccatcacccatgatattcctaacaagaacacgaaggtgaagtccctaggacaccacaaaggagagtttctcggccagtccgaaggggttatcgaaccgaacaaagaactatctgaggtgaagaacgtgctagaaaaacttaagaacagcgaacggagacttctgcaagataaagaggggctgtccaaccagctgcgtgtccagacagaagtgaaccgagagctgaagaaactgctagtggcctccgtgggtgacgatctgcagtatcactttgagagactcgcccgagagaaaaatcagctgatactggaaaacgaggctctggggaggaatactgcccagctctctgagcaactggagaggatgtctatacagtgcgacgtttggaggtccaagttcttggctagccgagtgatggcggacgagcttacgaatagtcgggccgctctgcagagacagaatcgcgacgcccacggagcaatacaggatttatag

SEQ ID NO: 266801 - DNA, 525 bp, Artificial Sequence
  derived and/or modified sequence
atgactacaaaaaatctggaaactaaagtcaccgtcactagctctcccattcgcggagcaggggacggtatggagacagaggagccaccgaagtctgtcgaggtgactagcggagtgcagtcccgcaagcatcactccctgcagagtccctggaagaaagccgtccccagtgagagtcctggcgtcttacagctggggaagatgttgacagagaaggccatggaggttaaggcagtgcgaattttggtaccaaaggctgctataacccatgacattcccaataagaacacgaaagttaaatctctaggtcaccataagggagaattcctcgggcagtcagaaggagtcattgagccaaacaaggaactctccgaagtgaaaaatgtactcgaaaagcttaagaattccgagaggagactgctccaggataaggaaggactctccaaccaactaagagtccagactgaggtgagacgcgctctcattgataaaatgagcaccaccctctatgtctggactttctag

SEQ ID NO: 266802 - DNA, 795 bp, Artificial Sequence
  derived and/or modified sequence
gtttaacagctggcccggaagtttaagtgaatatgcggcttgggctccaaaagttgctgtacggtattttattttaaagtagaaatctgtccgcttttcacttacggaggccttacagtgtgtgttctgtgttacttgagtttatacgcactgcagaatttgtttaccctgctcttttggaaacgtattccggaagcgaaaccctgagtaatcggaagtggttaggagtgagagagctgctggatatgcggagggactgggcgggtcggcttccgaatggaagaggtctgtgagaagttaacctggtgataccgatccgaagagcctatcaagtgaagccccctgaaatacggagaataagaatcttagagcagaagtcttggagtgcattttcagtggttaaggtgaaaaaatgactactaaaaatttagaaaccaaagtcaccgttacttcatccccaatccgaggagcaggagatggaatggaaactgaggaaccacctaaatctgttgaagttacctccggagtccaatctagaaagcatcatagtcttcagagtccatggaagaaagcagttccatcagagagcccaggagttcttcagctagggaaaatgctcactgaaaaagcaatggaagttaaagctgtaagaatattagttcccaaagctgctataactcatgatatccccaacaaaaatacaaaggttaagtctctgggacatcataaaggagaattccttggtcagtcagagggagttatagaacctaataaggaactctcagaggtaaagaa

SEQ ID NO: 266803 - DNA, 384 bp, Artificial Sequence
  derived and/or modified sequence
atgacaacgaaaaacctcgaaacaaaggttacagtcacatcttctcccatacggggtgccggagacggcatggaaacagaagagccccctaagtcggtagaagtcacctccggagtccagagccgcaagcaccactctctgcagtctccgtggaaaaaagctgtgccaagcgagtctcccggagtgctccagctggggaaaatgctgacagagaaagccatggaggtgaaggctgtacggattctggtgccaaaagccgcaatcacccacgacatccccaacaaaaataccaaagtgaagtctctcggccaccataagggtgaatttctgggtcagagcgaaggggtgatcgagcctaacaaggaactctccgaagtgaaatag

SEQ ID NO: 266804 - DNA, 753 bp, Artificial Sequence
  derived and/or modified sequence
atgactaccaagaatctggagaccaaggttacagtcacctcctcacccatccggggtgctggagacggtatggagacagaggaaccacccaagagtgtagaggtcacatcgggggtacagagcaggaagcaccattccctccagtccccgtggaagaaagccgttccttccgagtcaccaggcgtgttacagctgggaaagatgttgaccgagaaagctatggaggtgaaagccgtcagaatcttggtgcctaaggctgcaatcacccacgacatacctaacaaaaacacgaaagtgaaatccttaggtcaccataaaggcgagtttctgggtcagtccgaaggcgtgatcgagccaaataaggagctgagtgaggtcaagaacgtcctcgagaaactcaagaactcagagcggaggctgctccaggacaaagaaggtctttctaatcagctccgagtgcagacagaagtcaatcgagagctcaagaagcttctggttgcatccgtaggcgatgatttacagtaccattttgagaggctcgctcgggagaaaaatcagttgatcctcgagaatgaagccctgggaagaaataccgctcagctctccgaacagctagaacgcatgagtatccagtgtgacgtctggaggagcaagttcctcgcctctcgagtcatggcagacgaactgaccaacagtcgcgctgcactgcagagacagaaccgggatgcacatggagctatacaggatttgtag

SEQ ID NO: 266805 - DNA, 926 bp, Artificial Sequence
  derived and/or modified sequence
tcggcttccgaatggaagaggtctgtgagaagttaacctggtgataccgatccgaagagcctatcaagtgaagccccctgaaatacggagaataagaatcttagaggtaaatccgaggacaagcaggttgttcagcagaagtcttggagtgcattttcagtggttaaggtgaaaaaatgactactaaaaatttagaaaccaaagtcaccgttacttcatccccaatccgaggagcaggagatggaatggaaactgaggaaccacctaaatctgttgaagttacctccggagtccaatctagaaagcatcatagtcttcagagtccatggaagaaagcagttccatcagagagcccaggagttcttcagctagggaaaatgctcactgaaaaagcaatggaagttaaagctgtaagaatattagttcccaaagctgctataactcatgatatccccaacaaaaatacaaaggttaagtctctgggacatcataaaggagaattccttggtcagtcagagggagttatagaacctaataaggaactctcagaggtaaagaatgtattggaaaagctcaagaattctgaaagaaggttactacaggacaaagaaggtctttcaaaccagctccgtgtacagacagaggtaaatcgtgagttaaaaaagttactggtggcttctgttggggatgatcttcagtatcactttgaacgtctagcccgtgagaaaaatcagcttattttagaaaatgaagccctaggtcgaaacacagctcagctttctgaacagttagaacgtatgtcaatacagtgtgatgtatggcgaagtaaattccttgcaagcagggtaatggcagatgagttaaccaactcaagagcagctttacagcgtcaaaaccgtgatgcacacggggctatacaagatctc

SEQ ID NO: 266806 - protein, 203 aa, Artificial Sequence
  derived and/or modified sequence
MGSRDHLFKVLVVGDAAVGKTSLVQRYSQDSFSKHYKSTVGVDFALKVLQWSDYEIVRLQLWDIAGQERFTSMTRLYYRDASACVIMFDVTNATTFSNSQRWKQDLDSKLTLPNGEPVPCLLLANKCDLSPWAVSRDQIDRFSKENGFTGWTETSVKENKNINEAMRVLIEKMMRNSTEDIMSLSTQGDYINLQTKSSSWSCC

SEQ ID NO: 266807 - DNA, 612 bp, Artificial Sequence
  derived and/or modified sequence
atgggcagccgggatcacctcttcaaggtgttggtagtaggggacgctgcagtgggcaaaactagcctggtgcaaaggtactcgcaagattctttctcaaagcactataagtccacagtaggcgtggattttgctttgaaggtcctgcagtggagcgattatgagatagtgagattacaactgtgggatattgccggacaagagagattcacctcaatgacaaggttgtactaccgcgacgctagtgcctgcgttattatgttcgatgttaccaacgctacaacgtttagtaactcccagagatggaaacaagatctcgactcaaaactaactctgcccaacggtgagccagttccctgtctactgttggcaaataagtgtgacctctcaccatgggctgtcagcagagaccagatcgacagattctcaaaggagaatggctttaccggctggactgaaacttccgtgaaggaaaacaagaatatcaacgaggccatgcgtgttctcatcgaaaagatgatgcggaatagtacggaggatataatgagcttgagtacacagggtgattatataaacctacagacaaagtcatcttcatggtcttgttgttag

SEQ ID NO: 266808 - DNA, 612 bp, Artificial Sequence
  derived and/or modified sequence
atgggctctcgcgatcaccttttcaaagtgctggttgttggtgatgccgcagtcggaaagacatccctagtccagcggtactctcaggactccttttcgaagcactacaaaagtacagtgggagtcgatttcgctctgaaggttctgcaatggtccgactatgaaatcgtgcgtttgcagctgtgggacatcgccggacaggagagatttacttctatgactcgcctctattatcgagacgctagtgcttgtgtgatcatgttcgacgtgacaaacgccaccaccttcagtaattcccaaagatggaagcaagacctcgatagcaagttgacactgccaaatggcgaacccgtcccctgtttgctgctggccaacaagtgtgacctctcaccttgggccgtctccagagatcagattgacaggttttctaaagagaatgggttcaccggctggacggaaacaagcgtgaaggaaaataagaatatcaatgaggccatgagagtgcttatcgaaaaaatgatgagaaattctaccgaagacatcatgtctctaagtacacagggggactatattaacctgcaaacgaaaagctcctcgtggagctgctgctag

SEQ ID NO: 266809 - DNA, 612 bp, Artificial Sequence
  derived and/or modified sequence
atgggctcaagggatcatcttttcaaggtgttggtagtgggtgatgcagccgtaggcaaaaccagtctcgttcagcgatattcacaggattctttcagtaaacactacaagagtaccgtcggggtcgatttcgctctgaaagttctgcagtggtcagactatgaaattgtccggctgcaactgtgggacatcgccgggcaagagcggtttacttctatgacaagactgtattaccgagatgcttccgcatgtgtgatcatgttcgacgtcacaaatgccaccaccttttccaattctcagaggtggaaacaggatctagactcaaagttaacactccccaacggggagcctgtcccatgcctcctgctagccaacaagtgcgatctctcgccctgggcggtgagtagggaccagatcgatcgcttctccaaagagaacggcttcaccgggtggaccgaaacatccgtcaaggaaaataagaatattaacgaggcaatgagagtgctcattgagaagatgatgcggaatagtaccgaggatataatgtctcttagcacccaaggagactatatcaatttacagacaaaaagcagtagctggagctgctgttag

SEQ ID NO: 266810 - DNA, 612 bp, Artificial Sequence
  derived and/or modified sequence
atgggcagccgggaccacctgttcaaggtgctggtggtgggagatgctgctgtgggcaagaccagcctggtgcagcgctacagccaggacagcttcagcaagcactacaagagcacagtgggcgtggactttgccctgaaggtgctgcagtggagcgactatgagatcgtgcggctgcagctgtgggacattgctggccaggagcgcttcacctccatgacccggctgtactacagagatgccagcgcctgcgtcatcatgtttgatgtgaccaatgccaccaccttcagcaacagccagcgctggaagcaggacctggacagcaagctgaccctgcccaacggggagcctgtgccctgcctgctgctggccaacaagtgtgacctgagcccctgggccgtgtcccgggaccagattgaccgcttcagcaaagaaaatggcttcaccggctggacagagacctctgtgaaggagaacaagaacatcaatgaggccatgagggtgctgattgagaagatgatgaggaacagcacagaggacatcatgagcctgagcacccagggcgactacatcaacctgcagaccaagagcagctcctggagctgctgctag

SEQ ID NO: 266811 - DNA, 612 bp, Artificial Sequence
  derived and/or modified sequence
atgggcagccgggaccacctgttcaaggtgctggtggtgggcgacgctgccgttggcaaaacgtctctcgtgcagagatacagccaggactcgttctcaaaacattacaaaagcactgtgggcgtggactttgcactcaaagtactgcaatggtccgattatgagatcgtcaggttacaactttgggacatagccggccaggaaagatttacgagtatgacacggctctattaccgggacgccagcgcttgtgtcataatgtttgatgtgacaaacgccactaccttcagcaattcccaacggtggaaacaggacctggatagcaagctcactctgccaaacggcgagcctgtgccatgtttgcttctggccaataaatgtgacctgtctccttgggccgtatcaagagaccaaattgacagatttagcaaagaaaatggctttacagggtggactgaaaccagcgtgaaagaaaataagaacatcaacgaggccatgcgggtcctgattgaaaagatgatgagaaattctaccgaagatatcatgagcctctccacccagggagattatataaacctacagacaaaatcatcctcttggagctgctgttag

SEQ ID NO: 266812 - DNA, 612 bp, Artificial Sequence
  derived and/or modified sequence
atgggcagccgggaccacctgttcaaggtgctggtggtgggcgacgctgcagtgggcaaaaccagcttggtccagcgatactcccaggactccttctccaagcactacaagtccactgtcggtgtggacttcgctctcaaagtactccagtggtccgattacgaaatcgtaaggctccagctatgggatatcgccgggcaggaacgcttcacctccatgactcgtctttactaccgagacgccagcgcctgtgtgatcatgtttgacgttaccaacgccacaacatttagcaactcccagcggtggaagcaggacctggatagcaagctgactttacccaacggagaaccagtgccgtgtctgctgttggccaacaagtgcgatctttccccatgggccgtgtccagagaccagatcgaccgattttctaaggagaacggattcaccggttggacggagacctccgtgaaagagaataaaaatataaacgaggcaatgcgtgttttgatcgagaagatgatgagaaattccaccgaagatattatgtccctgtcgactcaaggcgactatataaaccttcagacaaagtcctcatcatggtcctgttgttag

SEQ ID NO: 266813 - DNA, 612 bp, Artificial Sequence
  derived and/or modified sequence
atgggcagccgggaccacctgttcaaggtgctggtggtgggcgacgccgccgttggcaagacctccctggtgcagagatatagccaggacagcttctcaaagcactataagagcacagtgggcgtggatttcgcactcaaggtgctgcagtggtccgattacgagatcgtgcgcctgcagctctgggatattgccggacaagaaagattcacatcaatgaccaggctgtactatcgcgatgccagcgcttgtgtaattatgtttgacgtgacaaacgccacaactttctctaactcacagcgctggaaacaggacctcgactcgaaattaactttgccgaacggtgagcctgtcccatgcctgctgctagccaacaagtgcgacttatcaccgtgggcagtgtctagagatcagattgaccggttcagtaaggagaacggttttactggttggaccgaaacatccgtcaaagagaacaagaatataaatgaggccatgagagtattgatcgagaaaatgatgagaaactccaccgaggatatcatgtccctgtccacacaaggggactatatcaacttgcaaacaaagagtagctcctggagttgctgctag

SEQ ID NO: 266814 - DNA, 612 bp, Artificial Sequence
  derived and/or modified sequence
atgggaagcagggatcatctctttaaggtcctggttgtgggtgacgctgccgtcggtaagacatccctcgtgcagcgatactcccaagactcgttctccaaacattacaaatcaacagttggtgtggacttcgccttaaaggttctccagtggtccgattacgagatcgtcagacttcagttgtgggatattgcgggacaagagcgctttactagcatgacaagactctattatagagacgccagcgcatgtgtgattatgtttgatgttacaaacgcaacgactttcagcaatagccagaggtggaaacaggatttggatagcaaattaactctgcctaatggcgaacccgttccctgcctactgctcgccaacaaatgtgacctgtctccttgggccgtgagccgagatcagattgatcggttttcgaaggagaacggcttcaccggatggactgagacttccgtgaaggagaacaaaaatatcaatgaagccatgcgggtcctgatagagaagatgatgcgtaactccactgaggacatcatgtctttgtccacccagggagattatattaacctccaaactaagtctagctcttggagctgttgttag

SEQ ID NO: 266815 - DNA, 612 bp, Artificial Sequence
  derived and/or modified sequence
atgggcagccgggaccaccttttcaaggtccttgtagtgggtgacgccgcagtaggtaaaacgagtcttgtacagcgttattctcaggatagcttctccaaacattataagagtaccgtgggggttgatttcgccttaaaagttctgcaatggtccgactatgagattgtgagactacaactgtgggatatagctggacaggagagattcactagcatgaccagattatattacagggacgcctcagcatgcgttattatgtttgatgtgactaacgccaccaccttttcgaatagtcagaggtggaagcaagatttggatagcaaactgaccctgcccaatggagaaccagtgccctgtctgcttctcgccaacaagtgcgacctgtccccatgggcagtcagccgcgaccagattgaccgcttctccaaggagaatggtttcaccggctggacagagacatcagtaaaggaaaataagaatatcaatgaggcaatgcgagtgctgatagagaagatgatgcggaattcaactgaggacataatgtccctgtcaacacaaggcgattacatcaatctacagaccaaatcctcatcgtggtcctgttgctag

SEQ ID NO: 266816 - DNA, 612 bp, Artificial Sequence
  derived and/or modified sequence
atgggcagccgggaccatctgttcaaggtcctcgtggtgggtgatgcagccgtgggcaagacttcattggtacagagatacagccaggattccttctccaaacactataaaagcaccgtcggggttgattttgccttaaaagtcttacagtggagtgattacgaaatcgtccgcctacaactatgggacattgcagggcaggaacgcttcacttccatgactaggctttactatcgagacgcctccgcttgcgtgatcatgtttgacgtcactaatgccactacctttagtaactcccagcgctggaaacaggaccttgattccaagctgactctaccgaacggagaacccgttccatgtctgctactagcgaacaaatgtgacttgtccccctgggccgtctctcgtgaccagatcgatcggtttagcaaggagaatggcttcacgggttggacggaaacatcagtaaaggagaacaaaaacatcaatgaggcaatgcgcgttctgatcgagaaaatgatgcgcaacagtacagaagacattatgtccctatccacacagggagattatatcaacctccagactaagagcagttcgtggtcctgctgctag

SEQ ID NO: 266817 - DNA, 1723 bp, Artificial Sequence
  derived and/or modified sequence
ggaggaaggggagagagaggcgcgcgggagggcgtctagggaatcgaggtgccggctgctccttcctcacaatttgcccagacaggcggtgggtgggaatgcctcacttcagtttgaagagggtccggatccaaaggggttaaaacgagcgacccccgatccccgaccacacttcccgcctccctaaaacgcacaccccgctagccatgggcagccgcgaccacctgttcaaagtgctggtggtgggggacgccgcagtgggcaagacgtcgctggtgcagcgatattcccaggacagcttcagcaaacactacaagtccacggtgggagtggattttgctctgaaggttctccagtggtctgactacgagatagtgcggcttcagctgtgggatattgcagggcaggagcgcttcacctctatgacacgattgtattatcgggatgcctctgcctgtgttattatgtttgacgttaccaatgccactaccttcagcaacagccagaggtggaaacaggacctagacagcaagctcacactacccaatggagagccggtgccctgcctgctcttggccaacaagtgtgatctgtccccttgggcagtgagccgggaccagattgaccggttcagtaaagagaacggtttcacaggttggacagaaacatcagtcaaggagaacaaaaatattaatgaggctatgagagtcctcattgaaaagatgatgagaaattccacagaagatatcatgtctttgtccacccaaggggactacatcaatctacaaaccaagtcctccagctggtcctgctgctagtagtgtttggcttattttccatcccagttctgggaggtcttttaagtctcttccctttggttgcccacctgacaattttattaagtacatttgaattgtctcctgactactgtccagtaaggaggcccattgtcacttagaaaagacacctggaacccatgtgcatttctgcatctcctggattagcctttcacatgttgctggctcacattagtgccagttagtgccttcggtgtaagatcttctcatcagccctcaatttgtgatccggaattttatgagaaggattagaaatcagcacctgcgttttagagatcataattctcacctacttctgagcttatttttccatttgatattcattgatatcatgacttccaattgagaggaaaatgagatcaaatgtcatttcccaaatttcttgtaggccgttgtttcagattctttctgtcttggaatgtaaacatctgattctggaatgcagaaggagggggtctgggcatctgtggatttttggctactagaagtgtcccagaagtcactgtatttttgaaacttctaacgtcataattaagtttctcttgtcttggcatcaagaatagtcaagttttttggccgggcatggtggctcatgcctgtaatcccagcacttggggaggccaaggcaggcggatcacatgaggccaggaattcgagaccaacctggtcagcatggcaaaaccccgtctctactaaaagtacaaaaattagccaggcgtgatggcacgtgtctgtaatcccagctactctggagactgaggtgggagaatcgcttgagactgggaggcagaggttgcagtgaaccgagatcatgccaccgcacttcagcctgggtgacagagaaggactccgtctcaaaaaaaaaa

SEQ ID NO: 266818 - DNA, 3272 bp, Artificial Sequence
  derived and/or modified sequence
ggaaggggagagagaggcgcgcgggagggcgtctagggaatcgaggtgccggctgctccttcctcacaatttggtttgtgctgcaaggggagggtccccatcatctggccccagtggtgtaaggagctgactgggattcagtcactgacttggagccgctcgggggaagtcccgcccagacaggcggtgggtgggaatgcctcacttcagtttgaagagggtccggatccaaaggggttaaaacgagcgacccccgatccccgaccacacttcccgcctccctaaaacgcacaccccgctagccatgggcagccgcgaccacctgttcaaagtgctggtggtgggggacgccgcagtgggcaagacgtcgctggtgcagcgatattcccaggacagcttcagcaaacactacaagtccacggtgggagtggattttgctctgaaggttctccagtggtctgactacgagatagtgcggcttcagctgtgggatattgcagggcaggagcgcttcacctctatgacacgattgtattatcgggatgcctctgcctgtgttattatgtttgacgttaccaatgccactaccttcagcaacagccagaggtggaaacaggacctagacagcaagctcacactacccaatggagagccggtgccctgcctgctcttggccaacaagtgtgatctgtccccttgggcagtgagccgggaccagattgaccggttcagtaaagagaacggtttcacaggttggacagaaacatcagtcaaggagaacaaaaatattaatgaggctatgagagtcctcattgaaaagatgatgagaaattccacagaagatatcatgtctttgtccacccaaggggactacatcaatctacaaaccaagtcctccagctggtcctgctgctagtagtgtttggcttattttccatcccagttctgggaggtcttttaagtctcttccctttggttgcccacctgacaattttattaagtacatttgaattgtctcctgactactgtccagtaaggaggcccattgtcacttagaaaagacacctggaacccatgtgcatttctgcatctcctggattagcctttcacatgttgctggctcacattagtgccagttagtgccttcggtgtaagatcttctcatcagccctcaatttgtgatccggaattttatgagaaggattagaaatcagcacctgcgttttagagatcataattctcacctacttctgagcttatttttccatttgatattcattgatatcatgacttccaattgagaggaaaatgagatcaaatgtcatttcccaaatttcttgtaggccgttgtttcagattctttctgtcttggaatgtaaacatctgattctggaatgcagaaggagggggtctgggcatctgtggatttttggctactagaagtgtcccagaagtcactgtatttttgaaacttctaacgtcataattaagtttctcttgtcttggcatcaagaatagtcaagttttttggccgggcatggtggctcatgcctgtaatcccagcacttggggaggccaaggcaggcggatcacatgaggccaggaattcgagaccaacctggtcagcatggcaaaaccccgtctctactaaaagtacaaaaattagccaggcgtgatggcacgtgtctgtaatcccagctactctggagactgaggtgggagaatcgcttgagactgggaggcagaggttgcagtgaaccgagatcatgccaccgcacttcagcctgggtgacagagaaggactccgtctcaaaaaaaaaagaaaaaagaatagtcatttttaaactacctatctcatgcaatgaaagcattttcttccacaaagagcttaatcctcatgataggattgcctagtgtctcccatttgcaggtttctgggttgatgtcttaatgcataatactgcaagtgacatcagctggctgtgatgcttcgaaataggtctgctcctcacagctttgggaatctgaatggaagaagaaaagagagaagttaacaacctccactggggcaactttgtgaacacgtaggcacttagtcataggaaacatattatgtgcaggtcctagcctgggggaggaaagtagatagacagaaaatcattaggtaatttaagtactaaattgggcagggctttttagtatcaaatcactactagaccatttaatttgttaaattatctctaggatggtgatttataacctacccaaagttatcgatattcttactaaactctgaggcctgaagttctgtgatagaccttaaataagtgtcctaagtcagtggttcccaaatctggctggtcgggaatacctgggaagtttgttaaaattttttaaaaatgttttaagatttttgggtcctgagccagccgtggtggctcacacctgtaatcccagcactttgggaggctgaggcaggtggatcgcctgaggtcaggagttcaagatcaacctggccaacatactgaaaccccgtctctactaaaaataagaaaaattagctgggcgtggtggcgggcacctgtaatcccagctacttgggagactgaggcaggagaatcgcttgaacctgggagttagaggttgcagtgagctgagatcacaccattgcgcttcagcctgggcaacaagagtgaaactccatctccaaaaaaaaaaaacaaaaagaaaaagatttttgggtcccgacctcaaacctactgaatcagaatttctagggatgaagcctaggaatgtgttgttgttttcagagcttccctggtgattgtgataagcctggtttggaaaccattgctggagaactttgtaaagatacagagacccagaccttttgtatttacatttaaatacaaatacaaatcctgggtttctatatattctgttagcttttcaggtgattctgctacacagacgttgaaaaccactgccctaagaaagagatcagaggccacatatcagagagaaaagggaccaaaccttcggtggtttgttgtgtgtcgttttaatgccaattattttaacttgcacagtcttctgaaaccttgtattaatagttctcttttgtattaccattttcaggtagggttttgatcactatgattctgaagataatagtgaaatagtgaatttcattgatatgaagagataattgattttcattcattggtttgaacacctgcaaaatcacaaataaatgagaactaagtcttgta

SEQ ID NO: 266819 - DNA, 1157 bp, Artificial Sequence
  derived and/or modified sequence
tgacgcttgcggaggaaggggagagagaggcgcgcgggagggcgtctagggaatcgaggtgccggctgctccttcctcacaatttggtttgtgctgcaaggggagggtccccatcatctggccccagtggtgtaaggagctgactgggattcagtcactgacttggagccgctcgggggaagtcccggtgggtgaggttccgcggcgcctggtccagtttctcggcagtcaggccaggagggggtggggaaggtgcgaacagccgggggctcggagctcgcgccctgcgccccacccaggttgcggccgcccggggaggaagcgcgtataggttgagtgcaaagtttccttttttgctttctcgtcagagcagcccagacaggcggtgggtgggaatgcctcacttcagtttgaagagggtccggatccaaaggggttaaaacgagcgacccccgatccccgaccacacttcccgcctccctaaaacgcacaccccgctagccatgggcagccgcgaccacctgttcaaagtgctggtggtgggggacgccgcagtgggcaagacgtcgctggtgcagcgatattcccaggacagcttcagcaaacactacaagtccacggtgggagtggattttgctctgaaggttctccagtggtctgactacgagatagtgcggcttcagctgtgggatattgcagggcaggagcgcttcacctctatgacacgattgtattatcgggatgcctctgcctgtgttattatgtttgacgttaccaatgccactaccttcagcaacagccagaggtggaaacaggacctagacagcaagctcacactacccaatggagagccggtgccctgcctgctcttggccaacaagtgtgatctgtccccttgggcagtgagccgggaccagattgaccggttcagtaaagagaacggtttcacaggttggacagaaacatcagtcaaggagaacaaaaatattaatgaggctatgagagtcctcattgaaaagatgatgagaaattccacagaagatatcatgtctttgtccacccaaggggactacatcaatctacaaaccaagtcctccagctggtcctgctgctagtagtgtttggcttattttccatcccagttctgggaggtcttt

SEQ ID NO: 266820 - DNA, 1306 bp, Artificial Sequence
  derived and/or modified sequence
gcggaggaaggggagagagaggcgcgcgggagggcgtctagggaatcgaggtgccggctgctccttcctcacaatttggtttgtgctgcaaggggagggtccccatcatctggccccagtggtgtaaggagctgactgggattcagtcactgacttggagccgctcgggggaagtcccgtggattttgctctgaaggttctccagtggtctgactacgagatagtgcggcttcagctgtgggatattgcagggcaggagcgcttcacctctatgacacgattgtattatcgggatgcctctgcctgtgttattatgtttgacgttaccaatgccactaccttcagcaacagccagaggtggaaacaggacctagacagcaagctcacactacccaatggagagccggtgccctgcctgctcttggccaacaagtgtgatctgtccccttgggcagtgagccgggaccagattgaccggttcagtaaagagaacggtttcacaggttggacagaaacatcagtcaaggagaacaaaaatattaatgaggctatgagagtcctcattgaaaagatgatgagaaattccacagaagatatcatgtctttgtccacccaaggggactacatcaatctacaaaccaagtcctccagctggtcctgctgctagtagtgtttggcttattttccatcccagttctgggaggtcttttaagtctcttccctttggttgcccacctgacaattttattaagtacatttgaattgtctcctgactactgtccagtaaggaggcccattgtcacttagaaaagacacctggaacccatgtgcatttctgcatctcctggattagcctttcacatgttgctggctcacattagtgccagttagtgccttcggtgtaagatcttctcatcagccctcaatttgtgatccggaattttatgagaaggattagaaatcagcacctgcgttttagagatcataattctcacctacttctgagcttatttttccatttgatattcattgatatcatgacttccaattgagaggaaaatgagatcaaatgtcatttcccaaatttcttgtaggccgttgtttcagattctttctgtcttggaatgtaaacatctgattctggaatgcagaaggagggggtctgggcatctgtggatttttggctactagaagtgtcccagaagtcactgtatttttgaaacttctaacgtcataattaagtttctcttgtcttggcatcaagaatagtcaagttttttggccgggcatggtggctcatgcctgt

SEQ ID NO: 266821 - DNA, 612 bp, Artificial Sequence
  derived and/or modified sequence
atgggcagcagagaccacctgttcaaggtgctggtggtgggcgacgccgccgtgggcaagaccagcctggtgcagagatacagccaggacagcttcagcaagcactacaagagcaccgtgggcgtggacttcgccctgaaggtgctgcagtggagcgactacgagatcgtgagactgcagctgtgggacatcgccggccaggagagattcaccagcatgaccagactgtactacagagacgccagcgcctgcgtgatcatgttcgacgtgaccaacgccaccaccttcagcaacagccagagatggaagcaggacctggacagcaagctgaccctgcccaacggcgagcccgtgccctgcctgctgctggccaacaagtgcgacctgagcccctgggccgtgagcagagaccagatcgacagattcagcaaggagaacggcttcaccggctggaccgagaccagcgtgaaggagaacaagaacatcaacgaggccatgagagtgctgatcgagaagatgatgagaaacagcaccgaggacatcatgagcctgagcacccagggcgactacatcaacctgcagaccaagagcagcagctggagctgctgctag

SEQ ID NO: 266822 - protein, 346 aa, Artificial Sequence
  derived and/or modified sequence
MLFLQFLLLALLLPGGDNADASQEHVSFHVIQIFSFVNQSWARGQGSGWLDELQTHGWDSESGTIIFLHNWSKGNFSNEELSDLELLFRFYLFGLTREIQDHASQDYSKYPFEVQVKAGCELHSGKSPEGFFQVAFNGLDLLSFQNTTWVPSPGCGSLAQSVCHLLNHQYEGVTETVYNLIRSTCPRFLLGLLDAGKMYVHRQVRPEAWLSSRPSLGSGQLLLVCHASGFYPKPVWVTWMRNEQEQLGTKHGDILPNADGTWYLQVILEVASEEPAGLSCRVRHSSLGGQDIILYWAHIRTSCETLPPDSPIVLRTQQPRSLVQYSDAIPSTLHLNCFSFCIINIC

SEQ ID NO: 266823 - protein, 281 aa, Artificial Sequence
  derived and/or modified sequence
  misc_feature (1)..(1): Xaa can be any naturally occurring amino acid
XFLHNWSKGNFSNEELSDLELLFRFYLFGLTREIQDHASQDYSKYPFEVQVKAGCELHSGKSPEGFFQVAFNGLDLLSFQNTTWVPSPGCGSLAQSVCHLLNHQYEGVTETVYNLIRSTCPRFLLGLLDAGKMYVHRQVRPEAWLSSRPSLGSGQLLLVCHASGFYPKPVWVTWMRNEQEQLGTKHGDILPNADGTWYLQVILEVASEEPAGLSCRVRHSSLGGQDIILYWAHIRTSCETLPPDSPIVLRTQQPRSLVQYSDAIPSTLHLNCFSFCIINIC

SEQ ID NO: 266824 - DNA, 1041 bp, Artificial Sequence
  derived and/or modified sequence
atgctatttctgcaatttcttctcttagccctgctgctgccaggcggggacaatgcggacgcctctcaggaacatgtgtccttccacgtgattcagattttcagtttcgtgaatcagtcttgggctcggggacagggatcgggctggctcgacgagctgcagacacatggctgggattctgaatccggcacaattattttcctccataattggagcaagggcaactttagcaatgaggagctgtcagatttggagctcctcttccgcttttacctgttcggattgacaagagaaatccaggatcacgcctcccaggattactcgaagtacccttttgaggttcaggtgaaagccgggtgcgagttgcacagtggcaagtctccggagggttttttccaggtagcattcaatgggctggacctgctgtcattccaaaataccacgtgggttccatcccccgggtgcggcagtctggctcagtccgtatgccatctcctgaatcaccagtatgaaggcgtaaccgaaacagtttataatctgatcaggtcaacgtgcccacgctttctgcttggactgctggatgcaggaaagatgtacgtccaccgtcaggtacggcctgaggcttggctgtcatcaagaccatcactgggttcaggccagctcctcctcgtgtgccatgcgtcggggttctaccccaagcctgtctgggttacctggatgcggaatgagcaggaacagctaggaactaagcacggcgacatactgccaaatgctgatggtacctggtatctgcaggttatcctggaagtggccagcgaggagcccgctgggctgagctgtcgagtcagacattcatcactgggagggcaggacatcatactgtattgggcccacatacgcacctcatgtgagaccctccctcctgattctccaatagtgctgcgtacccaacagccaaggtccttggtgcaatatagcgacgctattccatccacgctccacctcaattgcttctccttctgtatcatcaatatctgctag

SEQ ID NO: 266825 - DNA, 846 bp, Artificial Sequence
  derived and/or modified sequence
tgatttctccataattggagtaaaggtaacttctctaatgaggagttatcagacttagaactgctgttccgtttctacttgttcggtctaacacgggagatccaagatcatgcctctcaggattactctaaatatccatttgaggtgcaggtgaaggcaggctgcgagctgcatagcgggaaatcacccgaggggttctttcaggttgctttcaacggtctggacctgttatcttttcagaacacgacctgggtgcctagccccggctgcgggagcctagcccagtcagtttgccatctgttaaatcaccagtatgagggagtaaccgagacagtatacaacctcatacgctccacgtgtccacggttcctgttgggcctgctggacgctggtaaaatgtacgtgcaccgacaggtaagaccagaggcttggctgtcctccaggccaagccttgggagtggacagctactgctggtgtgtcatgcatctggcttttatccaaaacccgtgtgggtaacctggatgcggaatgaacaagaacaactgggtaccaagcacggggatatccttcccaatgccgatgggacctggtacctgcaggtaatactcgaggtagcatccgaggagcccgccgggctaagttgccgggtccggcacagctctttggggggccaggacatcatcctgtattgggcacatatccggactagctgcgaaactctgccgcccgactccccgatcgttctgcggacccagcaacctcgttctcttgtccagtatagtgacgcgattccatccacgctgcatttgaattgcttctccttttgcattatcaatatttgttag

SEQ ID NO: 266826 - DNA, 1041 bp, Artificial Sequence
  derived and/or modified sequence
atgctgttcctgcagttcctgctgctggccctgctgctgcccggcggggacaatgctgatgccagccaggagcacgtgtccttccacgtgatccagatcttctcctttgtgaaccagagctgggcccggggccagggcagcggctggctggatgagctgcagacccacggctgggacagcgagagcggcaccatcatcttcctgcacaactggagcaaaggaaacttcagcaatgaggagctgagtgacctggagctgctcttccgcttctacctgtttggcctgacccgggagatccaggaccacgccagccaggactacagcaagtacccctttgaggtgcaggtgaaggccggctgtgagctgcacagcggcaagagccctgagggcttcttccaggtggccttcaacggcctggacctgctgtccttccagaacaccacctgggtgcccagccctggctgcggcagcctggcccagagcgtgtgccacctgctgaaccaccagtatgagggcgtgacagagaccgtgtacaacctgatccgcagcacctgcccccgcttcctgctgggcctgctggatgctgggaagatgtatgtgcaccggcaggtgcggcctgaggcctggctgagcagccggcccagcctgggcagcggccagctgctgctggtgtgccacgccagcggcttctaccccaagcctgtgtgggtgacctggatgagaaatgagcaggagcagctgggcaccaagcatggagacatcctgcccaatgctgatggcacctggtacctgcaggtgatcctggaggtggccagcgaggagcccgccggcctgagctgccgggtgcgccacagcagcctgggcggccaggacatcatcctgtactgggcccacatccgcaccagctgtgagaccctgcccccagacagccccatcgtgctgcggacccagcagcccaggagcctggtgcagtacagtgatgccatccccagcaccctgcacctgaactgcttctccttctgcatcatcaacatctgctag

SEQ ID NO: 266827 - DNA, 846 bp, Artificial Sequence
  derived and/or modified sequence
tgattcctgcacaactggagcaagggcaacttcagcaatgaggagctgagtgacctggagctgctcttccgcttctacctgtttggcctgacccgggagatccaggaccacgccagccaggactacagcaagtacccctttgaggtgcaggtgaaggccggctgtgagctgcacagcggcaagagccctgagggcttcttccaggtggccttcaacggcctggacctgctgtccttccagaacaccacctgggtgcccagccctggctgcggcagcctggcccagagcgtgtgccacctgctgaaccaccagtatgaaggagtgacagaaacagtgtacaacctgatccgcagcacctgcccccgcttcctgctgggcctgctggatgctgggaagatgtatgtgcaccggcaggtgcggcctgaggcctggctgagcagccggcccagcctgggcagcggccagctgctgctggtgtgccacgccagcggcttctaccccaagcctgtgtgggtgacctggatgagaaatgagcaggagcagctgggcaccaagcacggggacatcctgcccaatgctgatggcacctggtacctgcaggtgatcctggaggtggccagcgaggagcctgctggcctgagctgccgggtgcgccacagcagcctgggcggccaggacatcatcctgtactgggcccacatccgcaccagctgtgagaccctgcccccagacagccccatcgtgctgcggacccagcagcccaggagcctggtgcagtacagtgatgccatccccagcaccctgcacctgaactgcttctccttctgcatcatcaacatctgctag

SEQ ID NO: 266828 - DNA, 1041 bp, Artificial Sequence
  derived and/or modified sequence
atgctgttcctgcagttcctgctgctggccctgctgctgcccggcggggacaatgcagacgccagtcaggaacacgtgtccttccatgtgatacaaatcttcagcttcgtcaaccagtcttgggcacgcggccaaggttccggctggcttgacgaacttcaaacgcacggatgggatagtgagtctggcaccattatttttctgcataactggagcaaagggaatttcagcaacgaggagctgtcagatctggagttgctgttcaggttttacttattcggacttactagagaaattcaagaccacgccagtcaggactactccaaataccccttcgaagttcaagttaaagctggatgcgaactgcactcaggcaagagccctgaaggctttttccaggtggccttcaatggcctcgatctgctgtcctttcagaacactacctgggtgccttcccctggttgcggctctctggcccagtctgtgtgccacttactgaatcatcagtacgagggggtgaccgaaactgtttacaatctgattcgctcgacgtgccccagatttctcctcggtttactcgacgccgggaagatgtacgtccaccgacaggttaggcccgaggcttggctgtccagccgccccagcctgggaagtggccagctgttacttgtgtgtcacgctagtggattttatcctaagcctgtctgggtcacttggatgcgaaacgagcaggagcagttgggcacaaaacacggcgatatcctccctaatgcagacggtacctggtatctgcaggtgatacttgaggtggcatctgaggaacccgcgggactctcatgtagagtgcgccactcctctctgggagggcaggacattattctatactgggcccacatcagaacttcttgtgaaactctccctcccgatagcccaattgtccttcgcacacagcagccacgttctttggtgcagtactctgatgctattccttcaacgctgcacctgaactgttttagtttttgtattatcaacatctgctag

SEQ ID NO: 266829 - DNA, 846 bp, Artificial Sequence
  derived and/or modified sequence
tgattcctgcacaactggagcaagggcaacttcagcaacgaggagctctccgatctggagctcttgtttagattttacctgtttggtctgaccagagagatccaggaccatgcgagccaggattactccaagtaccccttcgaggttcaggtgaaggccgggtgcgaacttcactccggaaaaagcccagaggggtttttccaggttgcttttaatgggctcgacctgctgagtttccagaacacaacctgggtgcccagtccaggctgcgggtcccttgcccagtcagtctgccatctgctaaatcaccagtatgagggagtgacagaaaccgtgtacaaccttatacgctcaacttgcccccgatttttgctgggccttctcgatgcaggtaaaatgtacgtgcaccggcaagtgcgcccggaggcctggctaagttctcgaccttctctgggcagcggtcaactactgcttgtgtgtcatgcatcgggattctacccaaagcctgtgtgggtcacctggatgagaaacgagcaggaacagcttggcaccaaacacggagacatcctgcctaacgccgacggtacctggtatctacaggtgatcctggaggtcgcaagtgaagagcctgcgggcctctcctgccgcgtcaggcactccagtctgggaggacaagacatcatcctgtactgggcccacattagaacttcatgtgaaacccttcccccggatagtcccatcgtgctgcgaactcagcaaccgcgtagcttggtgcaatacagcgatgcaataccctccaccctgcatctgaattgcttttcattttgcatcataaatatctgctag

SEQ ID NO: 266830 - DNA, 1041 bp, Artificial Sequence
  derived and/or modified sequence
atgctcttcctgcaattcctgcttttagccctcctgctaccaggcggagacaacgccgacgccagtcaggaacacgtgtcatttcacgtgatccagattttttcgtttgttaaccaatcatgggcgagaggccagggcagtggatggctggacgaattgcaaacccatgggtgggatagcgagtctgggacaattatcttccttcataactggagcaagggtaacttctctaacgaggagctctctgacctggaattgctctttagattttatctgttcggtctgactagggagatccaagaccacgcctcccaggactactcaaaatatcctttcgaagtccaggtaaaggccggatgcgagctccactcaggcaagagtcctgaggggttcttccaagtcgcgttcaacggcctggatctcctgagctttcaaaacacaacttgggtgcccagcccaggctgtggcagtctcgcccagtctgtatgccacctgttaaaccaccaatacgaaggtgtcactgaaaccgtgtacaatctgattcgcagtacgtgtccacgcttccttctgggtctcctcgacgcaggtaagatgtacgtccatagacaggtgcgtcccgaggcctggctgtcgtctcgcccatccctcggcagcgggcagctgctgctagtctgtcacgctagcggcttttaccctaaaccagtgtgggttacctggatgaggaatgaacaggagcagttgggaaccaaacacggagacattctgcctaacgctgatgggacctggtatcttcaggtgatcctggaagtagccagtgaggagcctgcaggtctgtcctgccgcgtcagacactcttctttaggtgggcaagacatcattttatactgggcacatatacgcacgtcttgtgagaccctgcccccagatagtccaattgtactgcgcacccaacagccgagaagcctggtgcaatactccgatgccatcccctccacactccatctcaactgtttttccttttgtatcatcaatatttgttag

SEQ ID NO: 266831 - DNA, 846 bp, Artificial Sequence
  derived and/or modified sequence
taatttttacacaattggtcaaagggaaacttcagcaacgaagagttgagcgacctggagctgctttttcgtttctacctttttggcctgacccgggagatccaggaccatgcctcccaggactactcaaagtacccttttgaggtgcaggtaaaggccggatgtgagctgcatagtggcaaatcccctgagggtttctttcaggtagcctttaacggtcttgatctgctcagctttcagaatactacctgggtgcctagtccaggttgtggctctctagctcagtctgtttgtcatttgctaaaccaccagtatgaaggtgtaactgaaacggtttataatctgatccggtctacttgtcctcgcttcctactgggcttgctagatgcaggcaaaatgtatgtgcaccgtcaggtgagaccagaggcctggttgagctcacggccaagcctcgggagtgggcagcttctgctggtctgccatgcctccggcttctaccccaaacccgtgtgggtgacctggatgcgaaacgaacaggagcaactaggcaccaaacatggagacattctccccaacgccgatgggacctggtacctgcaggtcatcttagaagtcgctagtgaagagccagccggattgagctgtagggtgaggcactctagcctggggggtcaagacatcattctgtactgggcacatatcagaacctcctgcgagacactaccacccgactcccctatagttttgagaacccagcaacccagaagcctggtgcagtactctgacgccattccctctacattgcatttaaactgtttcagcttttgcatcattaacatctgctag

SEQ ID NO: 266832 - DNA, 2501 bp, Artificial Sequence
  derived and/or modified sequence
accactttgtctaaggcagttgaggaagggaagtagatataatggagcttagtggcagagcagctggaatcctgagagaagagaataactttagttcagagcaggtggggaaatgagagattgagtaggaggaccaaggttgagggaagcagatcttcttagttgctgtcagcggctgatggggaagattgttggtagaaggaagtcagaatataggtacagagggataagtttgctaagaacagagatcagcaaacagcttttctgagagaaagaaacatctgcaaatgacatgctgtttctgcagtttctgctgctagctcttcttctcccaggtggtgacaatgcagacgcatcccaggaacacgtctccttccatgtcatccagatcttctcatttgtcaaccaatcctgggcacgaggtcagggctcaggatggctggacgagttgcagactcatggctgggacagtgaatcaggcacaataattttcctgcataactggtccaagggcaacttcagcaatgaagagttgtcagacctagagttgttatttcgtttctacctctttggattaactcgggagattcaagaccatgcaagtcaagattactcgaaatatccctttgaagtacaggtgaaagcgggctgtgagctgcattctggaaagagcccagaaggcttctttcaggtagctttcaacggattagatttactgagtttccagaatacaacatgggtgccatctccaggctgtggaagtttggcccaaagtgtctgtcatctactcaatcatcagtatgaaggcgtcacagaaacagtgtataatctcataagaagcacttgcccccgatttctcttgggtctcctggatgcagggaagatgtatgtacacaggcaagtgaggccagaagcctggctgtccagtcgccccagccttgggtctggccagctgttgctggtttgtcatgcctccggcttctacccaaagcctgtttgggtgacatggatgcggaatgaacaggagcaactgggcactaaacatggtgatattcttcctaatgctgatgggacatggtatcttcaggtgatcctggaggtggcatctgaggagcctgctggcctgtcttgtcgagtgagacacagcagtctaggaggccaggacatcatcctctactgggctcatatcaggacatcctgtgagactcttccccctgactcccccattgtgttaagaacccagcaacccaggagcctagtacaatatagtgatgccatcccgtcgactctccatttaaattgtttctctttctgcataataaacatttgttaataaaaaccaaattctaatttggaatgtttttcttggaatctccactttttatatagcactcaaccttcaaagcccatttctgatgtcatttcctccaacgatcttccttgacccatactgaacccagagagcccctcaactgttatgtgcatgcaacacttcctaccctgtgttgcagctacttgagtctttcatttcacatttttaagcttttaggaggcaaggatcatgataaatgtgcctttcctgcatatgataggctcagtgaaacacaaaacaaaacatcatatctaagttggattaactgtcatgttgacaatttttctcattatattccttcccaatgttgttgtagcattggaaatattcatgcttctctttttgtttaaatgcttcatacctagcagataaattccactctcctttagctccctcattttctccttaaacatttaaggaaaagtgcagccttgtgccttgatacacttattttctaaacacagagaattacaaatgcaaatagacagagagtgtgcaagttacatgtgatgatcagtggtgcagatatgtcacagaatacttaagaaaaggaacaagagatttggtcctcagggttggagtgggatcaaggcaaccgttgtgctgtatatggaagacaaatttcctaaaggactgtgttatctgagatagccttggctaaactttagtccctttaggtttcattcactaattcaactaatattttttgggtactgagttgagacaggcacatacagcttctaaactggtggtggataaaacaaatgagattgtgtccactctcctgaagttgcaatgtttgcttcctcaatctgtccatgtttcttttctattgttttcatgtttttatttatttcaaaaaattttaaatagattttattgatgtataatttatagtaaaatttgaatctttaagtgtacagttctatttattttgataattatataagcccatgtaaacaaaatcacaatcaagatattaaatgtcataacccctcatacctgtttgtagtcaagcacaccaacaacctggcattcttgcaactactgatatactttatgtcacttaagcttaaacttgtattttctatgattttattaagatggaaataaacatatctacttggta

SEQ ID NO: 266833 - DNA, 855 bp, Artificial Sequence
  derived and/or modified sequence
tttcctgcataactggtccaagggcaacttcagcaatgaagagttgtcagacctagagttgttatttcgtttctacctctttggattaactcgggagattcaagaccatgcaagtcaagattactcgaaatatccctttgaagtacaggtgaaagcgggctgtgagctgcattctggaaagagcccagaaggcttctttcaggtagctttcaacggattagatttactgagtttccagaatacaacatgggtgccatctccaggctgtggaagtttggcccaaagtgtctgtcatctactcaatcatcagtatgaaggcgtcacagaaacagtgtataatctcataagaagcacttgcccccgatttctcttgggtctcctggatgcagggaagatgtatgtacacaggcaagtgaggccagaagcctggctgtccagtcgccccagccttgggtctggccagctgttgctggtttgtcatgcctccggcttctacccaaagcctgtttgggtgacatggatgcggaatgaacaggagcaactgggcactaaacatggtgatattcttcctaatgctgatgggacatggtatcttcaggtgatcctggaggtggcatctgaggagcctgctggcctgtcttgtcgagtgagacacagcagtctaggaggccaggacatcatcctctactgggctcatatcaggacatcctgtgagactcttccccctgactcccccattgtgttaagaacccagcaacccaggagcctagtacaatatagtgatgccatcccgtcgactctccatttaaattgtttctctttctgcataataaacatttgttaataaaaaccaaa

SEQ ID NO: 266834 - DNA, 1041 bp, Artificial Sequence
  derived and/or modified sequence
atgctgttcctgcagttcctgctgctggccctgctgctgcccggcggcgacaacgccgacgccagccaggagcacgtgagcttccacgtgatccagatcttcagcttcgtgaaccagagctgggccagaggccagggcagcggctggctggacgagctgcagacccacggctgggacagcgagagcggcaccatcatcttcctgcacaactggagcaagggcaacttcagcaacgaggagctgagcgacctggagctgctgttcagattctacctgttcggcctgaccagagagatccaggaccacgccagccaggactacagcaagtaccccttcgaggtgcaggtgaaggccggctgcgagctgcacagcggcaagagccccgagggcttcttccaggtggccttcaacggcctggacctgctgagcttccagaacaccacctgggtgcccagccccggctgcggcagcctggcccagagcgtgtgccacctgctgaaccaccagtacgagggcgtgaccgagaccgtgtacaacctgatcagaagcacctgccccagattcctgctgggcctgctggacgccggcaagatgtacgtgcacagacaggtgagacccgaggcctggctgagcagcagacccagcctgggcagcggccagctgctgctggtgtgccacgccagcggcttctaccccaagcccgtgtgggtgacctggatgagaaacgagcaggagcagctgggcaccaagcacggcgacatcctgcccaacgccgacggcacctggtacctgcaggtgatcctggaggtggccagcgaggagcccgccggcctgagctgcagagtgagacacagcagcctgggcggccaggacatcatcctgtactgggcccacatcagaaccagctgcgagaccctgccccccgacagccccatcgtgctgagaacccagcagcccagaagcctggtgcagtacagcgacgccatccccagcaccctgcacctgaactgcttcagcttctgcatcatcaacatctgctag

SEQ ID NO: 266835 - DNA, 846 bp, Artificial Sequence
  derived and/or modified sequence
tgattcctgcacaactggagcaagggcaacttcagcaacgaggagctgagcgacctggagctgctgttcagattctacctgttcggcctgaccagagagatccaggaccacgccagccaggactacagcaagtaccccttcgaggtgcaggtgaaggccggctgcgagctgcacagcggcaagagccccgagggcttcttccaggtggccttcaacggcctggacctgctgagcttccagaacaccacctgggtgcccagccccggctgcggcagcctggcccagagcgtgtgccacctgctgaaccaccagtacgagggcgtgaccgagaccgtgtacaacctgatcagaagcacctgccccagattcctgctgggcctgctggacgccggcaagatgtacgtgcacagacaggtgagacccgaggcctggctgagcagcagacccagcctgggcagcggccagctgctgctggtgtgccacgccagcggcttctaccccaagcccgtgtgggtgacctggatgagaaacgagcaggagcagctgggcaccaagcacggcgacatcctgcccaacgccgacggcacctggtacctgcaggtgatcctggaggtggccagcgaggagcccgccggcctgagctgcagagtgagacacagcagcctgggcggccaggacatcatcctgtactgggcccacatcagaaccagctgcgagaccctgccccccgacagccccatcgtgctgagaacccagcagcccagaagcctggtgcagtacagcgacgccatccccagcaccctgcacctgaactgcttcagcttctgcatcatcaacatctgctag

SEQ ID NO: 266836 - protein, 443 aa, Artificial Sequence
  derived and/or modified sequence
MKEAKDARYTNGHLFTTISVSGMTMCYACNKSITAKEALICPTCNVTIHNRCKDTLANCTKVKQKQQKAALLKNNTALQSVSLRSKTTIRERPSSAIYPSDSFRQSLLGSRRGRSSLSLAKSVSTTNIAGHFNDESPLGLRRILSQSTDSLNMRNRTLSVESLIDEAEVIYSELMSDFEMDEKDFAADSWSLAVDSSFLQQHKKEVMKQQDVIYELIQTELHHVRTLKIMTRLFRTGMLEELHLEPGVVQGLFPCVDELSDIHTRFLSQLLERRRQALCPGSTRNFVIHRLGDLLISQFSGPSAEQMCKTYSEFCSRHSKALKLYKELYARDKRFQQFIRKVTRPAVLKRHGVQECILLVTQRITKYPLLISRILQHSHGIEEERQDLTTALGLVKELLSNVDEGIYQLEKGARLQEIYNLLLLFSLSPSFMEALGDNLASWS

SEQ ID NO: 266837 - DNA, 1332 bp, Artificial Sequence
  derived and/or modified sequence
atgaaggaggccaaagatgcacgctacacaaacggacatctgtttactactattagtgtgtcggggatgaccatgtgctatgcttgcaataaaagcattactgctaaggaggcactgatttgccctacctgtaacgtcaccatccacaatcgctgtaaggacaccctcgccaattgtaccaaggtcaagcagaagcagcagaaggctgcccttttgaaaaacaacactgctttacaatctgtgtcactgcggtctaaaacgacgattcgcgaacggccgtctagcgccatttacccgtccgattcgtttcgacaaagcctgctcggcagtcgaaggggcagatcatctttgtccttagccaagtccgttagcacaactaacatagctggacactttaatgacgaatcaccactgggcttgcggcgcattttgtcacagtctactgattccctgaatatgcgtaacagaacactcagtgtagaaagcctcatcgatgaggctgaggtcatatacagcgagctgatgtctgacttcgagatggacgaaaaggatttcgctgccgacagttggagtcttgcagtggactcatcttttctccaacagcataagaaagaggtgatgaagcagcaagatgttatttatgaacttattcagacagaactccaccacgtgcgcacacttaaaattatgactcgtctcttccgtaccgggatgctggaagagcttcatctggagcctggtgtggtgcagggcttgtttccgtgtgtcgatgaacttagtgacatacataccagatttctgtctcagctgctggaaagaaggcgccaggctctgtgccctggttccactcgaaatttcgtcattcatcgtctgggggatttactgattagccaattcagcgggccttcggccgaacagatgtgcaagacctacagtgagttctgcagcaggcacagcaaagccctgaaactgtacaaggagttgtatgcaagagataagcgctttcaacagttcatccggaaggtgactcgacctgctgtcctaaagcgacacggagtccaggaatgtattctcctcgtgacacagagaattacaaaatacccccttttaattagccgcatcctgcagcattctcacgggattgaagaggagaggcaggatcttacaacagccctaggccttgtgaaggaactattgagcaacgtcgacgaaggaatctaccaactagagaaaggggcccgactccaagaaatatacaatctcctcctgctgttctccttgtcaccgagttttatggaggcgctcggcgataatctggctagctggagttag

SEQ ID NO: 266838 - DNA, 1332 bp, Artificial Sequence
  derived and/or modified sequence
atgaaggaggccaaggatgcccgctacaccaacggccacctgttcaccaccatctctgtgtctggcatgaccatgtgctacgcctgcaacaagagcatcacagccaaggaggccctgatctgccccacctgcaatgtgaccatccacaaccgctgcaaggacaccctggccaactgcaccaaggtgaagcagaagcagcagaaggccgccctgctgaagaacaacacagccctgcagagcgtgtccctgcggagcaagaccaccatccgggagcggcccagcagcgccatctaccccagcgacagcttccggcagagcctgctgggcagcagaagaggccgcagcagcctgagcctggccaagtctgtgtccaccaccaacattgctggccacttcaatgatgagagccccctgggcctgcggcgcatcctgagccagagcacagacagcctgaacatgaggaacagaaccctgtctgtggagagcctgattgatgaagctgaggtgatctacagcgagctgatgtctgactttgagatggatgagaaggactttgctgctgacagctggagcctggccgtggacagcagcttcctgcagcagcacaagaaggaggtgatgaagcagcaggatgtgatctatgagctgatccagacagagctgcaccacgtgaggaccctgaagatcatgaccaggctcttcagaacaggcatgctggaggagctgcacctggagcccggggtggtgcagggcctcttcccctgtgtggatgagctgagtgacatccacacccgcttcctgagccagctgctggagcggcggcggcaggccctgtgccccggcagcaccaggaacttcgtcatccaccggctgggggacctgctgatcagccagttcagcggccccagcgctgagcagatgtgcaagacctacagcgagttctgcagccgccacagcaaggccctgaagctgtacaaggagctgtatgcccgggacaagcgcttccagcagttcatcaggaaggtgaccaggcctgctgtgctgaagagacatggagtgcaggagtgcatcctgctggtgacccagaggatcaccaagtaccccctgctgatcagccgcatcctgcagcacagccatggaattgaggaggagcggcaggacctgaccacagccctgggcctggtgaaggagctgctgagcaatgtggatgagggcatctaccagctggagaagggggcccggctgcaggagatctacaacctgctgctgctcttcagcctgagccccagcttcatggaggccctgggggacaacctggcctcctggagctag

SEQ ID NO: 266839 - DNA, 1332 bp, Artificial Sequence
  derived and/or modified sequence
atgaaggaggccaaggacgcccggtacaccaacggccacctgttcacaacgatatccgtttccgggatgaccatgtgttatgcctgcaacaaatccatcactgccaaagaagcactgatctgtcctacttgcaacgtgacgatccacaacagatgtaaggatacgctggccaattgcactaaggtgaagcagaaacagcagaaggccgctcttctgaaaaacaatactgccttgcagtcagtgagcctgcgttcgaagaccactatcagagaaagaccctcctcagccatttacccgtctgacagcttcagacagtcgctgctggggagcagaaggggtcgaagtagcctcagtcttgcaaagagcgtaagtacgaccaatatcgccggacacttcaatgacgaatcacctctgggcctgcgccgaattttgagccagagcactgacagcctgaatatgaggaacagaacattaagcgtggaaagcttgatcgacgaagccgaggtgatttactctgagctgatgagtgatttcgagatggatgaaaaggacttcgcagcagatagctggtccctggccgttgacagttcctttctgcagcaacataagaaagaagtgatgaaacaacaggatgttatatatgagttaatacaaacagaactccaccatgttcgaacgcttaaaatcatgactcgactgttccgaaccgggatgctggaggagctgcatttagaaccgggcgtggtacagggactcttcccctgtgtagacgagctctcggacatccatacacgctttttgtcgcagctcttagagagaagaaggcaggcattgtgtcctggttcaactcgaaactttgtaatccaccgcctcggcgatctgctcatcagccagttctccggcccgtccgctgagcagatgtgtaaaacatattcagaattctgctctcgtcactccaaagcactgaaactgtataaggaactgtatgcccgcgataagcgtttccaacagtttattcgcaaggtcacacggccggccgtgctcaaacgacatggagttcaggagtgcatcttgttggtgactcaacggattactaaatatcccctcctcatcagcaggatactgcagcactcacacgggattgaagaggaacgccaggacctgactacagccctgggactggtcaaagaactgctgtctaacgtcgacgaaggcatataccaattggaaaagggggctaggcttcaggagatatacaatctgctgctcctgtttagcttaagtccaagcttcatggaggctttgggagacaatctggcttcctggtcttag

SEQ ID NO: 266840 - DNA, 1332 bp, Artificial Sequence
  derived and/or modified sequence
atgaaagaagccaaggatgccaggtatacaaacggacacctgtttacaactatatctgtgtctggcatgacaatgtgttatgcctgcaacaagtccatcacggccaaggaagccctgatttgcccaacatgtaacgttactatccataaccgttgcaaggatacgctcgctaattgcacaaaggtgaagcaaaagcaacagaaggccgctctgttaaagaataacacggcattacagtcagtgtcgcttcgctcgaaaacaactatccgggagaggcccagttctgcaatctatccatctgatagcttcagacagtctcttcttggcagccgtcgaggaagatcgtcgttaagtctggccaaatcagtcagcactactaatatcgcaggacacttcaacgacgaaagtcctctgggcctcaggaggatcctgagtcagtctacggattctctcaatatgaggaaccggaccctatccgtcgagagcctgatcgatgaagctgaggttatctactctgaacttatgtccgacttcgagatggacgagaaagatttcgcggcagatagttggagtttggcagtggactccagtttcctccagcaacacaagaaggaagtcatgaaacagcaggatgtgatttacgaactcatccagactgaactgcatcatgtgcggacattaaagataatgacacggctgtttcggactggaatgctggaggaactgcacttggagccgggtgtggtgcagggcttgtttccttgcgtggatgagctgtcagacattcacacacggttcctctctcagctcctcgaaagacgcaggcaggccctgtgccctggaagcactagaaattttgttatccaccgtcttggtgatctcttgatatctcagttctctgggccaagcgcagagcagatgtgcaagacatatagcgaattttgttccagacacagtaaagccctcaagctatacaaagaactttacgctagggataagcggtttcagcagttcatacggaaagtaaccagacctgccgttctcaaaaggcatggtgtgcaggaatgcatattacttgtgacgcaacgaattacaaagtatcccctcctgatttctcgcattctccagcactcacatggcatcgaggaagagaggcaggacctcacaactgccctcgggttagtaaaggaactgctcagcaatgtcgacgaggggatataccagctggagaaaggagccaggctacaggaaatttacaatctgttgctgcttttctctttgtccccctcattcatggaggccctgggcgataacctggcttcatggtcctag

SEQ ID NO: 266841 - DNA, 1774 bp, Artificial Sequence
  derived and/or modified sequence
agacacatggaaggccttcggtaaaagtggagaatcccaacctagtcccccaaagtagctggcagaggcggagctaggaggagggcagagtggggtcaggaaggccccagaagggtggggcatgtgggagaattctctcctctctgttcttcgacctctgggagtgaatcctacccttcccgtgtactgaagatccagcgtttagttctcctttgatttcctctccctctggccacccctgcccccaatcgtaaaaggggtcagtctgctcaggcctgctttgatgggaccccgaaggccaggaaggaactggtcctgggttttctaagagctgggggcggatggaattctcctgcctgcgggtctttaaagactgagacccgggaaaaggagaagatgaaggaagccaaggatgcccgctataccaatgggcacctcttcaccaccatttcagtttcaggcatgaccatgtgctatgcctgtaacaagagcatcacagccaaggaagccctcatctgcccaacctgcaatgtgactatccacaaccgctgtaaagacaccctcgccaactgtaccaaggtcaagcagaagcaacagaaagcggccctgctgaagaacaacaccgccttgcagtccgtttctcttcgaagtaagacaaccatccgggagcggccaagctcggccatctacccctccgacagcttccggcagtccctcctgggctcccgccgtggccgctcctccttgtctttagccaagagtgtttctaccaccaacattgctggacatttcaatgatgagtctcccctggggctgcgccggatcctctcacagtccacagactccctcaacatgcggaaccgaaccctatccgtggaatccctcattgacgaagcagaggtaatctacagtgagctgatgagtgactttgagatggatgagaaggactttgcagctgactcttggagtcttgctgtggacagcagcttcctgcagcagcataaaaaggaggtgatgaagcagcaagatgtcatctatgagctaatccagacagagctgcaccatgtgaggacactgaagatcatgacccgcctcttccgcacggggatgctggaagagctacacttggagccaggagtggtccagggcctgttcccctgcgtggacgagctcagtgacatccatacacgcttcctcagccagctattagaacgccgacgccaggccctgtgccctggcagcacccggaactttgtcatccatcgcttgggtgatctgctcatcagccagttctcaggtcctagtgcggagcagatgtgtaagacctactcggagttctgcagccgccacagcaaggccttaaagctctataaggagctgtacgcccgagacaaacgcttccagcaattcatccggaaagtgacccgccccgccgtgctcaagcggcacggggtacaggagtgcatcctgctggtgactcagcgcatcaccaagtacccgttactcatcagccgcatcctgcagcattcccacgggatcgaggaggagcgccaggacctgaccacagcactggggctagtgaaggagctgctgtccaatgtggacgagggtatttatcagctggagaaaggggcccgtctgcaggagatctacaacctcttactgctgttctccctttctccgtccttcatggaagccctgggagataacctggcttcctggagttgatggaataaaggttggggtggccataatggtttgttgggggtgaggg

SEQ ID NO: 266842 - DNA, 1332 bp, Artificial Sequence
  derived and/or modified sequence
atgaaggaggccaaggacgccagatacaccaacggccacctgttcaccaccatcagcgtgagcggcatgaccatgtgctacgcctgcaacaagagcatcaccgccaaggaggccctgatctgccccacctgcaacgtgaccatccacaacagatgcaaggacaccctggccaactgcaccaaggtgaagcagaagcagcagaaggccgccctgctgaagaacaacaccgccctgcagagcgtgagcctgagaagcaagaccaccatcagagagagacccagcagcgccatctaccccagcgacagcttcagacagagcctgctgggcagcagaagaggcagaagcagcctgagcctggccaagagcgtgagcaccaccaacatcgccggccacttcaacgacgagagccccctgggcctgagaagaatcctgagccagagcaccgacagcctgaacatgagaaacagaaccctgagcgtggagagcctgatcgacgaggccgaggtgatctacagcgagctgatgagcgacttcgagatggacgagaaggacttcgccgccgacagctggagcctggccgtggacagcagcttcctgcagcagcacaagaaggaggtgatgaagcagcaggacgtgatctacgagctgatccagaccgagctgcaccacgtgagaaccctgaagatcatgaccagactgttcagaaccggcatgctggaggagctgcacctggagcccggcgtggtgcagggcctgttcccctgcgtggacgagctgagcgacatccacaccagattcctgagccagctgctggagagaagaagacaggccctgtgccccggcagcaccagaaacttcgtgatccacagactgggcgacctgctgatcagccagttcagcggccccagcgccgagcagatgtgcaagacctacagcgagttctgcagcagacacagcaaggccctgaagctgtacaaggagctgtacgccagagacaagagattccagcagttcatcagaaaggtgaccagacccgccgtgctgaagagacacggcgtgcaggagtgcatcctgctggtgacccagagaatcaccaagtaccccctgctgatcagcagaatcctgcagcacagccacggcatcgaggaggagagacaggacctgaccaccgccctgggcctggtgaaggagctgctgagcaacgtggacgagggcatctaccagctggagaagggcgccagactgcaggagatctacaacctgctgctgctgttcagcctgagccccagcttcatggaggccctgggcgacaacctggccagctggagctag

SEQ ID NO: 266843 - protein, 348 aa, Artificial Sequence
  derived and/or modified sequence
MAGLKRRASQVWPEEHGEQEHGLYSLHRMFDIVGTHLTHRDVRVLSFLFVDVIDDHERGLIRNGRDFLLALERQGRCDESNFRQVLQLLRIITRHDLLPYVTLKRRRAVCPDLVDKYLEETSIRYVTPRALSDPEPRPPQPSKTVPPHYPVVCCPTSGPQMCSKRPARGRATLGSQRKRRKSVTPDPKEKQTCGEEVQGFQRWSRLEGEYKELLGHWAVYAIQYIRLRVRAEYCQHETALQGNVFSNKQDPLERQFERFNQANTILKSRDLGSIICDIKFSELTYLDAFWRDYINGSLLEALKGVFITDSLKQAVGHEAIKLLVNVDEEDYELGRQKLLRNLMLQALP

SEQ ID NO: 266844 - DNA, 1047 bp, Artificial Sequence
  derived and/or modified sequence
atggccgggctgaaacgacgcgcatcgcaagtttggcctgaagagcatggggagcaggaacacggtctctacagcctgcacagaatgttcgatatcgttggcacccatcttacacatagggacgtccgcgttctgtctttcctgtttgttgacgtgattgacgaccacgaacgcggattgattcgcaatgggcgtgattttctcctagccctggagcgccaaggtcgctgtgacgaaagtaatttccgacaggtcctgcagctgcttcgaatcatcaccaggcatgacctcctgccctacgtgacacttaaacgtcggagagctgtctgtccagatctggtggacaaatacctagaagagacctccataaggtatgtgactccacgggccctctctgacccagaaccgagaccacctcaaccaagtaagaccgtgccccctcactatcctgttgtctgttgccctacatcagggccacaaatgtgctccaaacgcccagccagaggaagggctacgctggggtcccagaggaagcgcagaaaaagcgtcactcctgatcctaaagaaaagcaaacctgcggcgaggaagtgcaaggattccaacggtggtccagactcgagggggaatataaggagctgctcggccattgggcagtttacgctatacagtatatacgattgagggtgagggccgaatactgtcagcatgagacagccttgcaaggcaatgtctttagcaacaagcaggatccactggagcgccagtttgagagattcaaccaggcgaacaccattctgaaaagtcgagatctgggcagtatcatctgcgacatcaaattcagtgaactgacctatttagatgcgttctggcgggattatattaatggctccctgttagaggcgcttaagggagtatttatcacagattccctgaagcaggcagtgggccacgaggccataaagctcctcgtgaacgtggacgaagaggactatgaactcggcagacagaagctgctgagaaacttgatgctccaggccctaccctag

SEQ ID NO: 266845 - DNA, 1047 bp, Artificial Sequence
  derived and/or modified sequence
atggccggactgaagcggagggcaagccaagtatggccagaggagcacggcgagcaggaacatggactttacagtctacatcgcatgtttgatatagtggggacccacctgacacaccgcgacgtgcgagtgttatcattcctgttcgttgacgtgatcgacgaccacgaacgcggactgatccgtaatggaagagactttctactagcactcgagagacaggggagatgcgacgagtctaacttccgacaggtacttcagcttttgagaataataacaaggcacgatctgctcccttatgtgactttaaagagacggcgtgcagtctgtcccgacttagtggataaatatttggaggaaactagtattcgctacgtcactcccagagctctgtccgaccctgaaccaaggccaccccagccttcgaagacagtaccccctcactaccctgtcgtctgttgtccaacctctggccctcagatgtgttcaaagcggccagccagaggacgagctacactggggtctcagaggaagaggagaaagagcgtaactccggaccccaaggagaaacaaacctgcggcgaggaggtccagggattccagagatggtccagattggaaggtgaatataaggagctgctggggcactgggctgtctatgcaattcagtacattcgactgagagtgagggctgagtactgccaacacgagaccgcactgcagggcaatgtgttctcaaacaagcaggatcctctggagcgccagtttgagcgattcaaccaggcgaatactattctgaagagtcgcgacttgggttcaattatatgcgacataaagttttccgaactcacgtaccttgacgccttctggagagactatattaacggtagtctcctagaggctctgaagggcgtctttattacggacagtttgaagcaggcagtggggcatgaggccattaagctgctggtgaatgttgatgaggaggattatgaactgggtcgccagaaactcctgaggaacttgatgctacaggccctcccctag

SEQ ID NO: 266846 - DNA, 1047 bp, Artificial Sequence
  derived and/or modified sequence
atggccggcctgaagaggcgggccagccaggtgtggccagaggagcacggggagcaggagcacggcctgtacagcctgcacaggatgtttgacatcgtgggcacccacctgacccacagagatgtgcgggtgctgtccttcctgtttgtggatgtgattgatgaccacgagcggggcctcatcagaaatggccgggacttcctgctggccctggagcggcagggccgctgtgatgagagcaacttccggcaggtgctgcagctgctgcgcatcatcaccaggcatgacctgctgccctacgtgaccctgaagagaagaagagctgtgtgcccagacctggtggacaagtacctggaggagaccagcatccgctacgtgaccccccgggccctgagtgaccctgagccccggcccccccagcccagcaagacagtgcccccccactaccctgtggtgtgctgccccaccagcggcccccagatgtgcagcaagaggcctgcccggggccgggccaccctgggcagccagaggaagaggaggaagtctgtgaccccagaccccaaggagaagcagacctgtggggaggaggtgcagggcttccagcgctggagccggctggagggggagtacaaggagctgctgggccactgggccgtgtatgccatccagtacatccggctgcgggtgcgggcagagtactgccagcacgagacagccctgcagggcaatgtgttcagcaacaagcaggaccccctggagcggcagtttgagcgcttcaaccaggccaacaccatcctgaagagccgggacctgggcagcatcatctgtgacatcaagttcagcgagctgacctacctggatgccttctggagggactacatcaatggcagcctgctggaggccctgaagggcgtcttcatcacagacagcctgaagcaggccgtgggccacgaggccatcaagctgctggtgaatgtggatgaagaagattatgagctgggccggcagaagctgctgaggaacctgatgctgcaggccctgccctag

SEQ ID NO: 266847 - DNA, 1047 bp, Artificial Sequence
  derived and/or modified sequence
atggccggcctgaagcggcgggccagccaggtgtggcccgaggagcacggggagcaagagcatggcctctattcactgcacaggatgttcgacatcgtgggcacccatctcactcaccgcgacgtccgcgtgctgtcatttctgttcgtagatgtgattgacgatcatgagagaggcctcataagaaatggtcgcgactttttactggccctggagcgccaggggcgatgcgatgagtccaacttccgacaggtgctgcagcttctgcggattataactcggcatgatcttctgccgtacgttactttgaagcggcggcgcgccgtgtgtcccgatctcgtcgataagtatcttgaagaaaccagcatcagatacgttacgccacgcgctctctcagacccggagccaaggcccccccagccttctaagaccgtccctccccactatccagtggtgtgctgtccaacctccggcccgcaaatgtgctctaagcgacccgcgcgagggcgagccactctgggttcccagcggaagcgcagaaagtctgtcacaccagaccccaaggagaagcagacatgcggggaagaggtgcaaggatttcagcgttggtctcgcctggagggggagtacaaagagttactggggcattgggctgtttatgctattcagtatatccgtctcagagtacgggcggagtattgtcagcacgagacagccctccagggcaacgtgttcagcaacaagcaggaccctctggagaggcagtttgaaaggttcaatcaggctaatactatcctcaagagcagagatctagggtctatcatctgtgatataaaattttcagagctgacatacctggatgccttttggcgggattacataaacggcagtttgctcgaagcattaaaaggagtctttatcaccgactctctcaaacaagccgtgggccacgaagctatcaaactgctcgtgaatgtcgatgaggaggattatgagctggggcgccagaagctgctgaggaatctcatgctacaggctttaccttag

SEQ ID NO: 266848 - DNA, 1047 bp, Artificial Sequence
  derived and/or modified sequence
atggccggcctgaagcggcgggccagccaggtgtggcccgaggagcacggtgaacaggaacatggactgtactctcttcaccgcatgttcgatatcgtgggtacccacctgacccatcgggacgttagagtgttgtctttcctgtttgtggacgtgattgacgatcatgaacgaggcctgatacgtaacggacgcgattttttgttagccctggaaagacaggggcgttgcgatgagagcaacttccgccaggttctgcaactgctaagaattatcactcgccatgacctccttccttacgtcacgctaaagagaaggcgcgccgtgtgtcccgatctcgtggataaatatttagaagaaacttctatcagatatgtcacccctcgcgcactgtccgaccccgagccgagacccccgcagccctccaagacggtcccaccacactaccccgttgtgtgctgtcccaccagcgggccccagatgtgctctaaaaggccagcccgcggccgggctacactgggatctcagcggaaacgcagaaagtccgttactccagatccgaaggaaaagcaaacctgcggggaagaagttcagggcttccagcggtggtctcggctggaaggcgaatataaagagctcctgggccactgggccgtgtacgctattcagtatattcgcttgcgggtgagggctgagtactgccaacacgaaaccgctctgcaaggcaatgtcttttccaacaagcaagaccccctggagcggcagtttgaaaggttcaaccaggcgaatacgattctgaagtctcgcgacctgggaagtataatttgcgatattaagttctctgagctgacttatttggacgctttttggcgcgattacattaacggtagtttgttggaagccctgaagggggtattcattactgactccctgaagcaggcggtcggacacgaggctatcaagctcctggtaaacgtcgacgaagaagactacgagttgggccgacaaaagcttttaaggaacctgatgctgcaggccctgccttag

SEQ ID NO: 266849 - DNA, 1047 bp, Artificial Sequence
  derived and/or modified sequence
atggccggactgaaaagacgagcgagtcaagtttggccagaagaacatggcgaacaggaacacggcttatatagtttgcaccgaatgtttgacatcgtagggacccatctgacacatcgggacgttcgcgtgctgagcttcttgtttgttgacgtgatagacgatcatgagagagggctgatcagaaacggcagggacttcctgctcgccctcgagagacagggtaggtgtgacgaatccaatttccgccaagtccttcagttacttagaatcatcactcgccacgatctgctcccttatgtgaccctcaagcgccgtcgagccgtctgcccagatctggttgataaatatctcgaggaaacatccatcaggtacgtgacacccagggctctgtccgatccggaaccgagaccccctcagccctcgaaaactgttccacctcattatcctgtggtgtgttgtcccacctctggccctcagatgtgtagcaagcgcccagcgcgaggtagagcaactctgggctcccaaaggaagcgccgaaaaagcgttacgcccgatccaaaagagaagcaaacttgtggcgaagaggtccagggcttccagcgctggtccaggctcgaaggggagtacaaagagttactaggccactgggccgtgtatgcaattcagtacatcagattacgcgtgagggctgaatactgccagcacgaaacagcactgcagggcaacgttttctcgaataaacaggaccctctcgaacgacagtttgaaagattcaatcaagccaacactatcttgaagtccagggacttgggaagcataatctgtgatataaagtttagtgaactcacttacctagatgccttttggagggattatattaatggctctctgctggaagccctgaaaggggtgtttatcactgactcactgaagcaagcggtcggacacgaggctatcaaactcctcgtgaatgttgacgaggaggactacgaactgggaaggcagaagcttctgcgtaatctgatgctgcaggccttgccttag

SEQ ID NO: 266850 - DNA, 1047 bp, Artificial Sequence
  derived and/or modified sequence
atggcagggctcaagcggagagcttcacaggtgtggccagaggagcacggggagcaggagcatggcttatactccctccacagaatgttcgacatcgtcggcacgcacttaacacaccgggatgtgcgcgttctgagcttcctgttcgtggacgtaattgatgaccatgagagagggcttattaggaatgggagagattttctccttgctctggaacgtcaggggcgatgcgacgagtctaacttcagacaggttctgcaactgctgcgcataatcacacggcatgatctcctcccatatgtcacgttaaaaaggcgacgggctgtgtgccccgatctggtggataaatatctggaagagacatcaattcgctatgtgacaccccgtgccctgagtgacccggagccaagacctccgcagccatccaaaactgtccctccccattaccctgttgtttgctgccccacctccgggcctcagatgtgcagcaaacgtcctgctcggggaagagctaccctgggcagccagcgaaaaaggcggaaatccgttacgccagaccccaaggaaaagcagacatgcggcgaagaagtgcagggtttccagcgatggtccaggctggagggcgagtataaggagttgctgggacactgggctgtctacgccattcagtatataaggctcagagtgagagcagagtactgtcagcacgaaacagccttgcagggtaatgtgttttctaataaacaggaccctctggaacggcagtttgaacggtttaaccaggctaatactatcctgaaatcccgggacctgggctctatcatatgcgatattaagttcagtgaacttacctacctggatgccttttggagggactacattaatgggtctctactggaagccctgaaaggcgtgttcatcacagattccttaaaacaggccgtaggacacgaggcaatcaagctcttggttaacgtcgacgaagaagattatgaactgggacgccaaaaacttctaagaaacttaatgcttcaggccctgccctag

SEQ ID NO: 266851 - DNA, 1047 bp, Artificial Sequence
  derived and/or modified sequence
atggccggcctgaagagaagagccagccaggtgtggcccgaggagcacggcgagcaggagcacggcctgtacagcctgcacagaatgttcgacatcgtgggcacccacctgacccacagagacgtgagagtgctgagcttcctgttcgtggacgtgatcgacgaccacgagagaggcctgatcagaaacggcagagacttcctgctggccctggagagacagggcagatgcgacgagagcaacttcagacaggtgctgcagctgctgagaatcatcaccagacacgacctgctgccctacgtgaccctgaagagaagaagagccgtgtgccccgacctggtggacaagtacctggaggagaccagcatcagatacgtgacccccagagccctgagcgaccccgagcccagacccccccagcccagcaagaccgtgcccccccactaccccgtggtgtgctgccccaccagcggcccccagatgtgcagcaagagacccgccagaggcagagccaccctgggcagccagagaaagagaagaaagagcgtgacccccgaccccaaggagaagcagacctgcggcgaggaggtgcagggcttccagagatggagcagactggagggcgagtacaaggagctgctgggccactgggccgtgtacgccatccagtacatcagactgagagtgagagccgagtactgccagcacgagaccgccctgcagggcaacgtgttcagcaacaagcaggaccccctggagagacagttcgagagattcaaccaggccaacaccatcctgaagagcagagacctgggcagcatcatctgcgacatcaagttcagcgagctgacctacctggacgccttctggagagactacatcaacggcagcctgctggaggccctgaagggcgtgttcatcaccgacagcctgaagcaggccgtgggccacgaggccatcaagctgctggtgaacgtggacgaggaggactacgagctgggcagacagaagctgctgagaaacctgatgctgcaggccctgccctag

SEQ ID NO: 266852 - DNA, 1256 bp, Artificial Sequence
  derived and/or modified sequence
gggaaattaagtttcttgcggagtacggtggggattgcagctgctgagcagggattctggaaagcattgcgtacctgagcccccagcatggcgggcctaaagcggcgggcaagccaggtgtggccagaagagcatggtgagcaggaacatgggctgtacagcctgcaccgcatgtttgacatcgtgggcactcatctgacacacagagatgtgcgcgtgctttctttcctctttgttgatgtcattgatgaccacgagcgtggactcatccgaaatggacgtgacttcttattggcactggagcgccagggccgctgtgatgaaagtaactttcgccaggtgctgcagctgctgcgcatcatcactcgccacgacctgctgccctacgtcaccctcaagaggagacgggctgtgtgccctgatcttgtagacaagtatctggaggagacatcaattcgctatgtgacccccagagccctcagtgatccagaaccaaggcctccccagccctctaaaacagtgcctccccactatcctgtggtgtgttgccccacttcgggtcctcagatgtgtagcaagcggccagcccgagggagagccacacttgggagccagcgaaaacgccggaagtcagtgacaccagatcccaaggagaagcagacatgtggtgaggaagttcaagggttccagagatggagcagacttgaaggagaatataaagaactgctgggacactgggcagtttatgctattcagtacatcagactgcgggttcgggctgaatactgccagcatgagactgctctgcagggcaatgtcttctctaacaagcaggacccacttgagcgccagtttgagcgctttaaccaggccaacaccatcctcaagtcccgggacctgggctccatcatctgtgacatcaagttctctgagctcacctacctcgatgcattctggcgtgactacatcaatggctctttattagaggcacttaaaggtgtcttcatcacagactccctcaagcaagctgtgggccatgaagccatcaagctgctggtaaatgtagacgaggaggactatgagctgggccgacagaaactcctgaggaacttgatgctgcaagcattgccctgacctattccctcttctcactttggggactgttcccatcacccacctctggagcttacactgttctggggtttgttctctacccttccaaccaatcacacccctgccttttttttttttttttt

SEQ ID NO: 266853 - DNA, 2452 bp, Artificial Sequence
  derived and/or modified sequence
cgcccgcctgtcccctcccccacggccgcggcggcggcggcggcggcggctgctggagcccggatgcggcgccgtgaggcaggcccgggagagcggcgcggatggatccaacatggcggcgccgagcctgagccgagagaagagacctgggaaattaagtttcttgcggagtacggtggggattgcagctgctgagcagggattctggaaagcattgcgtacctgagcccccagcatggcgggcctaaagcggcgggcaagccaggtgtggccagaagagcatggtgagcaggaacatgggctgtacagcctgcaccgcatgtttgacatcgtgggcactcatctgacacacagagatgtgcgcgtgctttctttcctctttgttgatgtcattgatgaccacgagcgtggactcatccgaaatggacgtgacttcttattggcactggagcgccagggccgctgtgatgaaagtaactttcgccaggtgctgcagctgctgcgcatcatcactcgccacgacctgctgccctacgtcaccctcaagaggagacgggctgtgtgccctgatcttgtagacaagtatctggaggagacatcaattcgctatgtgacccccagagccctcagtgatccagaaccaaggcctccccagccctctaaaacagtgcctccccactatcctgtggtgtgttgccccacttcgggtcctcagatgtgtagcaagcggccagcccgagggagagccacacttgggagccagcgaaaacgccggaagtcagtgacaccagatcccaaggagaagcagacatgtggtgaggaagttcaagggttccagagatggagcagacttgaaggagaatataaagaactgctgggacactgggcagtttatgctattcagtacatcagactgcgggttcgggctgaatactgccagcatgagactgctctgcagggcaatgtcttctctaacaagcaggacccacttgagcgccagtttgagcgctttaaccaggccaacaccatcctcaagtcccgggacctgggctccatcatctgtgacatcaagttctctgagctcacctacctcgatgcattctggcgtgactacatcaatggctctttattagaggcacttaaaggtgtcttcatcacagactccctcaagcaagctgtgggccatgaagccatcaagctgctggtaaatgtagacgaggaggactatgagctgggccgacagaaactcctgaggaacttgatgctgcaagcattgccctgacctattccctcttctcactttggggactgttcccatcacccacctctggagcttacactgttctggggtttgttctctacccttccaaccaatcacacccctgcctttttttttttttttttaaagaaaaagacaaaagaaagtggaagtggtattccccacccctccctgcacccatgtgcctgggcttcccctttatttcccttttccatttaccccgtaatgtgtctctacagctaccttaccactgagccgtaagacaaatgtataggaagaagcaaagtctacagcacatagtctttgtaagggattgatgtgaacacttttttttggatgcactaaggagttatcaatacttctggctttatgagagctcttaaattttgtctaaaaaaccaaagggctgtgagtaagggagctatgtggaaagtgggactctgaagtgtattttgaaaattaatcgccaccctcttccaaattatagaattttttaaaaacaagctgtggccctttccactctctcctggcctctggtgctgctcctctctgccgcctttcctccattccatggcttgaaacctctgcctgatgtggctccttcctttttcccatttgtcaaaccctcttcaaaggaggaacagataagactgggtcagcctagtcatgcctcccaactgtggtggtatatgtgtacacacatacacagggtggatggagaagaggttgctgattaaaatacactccccctataaaggggaagggggagtgtgacactttctttccatgttcaagtgaaaataaataatgtaccctgcagcccttttcccctttgctttcttctggcttgggcaaagggcatcataggtgtaagtgaagtaattcctttttccttccccctcctccactcctacgcccactcccatgcttgggagaatggggctgggacatgcactgagtgttgcacttttatttaggtagggaggcatgttgaatgagccaggaggtctagaactggagcttagtccagctggtacaataccaactccccttctagttcccaaaggcgatgtccagacacagactttatgattattatatttttcaatgccagtgctgctcagccctcagcagaacttcagtttccatgaaataaacaatgactatataaaa

SEQ ID NO: 266854 - protein, 1158 aa, Artificial Sequence
  derived and/or modified sequence
MATRKDTEEEQVVPSEEDEANVRAVQAHYLRSPSPSQYSMVSDAETESIFMEPIHLSSAIAAKQIINEELKPPGVRADAECPGMLESAEQLLVEDLYNRVREKMDDTSLYNTPCVLDLQRALVQDRQEAPWNEVDEVWPNVFIAEKSVAVNKGRLKRLGITHILNAAHGTGVYTGPEFYTGLEIQYLGVEVDDFPEVDISQHFRKASEFLDEALLTYRGKVLVSSEMGISRSAVLVVAYLMIFHNMAILEALMTVRKKRAIYPNEGFLKQLRELNEKLMEEREEDYGREGGSAEAEEGEGTGSMLGARVHALTVEEEDDSASHLSGSSLGKATQASKPLTLIDEEEEEKLYEQWKKGQGLLSDKVPQDGGGWRSASSGQGGEELEDEDVERIIQEWQSRNERYQAEGYRRWGREEEKEEESDAGSSVGRRRRTLSESSAWESVSSHDIWVLKQQLELNRPDHGRRRRADSMSSESTWDAWNERLLEIEKEASRRYHAKSKREEAADRSSEAGSRVREDDEDSVGSEASSFYNFCSRNKDKLTALERWKIKRIQFGFHKKDLGAGDSSGEPGAEEAVGEKNPSDVSLTAYQAWKLKHQKKVGSENKEEVVELSKGEDSALAKKRQRRLELLERSRQTLEESQSMASWEADSSTASGSIPLSAFWSADPSVSADGDTTSVLSTQSHRSHLSQAASNIAGCSTSNPTTPLPNLPVGPGDTISIASIQNWIANVVSETLAQKQNEMLLLSRSPSVASMKAVPAASCLGDDQVSMLSGHSSSSLGGCLLPQSQARPSSDMQSVLSCNTTLSSPAESCRSKVRGTSKPIFSLFADNVDLKELGRKEKEMQMELREKMSEYKMEKLASDNKRSSLFKKKKVKEDEDDGVGDGDEDTDSAIGSFRYSSRSNSQKPETDTCSSLAVCDHYASGSRVGKEMDSSINKWLSGLRTEEKPPFQSDWSGSSRGKYTRSSLLRETESKSSSYKFSKSQSEEQDTSSYHEANGNSVRSTSRFSSSSTREGREMHKFSRSTYNETSSSREESPEPYFFRRTPESSEREESPEPQRPNWARSRDWEDVEESSKSDFSEFGAKRKFTQSFMRSEEEGEKERTENREEGRFASGRRSQYRRSTDREEEEEMDDEAIIAAWRRRQEETRTKLQKRRED

SEQ ID NO: 266855 - DNA, 3477 bp, Artificial Sequence
  derived and/or modified sequence
atggccaccagaaaggacaccgaggaggagcaggtggtgcccagcgaggaggacgaggccaacgtgagagccgtgcaggcccactacctgagaagccccagccccagccagtacagcatggtgagcgacgccgagaccgagagcatcttcatggagcccatccacctgagcagcgccatcgccgccaagcagatcatcaacgaggagctgaagccccccggcgtgagagccgacgccgagtgccccggcatgctggagagcgccgagcagctgctggtggaggacctgtacaacagagtgagagagaagatggacgacaccagcctgtacaacaccccctgcgtgctggacctgcagagagccctggtgcaggacagacaggaggccccctggaacgaggtggacgaggtgtggcccaacgtgttcatcgccgagaagagcgtggccgtgaacaagggcagactgaagagactgggcatcacccacatcctgaacgccgcccacggcaccggcgtgtacaccggccccgagttctacaccggcctggagatccagtacctgggcgtggaggtggacgacttccccgaggtggacatcagccagcacttcagaaaggccagcgagttcctggacgaggccctgctgacctacagaggcaaggtgctggtgagcagcgagatgggcatcagcagaagcgccgtgctggtggtggcctacctgatgatcttccacaacatggccatcctggaggccctgatgaccgtgagaaagaagagagccatctaccccaacgagggcttcctgaagcagctgagagagctgaacgagaagctgatggaggagagagaggaggactacggcagagagggcggcagcgccgaggccgaggagggcgagggcaccggcagcatgctgggcgccagagtgcacgccctgaccgtggaggaggaggacgacagcgccagccacctgagcggcagcagcctgggcaaggccacccaggccagcaagcccctgaccctgatcgacgaggaggaggaggagaagctgtacgagcagtggaagaagggccagggcctgctgagcgacaaggtgccccaggacggcggcggctggagaagcgccagcagcggccagggcggcgaggagctggaggacgaggacgtggagagaatcatccaggagtggcagagcagaaacgagagataccaggccgagggctacagaagatggggcagagaggaggagaaggaggaggagagcgacgccggcagcagcgtgggcagaagaagaagaaccctgagcgagagcagcgcctgggagagcgtgagcagccacgacatctgggtgctgaagcagcagctggagctgaacagacccgaccacggcagaagaagaagagccgacagcatgagcagcgagagcacctgggacgcctggaacgagagactgctggagatcgagaaggaggccagcagaagataccacgccaagagcaagagagaggaggccgccgacagaagcagcgaggccggcagcagagtgagagaggacgacgaggacagcgtgggcagcgaggccagcagcttctacaacttctgcagcagaaacaaggacaagctgaccgccctggagagatggaagatcaagagaatccagttcggcttccacaagaaggacctgggcgccggcgacagcagcggcgagcccggcgccgaggaggccgtgggcgagaagaaccccagcgacgtgagcctgaccgcctaccaggcctggaagctgaagcaccagaagaaggtgggcagcgagaacaaggaggaggtggtggagctgagcaagggcgaggacagcgccctggccaagaagagacagagaagactggagctgctggagagaagcagacagaccctggaggagagccagagcatggccagctgggaggccgacagcagcaccgccagcggcagcatccccctgagcgccttctggagcgccgaccccagcgtgagcgccgacggcgacaccaccagcgtgctgagcacccagagccacagaagccacctgagccaggccgccagcaacatcgccggctgcagcaccagcaaccccaccacccccctgcccaacctgcccgtgggccccggcgacaccatcagcatcgccagcatccagaactggatcgccaacgtggtgagcgagaccctggcccagaagcagaacgagatgctgctgctgagcagaagccccagcgtggccagcatgaaggccgtgcccgccgccagctgcctgggcgacgaccaggtgagcatgctgagcggccacagcagcagcagcctgggcggctgcctgctgccccagagccaggccagacccagcagcgacatgcagagcgtgctgagctgcaacaccaccctgagcagccccgccgagagctgcagaagcaaggtgagaggcaccagcaagcccatcttcagcctgttcgccgacaacgtggacctgaaggagctgggcagaaaggagaaggagatgcagatggagctgagagagaagatgagcgagtacaagatggagaagctggccagcgacaacaagagaagcagcctgttcaagaagaagaaggtgaaggaggacgaggacgacggcgtgggcgacggcgacgaggacaccgacagcgccatcggcagcttcagatacagcagcagaagcaacagccagaagcccgagaccgacacctgcagcagcctggccgtgtgcgaccactacgccagcggcagcagagtgggcaaggagatggacagcagcatcaacaagtggctgagcggcctgagaaccgaggagaagccccccttccagagcgactggagcggcagcagcagaggcaagtacaccagaagcagcctgctgagagagaccgagagcaagagcagcagctacaagttcagcaagagccagagcgaggagcaggacaccagcagctaccacgaggccaacggcaacagcgtgagaagcaccagcagattcagcagcagcagcaccagagagggcagagagatgcacaagttcagcagaagcacctacaacgagaccagcagcagcagagaggagagccccgagccctacttcttcagaagaacccccgagagcagcgagagagaggagagccccgagccccagagacccaactgggccagaagcagagactgggaggacgtggaggagagcagcaagagcgacttcagcgagttcggcgccaagagaaagttcacccagagcttcatgagaagcgaggaggagggcgagaaggagagaaccgagaacagagaggagggcagattcgccagcggcagaagaagccagtacagaagaagcaccgacagagaggaggaggaggagatggacgacgaggccatcatcgccgcctggagaagaagacaggaggagaccagaaccaagctgcagaagagaagagaggactag

SEQ ID NO: 266856 - DNA, 3477 bp, Artificial Sequence
  derived and/or modified sequence
atggcaacccggaaggatacagaggaggagcaggtagtgccttccgaggaagacgaggcaaacgtgcgagctgtgcaggctcactaccttcgctctcccagcccgtcccagtactctatggtatctgacgcggaaacagagtctatttttatggaacccattcatctaagttcagcaatcgctgccaaacaaattatcaacgaagaactgaagcctcctggagtgagagccgatgccgaatgccctggcatgctcgagagcgccgaacagttacttgttgaggacttgtacaatagagtgcgcgaaaagatggatgatacttctctctacaataccccctgtgtgctggatctacaacgcgctctggtccaggatcgacaggaggcaccctggaatgaagttgacgaagtctggcctaatgtattcattgctgaaaagtctgtggctgtgaacaaggggagattgaaacggcttggcatcacccacattctgaacgcggcccatgggaccggtgtgtacactgggcccgagttctacactggactggaaatccaatatctgggcgtggaggttgatgatttcccggaggtggatataagccagcacttcaggaaggcctcagagttcctggatgaggccctgctcacctaccgcgggaaggtgctcgtttcctctgagatgggtatttctcgctctgcagtactggttgtggcctatctgatgatcttccacaacatggcaattctcgaggctctgatgacagtcaggaagaaaagagccatttaccctaatgaggggttcttgaagcaactgcgtgagttaaacgagaaactgatggaagaacgcgaggaagattacgggcgcgaaggcggcagtgcagaggctgaggagggggaggggaccggttctatgctgggcgcccgcgttcatgcattgactgtggaggaggaggacgactccgcatcacacctctccggtagctccctgggaaaagccacacaggcctcaaagccactgacactgatcgatgaagaagaggaggaaaaactgtatgaacaatggaagaagggccagggtctattatccgataaggtgccgcaagacggtgggggatggcggagtgcaagtagcggccaggggggcgaggaattggaagatgaggatgtcgagcgtattatccaggaatggcagagccggaacgaacggtatcaggcagaagggtacaggcgttggggcagagaggaagagaaggaggaagaatccgacgctggaagctcagtgggaagacgccgtagaactctgtccgaatcttctgcttgggagtctgtgtcatctcacgatatctgggttctgaaacagcagctcgagctcaaccggcctgaccatggacgccgtagaagagcagactcgatgtctagtgagagtacctgggacgcatggaacgaacgtcttttggagattgaaaaggaggccagccggagataccacgccaagtctaagagagaagaagccgccgaccgctcctccgaagctggaagtcgcgtgcgagaagacgatgaggacagtgtgggtagtgaggcgtctagcttctacaacttttgtagcagaaacaaagataagctgaccgccctcgaaagatggaaaattaaacgcatccaattcgggtttcataaaaaggatctaggtgcaggggactcctcaggagaacctggcgcggaggaggcagtgggtgaaaaaaacccatcagatgtgagcctcacggcataccaagcatggaaactcaaacatcagaagaaagtcggctcggagaacaaggaggaggttgttgaactgagcaagggcgaggattctgctctggccaaaaagcgccagcgcaggctcgagctgctggagaggtcccgccaaacattggaggaatcacaatccatggcctcatgggaggcagatagctctacggcatcgggctcgatcccgctgtctgcattttggagcgccgaccccagcgtgagcgccgatggggatacaacctccgttctatcgacacaaagccacaggtcccatctgtcgcaggcagcttcgaacattgctggatgcagcacttcaaatcctactaccccgttacccaatcttccggtgggtcctggggatactatctctattgcaagtatccagaactggattgctaatgtcgtttctgaaaccctcgcacaaaaacagaatgaaatgctccttctctccaggtccccctccgttgctagcatgaaagctgtccctgctgcaagctgtctcggtgatgatcaggtgtctatgttgtcgggccatagctcctcttctcttggtggctgcctcctgcctcaatcacaggccaggccctcctctgatatgcaatctgtgctctcatgcaacaccactctgagttcacccgcagagagctgccgcagcaaggtgcgtggtacaagcaaaccaatcttttcgctctttgccgacaacgtagacctgaaagagctgggccgaaaggaaaaggagatgcagatggagctgagggagaaaatgagcgagtataagatggagaaactggcaagtgacaataaacgatcctctctattcaaaaagaaaaaagtgaaagaggatgaagacgatggcgttggcgacggagacgaagacacagacagcgcaatcggcagcttcaggtatagtagcaggagtaattcccagaagcccgaaaccgatacctgctcaagtctggccgtgtgcgatcactatgctagtggttccagggttggcaaagaaatggattcctctattaataagtggctcagcggcctgaggactgaagagaaacccccttttcaaagcgattggtctggcagcagcagaggtaagtacaccagaagttccctcctccgagagaccgagagcaagtccagctcatataagttctcgaagtctcagtctgaggagcaggatacctcaagttatcatgaagccaatggaaacagcgtccgtagcacatctcgcttttcttccagtagtacacgggagggccgtgagatgcacaaatttagtcggtctacctataacgaaacatcatccagtagagaggaaagcccagaaccatacttctttcgtagaacgcccgagtcttcggagcgagaggaatcacctgaaccacaaagacccaactgggcccgctcacgggattgggaggacgtggaggagtctagtaagtcggattttagtgagtttggcgcaaagaggaaatttacacagtcctttatgagaagcgaagaggaaggcgaaaaggagcgcactgagaaccgagaggaaggcagattcgcctcaggaaggagatcgcagtaccggaggtcaacagatagggaagaggaagaggagatggacgacgaggctattatcgccgcgtggagacgccgccaggaggaaacacgtacaaagttacaaaaacgcagagaggactag

SEQ ID NO: 266857 - DNA, 3477 bp, Artificial Sequence
  derived and/or modified sequence
atggcaacacgcaaggacaccgaggaggaacaggtcgtcccctccgaggaagacgaggctaacgtacgcgctgtgcaggcacattacctgaggagtccaagcccatcccagtattcaatggtgtctgacgcagagactgaatccatttttatggaacccatccacttgtctagtgctatagctgcaaaacagataattaacgaagaattgaaaccccctggggtgcgggcggacgctgagtgccctgggatgttagaaagcgccgaacagctcttagtcgaagatctatataatcgcgttcgcgagaagatggacgacacaagtctctacaacacaccttgtgtgttggacctgcagcgagctctggtgcaagacagacaagaagcaccgtggaatgaagtggatgaggtgtggcctaatgtgtttattgcagagaagagcgtggctgtgaataaaggaagactaaaacgcctgggaatcacacacatcctgaacgccgctcacggcaccggggtttatacggggcccgaattctacaccggattggaaatccaatatttgggggtcgaggtagacgattttcccgaggtggacattagtcaacatttccggaaagcctccgagtttctcgacgaagccttgttgacctaccggggcaaggtcttagtaagcagcgaaatggggatttcacgctccgccgtgctggtcgtcgcgtacctgatgattttccacaacatggccattttggaggccctgatgacggttagaaagaagcgagctatttatcctaatgaggggtttcttaaacagctgcgcgagttaaatgaaaaactaatggaggaaagagaagaagattatgggcgcgaggggggctcggccgaagctgaggagggtgagggtacaggcagcatgctcggtgccagggtacacgccctcactgtcgaagaggaagacgatagtgccagccacctgagcggctcctccctgggaaaagccacacaggcatcaaagccacttacactaattgatgaagaagaggaggaaaaactgtacgaacagtggaaaaaggggcagggcctgctgagcgataaagtcccacaagacgggggcggctggcggtcggcctcctcaggtcagggtggtgaagaactggaggacgaagacgtcgaaaggatcatccaggagtggcaaagtagaaatgaacgctatcaggcagaagggtatcgtaggtgggggagagaagaggaaaaggaggaagagagtgatgccggatcttctgtggggcgcagacggcgcacccttagcgagagctccgcttgggaatctgtgtcctcccatgacatatgggttcttaagcagcagttggaacttaaccgtcccgaccatgggcggcggagaagggctgacagcatgtcatccgaaagtacatgggacgcttggaacgagaggctactggagatcgaaaaggaggccagccgacggtatcacgccaaatccaagagggaggaagctgcggataggtcaagcgaagccggatcccgtgttcgagaagacgatgaggatagtgtcgggtccgaggcatcctccttttacaacttttgcagtagaaataaggacaagctgaccgctctggaaaggtggaaaatcaagagaatccagttcgggttccacaagaaagacctgggcgctggtgattcatccggggaacctggagctgaagaagcggtcggtgagaagaacccctctgatgtatctcttaccgcttaccaggcgtggaagttaaagcaccagaaaaaggttggttccgagaacaaggaagaagttgtagaactgagcaaaggcgaggattcagctcttgctaagaagcggcagcgccgactcgagctcctggaaaggtctaggcagacccttgaggagagccaatccatggcctcttgggaggctgactccagcactgcgtctgggtcaatcccccttagcgccttctggtccgcggatccctcagtctcagccgatggcgacacaaccagcgttctgagcactcagtcgcataggtcacacctgagccaggctgcctccaacattgccggatgctccacttctaatcctaccactccactaccgaatttacccgtaggccccggcgatacaatttccattgcatccatccagaactggatcgcgaacgtggtcagcgagactttggcgcaaaagcagaacgagatgctgttgctgtcccgcagcccttcagttgccagtatgaaagccgtgcccgccgccagctgtctcggtgacgaccaggtcagcatgctgtccggccacagttccagcagcctgggaggatgtctcctcccacagtcccaagctcgtccaagttctgacatgcagtctgtgctctcatgcaacactaccctttcttcccccgcagaaagctgcaggtctaaggtgagggggacgagcaaaccaattttcagtctgtttgcagacaacgtggacttaaaagagcttggtaggaaagaaaaggagatgcagatggaacttcgcgagaaaatgtccgagtacaaaatggagaaactcgctagcgataataagcgcagttcccttttcaaaaagaaaaaagtcaaagaggacgaagatgatggggtcggtgatggcgatgaggacactgactctgccatcggctcattccgctattcctctcggagcaacagccagaaaccagaaactgatacatgttcttccctagctgtctgcgaccattatgcatctggatccagagttggcaaggaaatggacagctccataaacaagtggcttagtggactgcgcacagaggaaaagcccccctttcagagtgattggagcggatcttctcgcggaaagtacacaaggtcaagcttactgcgtgagactgaaagtaagtcttcctcatataaattttctaagagccagtcagaagagcaggataccagctcttaccatgaagccaatggcaattctgtgagatccacttctagattttcttcaagcagcacgcgggaaggccgagagatgcacaaattctctagaagcacgtacaacgagacatcctcgtccagagaggagtcaccagaaccctacttcttccgccgcactcccgagtctagtgaacgcgaggaaagtcctgagccgcaaagacctaattgggcccgatcccgtgactgggaggacgtggaagaaagtagcaaaagcgactttagtgaattcggagctaagcgaaagtttacgcaaagcttcatgcgctctgaagaagagggagagaaggaaaggaccgaaaatcgtgaggaaggcagattcgcaagtggaaggaggtcacagtaccgacggagcaccgacagggaggaagaagaggaaatggatgatgaggccataattgccgcttggaggcgacggcaagaggaaacaaggactaaactgcagaagcgtcgcgaagactag

SEQ ID NO: 266858 - DNA, 3477 bp, Artificial Sequence
  derived and/or modified sequence
atggccactagaaaggatacagaggaggaacaggtcgtaccttccgaggaggacgaggccaacgtgcgggcggtgcaggctcactatttgcgaagtccctctccatctcagtacagcatggtgtcagatgccgagacagagtctatatttatggagccaattcacctctcttcggcaattgctgctaaacagatcatcaatgaggagcttaaacccccaggtgtaagagcagacgctgaatgtccaggaatgctggaatctgccgagcaactattggtcgaggacctctacaatagggtgcgcgagaagatggacgatacttcactgtacaataccccgtgtgttttggacctgcagagggctctcgttcaggacaggcaagaggccccatggaatgaggtcgatgaggtatggcccaacgtgtttatcgcggagaaatctgtggcggtcaacaaaggacgcctgaagagattgggcattacccacatcttaaatgctgcacacgggacaggggtgtatactggcccagagttctatacgggcttggagatccagtatctgggcgttgaggttgacgactttcccgaagtggatatttctcagcactttaggaaggcgtccgagttcctggacgaggccctcctaacgtaccggggcaaggtactcgtgagcagcgagatgggcattagcagaagtgccgtcctggtggtggcatacctgatgattttccataacatggctatcctggaagccctgatgaccgtccgcaagaaacgcgccatctacccaaacgagggcttcctgaagcagctgcgcgaattaaacgagaagctgatggaggaaagagaagaagactacgggcgagaggggggatctgccgaggcagaggaaggcgaggggactggatccatgctcggggcccgcgtgcatgccttgacggtggaggaagaagacgactcagccagccacctatctggctcatccctgggaaaggcgacacaggcttccaaacctcttaccctaatcgacgaagaggaggaagagaaactctacgaacagtggaaaaaaggccaaggactgctgagtgataaggtccctcaggatggcgggggatggcggtccgcatcttcgggccagggaggcgaagaactagaagacgaagacgttgagcggatcatccaggaatggcagtcacggaatgagcgctaccaggcggaggggtacagacgatggggccgggaagaggagaaagaggaggagtcagacgcgggttcttcagtcggcagacggcggcgcaccctaagcgaaagtagtgcctgggaaagcgtgagcagccatgatatttgggttctgaagcaacagctggaactgaatcggcctgatcacggccggagaaggagagctgacagtatgagtagtgagtccacgtgggatgcttggaacgagcggctgttggaaatcgagaaggaagcctcacggcgttaccacgccaaatctaagagggaagaagcagcagatagatcatccgaagctggaagccgggtaagagaagacgacgaggactctgtcggcagcgaggcaagcagcttctacaacttctgtagtcgcaacaaagacaagttaaccgcattggagcgctggaagataaagaggatccagttcggctttcacaagaaagacctcggcgccggcgattccagcggcgaacctggcgcagaagaggctgtaggagagaagaatcccagtgacgtatcactcactgcttatcaggcttggaaattaaaacatcagaaaaaggtgggcagcgagaacaaagaggaggtcgtggagctgtcaaaaggcgaagactccgccttggcaaaaaagcgacagcggcgcctggagctgcttgagcgtagcagacagacactggaggagtcacagtcaatggcaagttgggaggctgatagttccacggcatctggatcgattccattgagtgcattctggtctgctgacccttcagtgtccgccgacggagacaccacatccgtcctgtctacacagtcacataggtcccatctgagtcaggccgcatctaatattgccgggtgctccacaagcaatccaactacacccctacccaatctgccggtagggcctggtgacactatcagcatagctagtatccaaaattggattgccaatgtcgtgtccgaaaccctggcccaaaagcagaacgaaatgctgcttctgagccgaagccccagcgtggcatccatgaaagccgttcctgcagcaagttgcttaggcgatgaccaggtgagcatgctctccggccactcaagcagctcgttgggtggctgtctcctccctcagagccaggcaaggccttcaagtgatatgcaatcagtcctatcttgcaatacaaccctttcttcacccgccgaatcatgccgctccaaggttaggggaacctccaagccaattttctcattgttcgccgacaatgtggatctgaaggagctggggaggaaggagaaggagatgcaaatggagctgagggagaagatgtcagaatacaagatggaaaaactggccagtgacaacaagagatcttcactcttcaagaagaaaaaggtaaaggaggacgaggatgacggggttggtgacggcgacgaagacacagactctgccattggatcctttcgatattcatcacgcagcaattctcagaaacccgagacagatacgtgctccagtctggccgtgtgcgaccactatgctagtggatccagagtgggcaaagaaatggactcaagcatcaataaatggttgtccggacttcgcaccgaggagaagccgcccttccaatcggattggtccggttcctcacgcggcaaatatactcggtcttcccttctccgggaaacagagagcaagtcgtcctcctacaaattttctaagagtcagtctgaagagcaggacacctcttcttatcacgaggccaatggtaattccgtgcgtagcacatcacgtttttcatcaagtagtactagagagggccgtgagatgcacaagttttcacgaagcacgtacaacgagacaagttcaagccgtgaggagtcacctgaaccatatttcttccggcgcacaccagagtccagcgagcgggaggagagcccagagccacagcggcccaactgggcccgatctagggactgggaggacgtggaggagagcagcaaaagtgacttttctgagttcggagccaagagaaagtttacccagtctttcatgaggtctgaggaggagggagagaaagaacggacggaaaaccgtgaggagggccggttcgccagtggcagacgttcccagtacagacgctccacggatagggaagaagaggaggaaatggacgatgaagcgataatcgcagcatggcgcagacggcaggaggagactagaactaaactgcagaagagacgtgaggattag

SEQ ID NO: 266859 - DNA, 3597 bp, Artificial Sequence
  derived and/or modified sequence
atgacgcctgagccaaaggccctacctcctgtggccttggttagagacaccgaaggccagctgtgtcttccccagcagagacaaaggtgtgcgcatgggcatagaggttggcaggttgtcatggcgaccagaaaggacacagaggaggagcaggtagtcccaagcgaggaggacgaagccaacgtgagggcggtgcaggcccactacctccgaagcccctcccctagccagtattcgatggtctcagatgcagaaacagaaagcattttcatggaacccattcacctctcctcagccattgcagccaaacagatcatcaatgaagaactcaagccaccgggggtcagagcagacgcagagtgtccaggcatgctggagtctgctgaacagctgctggtggaggacctgtacaaccgcgtcagggagaagatggatgacaccagcctctataatacgccctgtgtcctggacctacagcgggccctggttcaggatcgccaagaggcgccctggaatgaggtggatgaggtctggcccaatgtcttcatagctgagaagagtgtggctgtgaacaaggggaggctgaagaggctgggaatcacccacattctgaatgctgcgcatggcaccggcgtttacactggccccgaattctacactggcctggagatccagtacctgggtgtagaggtggatgactttcctgaggtggacatttcccagcatttccggaaggcgtctgagttcctggatgaggcgctgctgacttacagagggaaagtcctggtcagcagcgaaatgggcatcagccggtcagcagtgctggtggtcgcctacctgatgatcttccacaacatggccatcctggaggctttgatgaccgtgcgtaagaagcgggccatctaccccaatgagggcttcctgaagcagctgcgggagctcaatgagaagttgatggaggagagagaagaggactatggccgggaggggggatcagctgaggctgaggagggcgagggcactgggagcatgctcggggccagagtgcacgccctgacggtggaagaggaggacgacagcgccagccacctgagtggctcctccctggggaaggccacccaggcctccaagcccctcaccctcatagacgaggaggaggaggagaaactgtacgagcagtggaagaaggggcagggcctcctctcagacaaggtcccccaggatggaggtggctggcgctcagcctcctctggccagggtggggaggagctcgaggacgaggacgtggagaggatcatccaggagtggcagagccgaaacgagaggtaccaagcagaagggtaccggaggtggggaagggaggaggagaaggaggaggagagcgacgctggctcctcggtggggaggcggcggcgcaccctgagcgagagcagcgcctgggagagcgtgagcagccacgacatctgggtcctgaagcagcagctggagctgaaccgcccggaccacggcaggaggcgccgcgcagactcgatgtcctcggagagcacctgggacgcatggaacgagaggctgctggagattgagaaggaggcttcccggaggtaccacgccaagagcaagagagaggaggcggcagacaggagctcagaagcagggagcagggtgcgggaggatgatgaggacagcgtgggctctgaggccagttccttctacaacttctgcagcaggaacaaggacaagctcactgccctggaaagatggaagatcaagagaatccaatttggatttcacaagaaagacttgggagcgggagacagcagcggtgagcccggtgcagaggaggcagtaggggagaagaacccctccgacgtcagcctgacagcctaccaggcctggaagctgaaacaccagaagaaggtgggcagtgagaacaaggaggaggtggtggagctcagcaagggggaggactcggccttggctaagaagagacaacggaggctggagctgctggagagaagccggcagacgctggaggagagccagtctatggcaagctgggaggcggacagctccacggccagcgggagcattcccctgtctgcgttctggtctgcagacccctcagtcagcgctgatggggacacgacgtcagtactgagcacccagagccaccgctcccacctgtctcaggctgcaagcaacatagcggggtgttcaacctccaaccccaccacacccctgcctaacctgccagtggggcctggagacaccatttccattgccagtatccagaactggattgccaatgtagtcagtgagacccttgctcagaagcaaaatgaaatgctgctgttgtcccgctcaccgtctgttgcaagcatgaaggcagtaccagcggctagctgcctgggggatgaccaagtctccatgcttagtggacacagcagctcctccttgggtggctgcctgttgcctcagagccaggcaagacccagctctgacatgcagtctgtgctgtcctgcaacaccacactgagctcacccgcggaaagttgcagaagcaaagtgagggggaccagcaagcccatcttcagcctctttgctgacaatgtggacctaaaggaacttggccggaaggagaaggagatgcagatggagcttagggagaagatgtctgagtacaaaatggaaaagctggcctcagacaacaaacgcagctccctcttcaagaagaagaaggtcaaggaagatgaggatgatggtgtgggtgatggggatgaggacactgacagtgccatagggagcttccgatattcttcccgcagtaattcccagaaacctgaaacagacacatgctcctccctggctgtctgtgatcactatgcaagtggcagcagagttggcaaagagatggatagcagtattaataagtggctcagtggcctcaggacggaggaaaaacctcctttccaaagtgactggtctggaagttccagagggaagtacaccagatcgtccctgctcagggagacagagtctaaatcctccagttacaagttttccaaatcccagtcagaggaacaggacacctcctcctaccacgaggcaaatggcaactctgtaagaagcacttcacggttctcatcttcctccaccagggagggcagagagatgcacaagttctccaggtccacgtacaacgagacctcaagttcccgagaggagagcccagagccctacttcttccgccggaccccagagtcctcagaaagggaagagtccccagaaccacagcgcccaaattgggccaggtccagggactgggaagatgtggaagagtcatccaagtcagacttctctgaatttggagccaagaggaagttcacccagagctttatgaggtctgaagaagagggagagaaagagaggacagaaaacagagaagaagggaggtttgcatctggacggcggtcccagtatcggagaagcactgacagggaggaagaggaagaaatggacgatgaagccatcattgctgcttggagacgccggcaagaagaaaccaggaccaagctgcagaaaaggagggaggactga

SEQ ID NO: 266860 - DNA, 4164 bp, Artificial Sequence
  derived and/or modified sequence
aggtttcctgttaacagctgtcctgcccctaggagaagaagccctgaggaaggaggtggctggttcctgtctcactggccggagcttcagcttcagtcatttcatctgggtccctcagcccttggtggggaacatccaggcaggttagagaggttggcaggttgtcatggcgaccagaaaggacacagaggaggagcaggtagtcccaagcgaggaggacgaagccaacgtgagggcggtgcaggcccactacctccgaagcccctcccctagccagtattcgatggtctcagatgcagaaacagaaagcattttcatggaacccattcacctctcctcagccattgcagccaaacagatcatcaatgaagaactcaagccaccgggggtcagagcagacgcagagtgtccaggcatgctggagtctgctgaacagctgctggtggaggacctgtacaaccgcgtcagggagaagatggatgacaccagcctctataatacgccctgtgtcctggacctacagcgggccctggttcaggatcgccaagaggcgccctggaatgaggtggatgaggtctggcccaatgtcttcatagctgagaagagtgtggctgtgaacaaggggaggctgaagaggctgggaatcacccacattctgaatgctgcgcatggcaccggcgtttacactggccccgaattctacactggcctggagatccagtacctgggtgtagaggtggatgactttcctgaggtggacatttcccagcatttccggaaggcgtctgagttcctggatgaggcgctgctgacttacagagggaaagtcctggtcagcagcgaaatgggcatcagccggtcagcagtgctggtggtcgcctacctgatgatcttccacaacatggccatcctggaggctttgatgaccgtgcgtaagaagcgggccatctaccccaatgagggcttcctgaagcagctgcgggagctcaatgagaagttgatggaggagagagaagaggactatggccgggaggggggatcagctgaggctgaggagggcgagggcactgggagcatgctcggggccagagtgcacgccctgacggtggaagaggaggacgacagcgccagccacctgagtggctcctccctggggaaggccacccaggcctccaagcccctcaccctcatagacgaggaggaggaggagaaactgtacgagcagtggaagaaggggcagggcctcctctcagacaaggtcccccaggatggaggtggctggcgctcagcctcctctggccagggtggggaggagctcgaggacgaggacgtggagaggatcatccaggagtggcagagccgaaacgagaggtaccaagcagaagggtaccggaggtggggaagggaggaggagaaggaggaggagagcgacgctggctcctcggtggggaggcggcggcgcaccctgagcgagagcagcgcctgggagagcgtgagcagccacgacatctgggtcctgaagcagcagctggagctgaaccgcccggaccacggcaggaggcgccgcgcagactcgatgtcctcggagagcacctgggacgcatggaacgagaggctgctggagattgagaaggaggcttcccggaggtaccacgccaagagcaagagagaggaggcggcagacaggagctcagaagcagggagcagggtgcgggaggatgatgaggacagcgtgggctctgaggccagttccttctacaacttctgcagcaggaacaaggacaagctcactgccctggaaagatggaagatcaagagaatccaatttggatttcacaagaaagacttgggagcgggagacagcagcggtgagcccggtgcagaggaggcagtaggggagaagaacccctccgacgtcagcctgacagcctaccaggcctggaagctgaaacaccagaagaaggtgggcagtgagaacaaggaggaggtggtggagctcagcaagggggaggactcggccttggctaagaagagacaacggaggctggagctgctggagagaagccggcagacgctggaggagagccagtctatggcaagctgggaggcggacagctccacggccagcgggagcattcccctgtctgcgttctggtctgcagacccctcagtcagcgctgatggggacacgacgtcagtactgagcacccagagccaccgctcccacctgtctcaggctgcaagcaacatagcggggtgttcaacctccaaccccaccacacccctgcctaacctgccagtggggcctggagacaccatttccattgccagtatccagaactggattgccaatgtagtcagtgagacccttgctcagaagcaaaatgaaatgctgctgttgtcccgctcaccgtctgttgcaagcatgaaggcagtaccagcggctagctgcctgggggatgaccaagtctccatgcttagtggacacagcagctcctccttgggtggctgcctgttgcctcagagccaggcaagacccagctctgacatgcagtctgtgctgtcctgcaacaccacactgagctcacccgcggaaagttgcagaagcaaagtgagggggaccagcaagcccatcttcagcctctttgctgacaatgtggacctaaaggaacttggccggaaggagaaggagatgcagatggagcttagggagaagatgtctgagtacaaaatggaaaagctggcctcagacaacaaacgcagctccctcttcaagaagaagaaggtcaaggaagatgaggatgatggtgtgggtgatggggatgaggacactgacagtgccatagggagcttccgatattcttcccgcagtaattcccagaaacctgaaacagacacatgctcctccctggctgtctgtgatcactatgcaagtggcagcagagttggcaaagagatggatagcagtattaataagtggctcagtggcctcaggacggaggaaaaacctcctttccaaagtgactggtctggaagttccagagggaagtacaccagatcgtccctgctcagggagacagagtctaaatcctccagttacaagttttccaaatcccagtcagaggaacaggacacctcctcctaccacgaggcaaatggcaactctgtaagaagcacttcacggttctcatcttcctccaccagggagggcagagagatgcacaagttctccaggtccacgtacaacgagacctcaagttcccgagaggagagcccagagccctacttcttccgccggaccccagagtcctcagaaagggaagagtccccagaaccacagcgcccaaattgggccaggtccagggactgggaagatgtggaagagtcatccaagtcagacttctctgaatttggagccaagaggaagttcacccagagctttatgaggtctgaagaagagggagagaaagagaggacagaaaacagagaagaagggaggtttgcatctggacggcggtcccagtatcggagaagcactgacagggaggaagaggaagaaatggacgatgaagccatcattgctgcttggagacgccggcaagaagaaaccaggaccaagctgcagaaaaggagggaggactgagctggggaaaatctgagaacactgaaagaaaccactcacgttagcatagggctcagggcacacgttgccaccactcatcgcaggatgaggatacagagaggatcttccagaggggcagagccaaaatgagaggtaccaagcataagggcagcagaggtggagtagggaggaggcaaggagggggagaaccatcaatacgaatacgaggtccgaatgcggaccaactgataccattttctgttgctcagcgccctctaagctttggtgtttcacttaatgtatttggcagtgttcatcacaggctagagaggtgagcttggaaaagcactgtagtttgtcagagactccagtttacatccagaaaggccatgaacataggacacgcttctgtctgtagaggcttcatatgagacccagaaagtctatcctatggcaagtctgacctctcctggcaatgctcagttctgatttttttttttttaatgttttgagtctccattaaaaatggtatgttggcaaat

SEQ ID NO: 266861 - DNA, 4034 bp, Artificial Sequence
  derived and/or modified sequence
atggcgaccagaaaggacacagaggaggagcaggtagtcccaagcgaggaggacgaagccaacgtgagggcggtgcaggcccactacctccgaagcccctcccctagccagtattcgatggtctcagatgcagaaacagaaagcattttcatggaacccattcacctctcctcagccattgcagccaaacagatcatcaatgaagaactcaagccaccgggggtcagagcagacgcagagtgtccaggcatgctggagtctgctgaacagctgctggtggaggacctgtacaaccgcgtcagggagaagatggatgacaccagcctctataatacgccctgtgtcctggacctacagcgggccctggttcaggatcgccaagaggcgccctggaatgaggtggatgaggtctggcccaatgtcttcatagctgagaagagtgtggctgtgaacaaggggaggctgaagaggctgggaatcacccacattctgaatgctgcgcatggcaccggcgtttacactggccccgaattctacactggcctggagatccagtacctgggtgtagaggtggatgactttcctgaggtggacatttcccagcatttccggaaggcgtctgagttcctggatgaggcgctgctgacttacagagggaaagtcctggtcagcagcgaaatgggcatcagccggtcagcagtgctggtggtcgcctacctgatgatcttccacaacatggccatcctggaggctttgatgaccgtgcgtaagaagcgggccatctaccccaatgagggcttcctgaagcagctgcgggagctcaatgagaagttgatggaggagagagaagaggactatggccgggaggggggatcagctgaggctgaggagggcgagggcactgggagcatgctcggggccagagtgcacgccctgacggtggaagaggaggacgacagcgccagccacctgagtggctcctccctggggaaggccacccaggcctccaagcccctcaccctcatagacgaggaggaggaggagaaactgtacgagcagtggaagaaggggcagggcctcctctcagacaaggtcccccaggatggaggtggctggcgctcagcctcctctggccagggtggggaggagctcgaggacgaggacgtggagaggatcatccaggagtggcagagccgaaacgagaggtaccaagcagaagggtaccggaggtggggaagggaggaggagaaggaggaggagagcgacgctggctcctcggtggggaggcggcggcgcaccctgagcgagagcagcgcctgggagagcgtgagcagccacgacatctgggtcctgaagcagcagctggagctgaaccgcccggaccacggcaggaggcgccgcgcagactcgatgtcctcggagagcacctgggacgcatggaacgagaggctgctggagattgagaaggaggcttcccggaggtaccacgccaagagcaagagagaggaggcggcagacaggagctcagaagcagggagcagggtgcgggaggatgatgaggacagcgtgggctctgaggccagttccttctacaacttctgcagcaggaacaaggacaagctcactgccctggaaagatggaagatcaagagaatccaatttggatttcacaagaaagacttgggagcgggagacagcagcggtgagcccggtgcagaggaggcagtaggggagaagaacccctccgacgtcagcctgacagcctaccaggcctggaagctgaaacaccagaagaaggtgggcagtgagaacaaggaggaggtggtggagctcagcaagggggaggactcggccttggctaagaagagacaacggaggctggagctgctggagagaagccggcagacgctggaggagagccagtctatggcaagctgggaggcggacagctccacggccagcgggagcattcccctgtctgcgttctggtctgcagacccctcagtcagcgctgatggggacacgacgtcagtactgagcacccagagccaccgctcccacctgtctcaggctgcaagcaacatagcggggtgttcaacctccaaccccaccacacccctgcctaacctgccagtggggcctggagacaccatttccattgccagtatccagaactggattgccaatgtagtcagtgagacccttgctcagaagcaaaatgaaatgctgctgttgtcccgctcaccgtctgttgcaagcatgaaggcagtaccagcggctagctgcctgggggatgaccaagtctccatgcttagtggacacagcagctcctccttgggtggctgcctgttgcctcagagccaggcaagacccagctctgacatgcagtctgtgctgtcctgcaacaccacactgagctcacccgcggaaagttgcagaagcaaagtgagggggaccagcaagcccatcttcagcctctttgctgacaatgtggacctaaaggaacttggccggaaggagaaggagatgcagatggagcttagggagaagatgtctgagtacaaaatggaaaagctggcctcagacaacaaacgcagctccctcttcaagaagaagaaggtcaaggaagatgaggatgatggtgtgggtgatggggatgaggacactgacagtgccatagggagcttccgatattcttcccgcagtaattcccagaaacctgaaacagacacatgctcctccctggctgtctgtgatcactatgcaagtggcagcagagttggcaaagagatggatagcagtattaataagtggctcagtggcctcaggacggaggaaaaacctcctttccaaagtgactggtctggaagttccagagggaagtacaccagatcgtccctgctcagggagacagagtctaaatcctccagttacaagttttccaaatcccagtcagaggaacaggacacctcctcctaccacgaggcaaatggcaactctgtaagaagcacttcacggttctcatcttcctccaccagggagggcagagagatgcacaagttctccaggtccacgtacaacgagacctcaagttcccgagaggagagcccagagccctacttcttccgccggaccccagagtcctcagaaagggaagagtccccagaaccacagcgcccaaattgggccaggtccagggactgggaagatgtggaagagtcatccaagtcagacttctctgaatttggagccaagaggaagttcacccagagctttatgaggtctgaagaagagggagagaaagagaggacagaaaacagagaagaagggaggtttgcatctggacggcggtcccagtatcggagaagcactgacagggaggaagaggaagaaatggacgatgaagccatcattgctgcttggagacgccggcaagaagaaaccaggaccaagctgcagaaaaggagggaggactgagctggggaaaatctgagaacactgaaagaaaccactcacgttagcatagggctcagggcacacgttgccaccactcatcgcaggatgaggatacagagaggatcttccagaggggcagagccaaaatgagaggtaccaagcataagggcagcagaggtggagtagggaggaggcaaggagggggagaaccatcaatacgaatacgaggtccgaatgcggaccaactgataccattttctgttgctcagcgccctctaagctttggtgtttcacttaatgtatttggcagtgttcatcacaggctagagaggtgagcttggaaaagcactgtagtttgtcagagactccagtttacatccagaaaggccatgaacataggacacgcttctgtctgtagaggcttcatatgagacccagaaagtctatcctatggcaagtctgacctctcctggcaatgctcagttctgatttttttttttttaatgttttgagtctccattaaaaatggtatgttggcaaatagttcttctttattctggtcatgtttaactttttgg

SEQ ID NO: 266862 - DNA, 3477 bp, Artificial Sequence
  derived and/or modified sequence
atggccaccaggaaggacacagaggaggagcaggtggtgcccagtgaagaagatgaggccaacgtgcgggctgtgcaggcccactacctgcggagccccagccccagccagtacagcatggtgtctgatgctgagacagagagcatcttcatggagcccatccacctgagcagcgccatcgccgccaagcagatcatcaatgaggagctgaagcccccaggagtgcgggcagatgctgagtgccccggcatgctggagagcgctgagcagctgctggtggaggacctgtacaacagagtgcgggagaagatggatgacaccagcctgtacaacaccccctgtgtgctggacctgcagagggccctggtgcaggaccggcaggaggccccctggaatgaggtggatgaggtgtggcccaacgtgttcatcgccgagaagtctgtggccgtgaacaagggccgcctgaagaggctgggcatcacccacatcctgaatgctgcccacggcaccggggtgtacacaggccctgagttctacacaggcctggagatccagtacctgggcgtggaggtggatgacttccctgaggtggacatcagccagcacttcaggaaggccagcgagttcctggatgaggccctgctgacctaccggggcaaggtgctggtgtcctctgagatgggcatcagccgctctgctgtgctggtggtggcctacctgatgatcttccacaacatggccatcctggaggccctgatgacagtgaggaagaagagggccatctacccaaatgaaggcttcctgaagcagctgcgggagctgaatgagaagctgatggaggagcgggaggaggactatggccgggagggcggcagcgctgaggccgaggagggggagggcaccggctccatgctgggcgcccgggtgcacgccctgactgtggaggaggaggatgacagcgccagccacctgagcggcagcagcctgggcaaggccacccaggccagcaagcccctgaccctgattgatgaggaggaggaggagaagctgtatgagcagtggaagaagggccagggcctgctgagtgacaaggtgccccaggacggcggcggctggaggtctgccagcagcggccagggcggggaggagctggaggatgaagatgtggagcgcatcatccaggagtggcagagcagaaatgaaagataccaggccgagggctaccgccgctggggccgggaggaggagaaggaggaggagagtgatgctggcagctctgtgggcagaagaagaaggaccctgtctgagagcagcgcctgggagagcgtgagcagccatgacatctgggtgctgaagcagcagctggagctgaacagaccagaccacggcagaagaagaagagctgacagcatgagcagcgagagcacctgggatgcctggaatgaaaggctgctggagattgagaaggaggccagccgccgctaccacgccaagagcaagcgggaggaggccgctgacaggagcagcgaggccggcagccgggtgagagaagatgatgaggacagcgtgggcagcgaggccagcagcttctacaacttctgcagcaggaacaaggacaagctgacagccctggagcgctggaagatcaagaggatccagtttggcttccacaagaaggacctgggcgctggggacagcagtggagagcccggggctgaggaggccgtgggggagaagaaccccagtgatgtgtccctgacagcctaccaggcctggaagctgaagcaccagaagaaggtgggcagcgagaacaaggaggaggtggtggagctgagcaaaggagaagattctgccctggccaagaagaggcagaggcggctggagctgctggagaggagccggcagaccctggaggagagccagagcatggcctcctgggaggccgacagcagcacagccagcggcagcatccccctgagcgccttctggagcgctgaccccagcgtgtctgcagatggagacaccacctctgtgctgagcacccagagccacaggagccacctgagccaggccgccagcaacattgctggctgcagcaccagcaaccccaccacccccctgcccaacctgcctgtgggccctggggacaccatcagcatcgccagcatccagaactggatcgccaacgtggtgtctgagaccctggcccagaagcagaatgagatgctgctgctgagccgcagccccagcgtggcctccatgaaggctgtgcctgctgccagctgcctgggagatgaccaggtgtccatgctgagcggccacagcagcagcagcctgggcggctgcctgctgccccagagccaggcccggcccagcagtgacatgcagagcgtgctgagctgcaacaccaccctgagcagccctgctgagagctgccgcagcaaggtgcggggcaccagcaagcccatcttcagcctgtttgctgacaacgtggacctgaaggagctgggcaggaaggagaaggagatgcagatggagctgcgggagaagatgtctgagtacaagatggagaagctggccagtgacaacaagaggagcagcctcttcaagaagaagaaggtgaaggaggatgaagatgatggagtgggagatggagatgaggacacagattctgccatcggcagcttccgctacagcagccgcagcaacagccagaagccagagacagacacctgcagcagcctggccgtgtgtgaccactacgccagcggcagccgggtgggcaaggagatggacagcagcatcaacaagtggctgagcggcctgaggacagaggagaagccacccttccagagcgactggagcggcagcagccggggcaagtacaccaggagcagcctgctgcgggagacagagagcaagagcagcagctacaagttcagcaagagccagagcgaggagcaggacaccagcagctaccacgaggccaatggaaacagcgtgcgcagcaccagccgcttcagcagcagcagcacccgggagggccgggagatgcacaagttcagccgcagcacctacaatgagaccagcagcagccgggaggagagccctgagccctacttcttccggaggaccccagagagcagcgagcgggaggagagccctgagccccagaggcccaactgggcccggagccgggactgggaggatgtggaggagagcagcaagagtgacttcagcgagtttggagccaagaggaagttcacccagagcttcatgaggtctgaggaggagggggagaaggagaggacagaaaatcgggaggagggccgctttgccagcggccgccgcagccagtacagaagaagcacagaccgggaggaggaggaggagatggatgatgaggccatcatcgccgcctggaggcggcggcaggaggagaccaggaccaagctgcagaagagaagagaagattag

SEQ ID NO: 266863 - DNA, 3477 bp, Artificial Sequence
  derived and/or modified sequence
atggccacccggaaggacaccgaggaggagcaggtggtgcccagcgaagaggatgaggccaacgtgcgcgcggtccaagctcattaccttcggagccccagtcctagccagtacagcatggtgagcgacgccgagactgagtctatttttatggaaccaattcacctatcatcagccatagcggccaagcagataattaacgaagaattgaaaccgccaggagtgagagctgacgccgagtgccccggtatgttggagagtgctgagcagctgttagtggaagatctgtacaatcgggtgcgggagaagatggatgacaccagcttgtataacaccccatgcgtacttgatcttcagcgtgctcttgtacaggaccggcaggaggccccttggaatgaggtcgacgaagtatggccaaacgtcttcatcgctgagaagtctgtggccgtaaataaagggcggttaaagagattaggaatcacacacatcctaaatgcagcccatgggacaggagtatatacaggacccgagttttacacaggactggaaatccagtatctcggcgtcgaggtggacgatttccccgaagtcgacatttcacaacactttcgcaaggcctcggagttccttgacgaagcattgttaacctaccgcggtaaggtgctggttagttccgaaatggggatatctcggagcgccgttctagtggttgcctatttgatgattttccacaacatggctatcttggaggcactgatgacagtgagaaagaaaagggctatctacccaaatgaaggatttctgaaacagcttcgcgagctcaatgagaaactgatggaagaacgcgaggaggactacggacgagagggggggtcagctgaagctgaggagggagaagggactggaagcatgttgggggcccgcgttcacgcactgacagtggaagaggaggacgattcggcttctcatctgagtggtagttctctgggcaaggctacacaagcctcaaagccacttacgctgattgacgaagaggaggaagaaaagctgtacgaacagtggaagaagggccagggtcttttgtccgataaggtgccacaggacggcgggggctggcgctccgcttctagtggtcaggggggggaggaactggaggatgaagacgtcgaaaggatcatccaggagtggcaatctaggaacgagcgctaccaggctgaaggttacaggcggtggggtagagaggaagaaaaagaagaagaatccgatgcgggttcatctgtggggcggcgccgacggaccctctctgaaagcagcgcatgggaatccgtgagcagtcatgatatttgggtgttgaagcagcaactcgaactcaaccgtcctgatcatggccggaggcgcagagccgatagtatgtccagcgaaagcacctgggacgcatggaacgagcgtcttttagagattgagaaggaggcttcacgccggtaccatgctaagtcaaagagagaagaggccgctgataggagctctgaggcagggagtagggtgagggaagatgatgaagatagcgtgggatccgaagcctctagcttctacaatttttgtagcaggaacaaggacaagcttacagcccttgagcggtggaagataaagaggatacagtttgggttccataagaaagatttaggagctggggactccagcggggaacctggagccgaagaggccgtaggggaaaagaatccgagtgacgtgtctctgacagcttaccaggcctggaaacttaagcaccaaaaaaaggtgggcagcgaaaataaggaggaggttgtagaactttccaagggcgaggactcagcccttgccaagaagcgacagagacggctcgagctgcttgagcgcagccgtcagacactagaggaaagtcaatcaatggccagctgggaggccgatagttcaaccgccagcggttccatcccgctgtcagcgttctggtccgccgatcctagcgtgagtgccgacggagatactacttcggtactgagtacccagtcccaccggtcacatctcagccaggctgcttctaatatcgcgggctgttctactagcaaccctacaacccccctacccaatttacctgtcggacctggggataccatctcgattgcatctatccaaaattggatcgccaacgtagtaagcgaaaccctcgcccagaagcagaatgaaatgctgctgttgtcacgaagcccctcagtggcaagtatgaaggcagtgcccgcagccagttgccttggggatgatcaggtgagcatgctgtccgggcactcaagttcctcgctgggtggctgtttactaccccaatctcaagcccgcccatcctctgacatgcaatccgtgctctcatgtaatacaacgctgagctccccagcggagtcatgccggtccaaggtgagagggacctctaaaccgatttttagtctgttcgcagacaacgtcgaccttaaagaactcggacgtaaggaaaaggaaatgcaaatggaactacgggaaaaaatgtcagagtataaaatggaaaagcttgcctcagataataagcggagttctctgtttaaaaagaagaaggtgaaagaggatgaggatgacggcgtgggcgacggcgacgaagacacggactccgccatcggcagctttaggtactcgtcacgaagcaattcacaaaaaccagagacagacacgtgcagctccctcgccgtgtgcgatcactacgcttccggttcccgggtcgggaaggaaatggactcgtccatcaacaagtggctaagcgggctaagaacggaggagaaaccgcccttccaatctgactggtcaggctcatcaaggggaaaatacacacgcagctctctgttaagagagactgagagcaagagctcttcttataagttttctaaatctcagtcagaagagcaagatacatcttcataccatgaagcaaacggaaactcagtacgtagcacctctcggttttcctcttcatctacccgcgaagggagagagatgcacaaattcagcagaagcacttacaatgagacctcaagttctcgggaggaatctcccgagccatacttcttccgtaggacacctgagagctccgagcgcgaggaatcccccgagcctcagaggcccaattgggccaggagtagagattgggaagatgttgaggagtcgtctaagagtgacttctcggaatttggggccaaacgaaagttcacccagtcctttatgaggtcggaggaggaaggcgagaaagagaggacggagaaccgggaagaaggacgttttgcctcaggcagaaggtcccagtatcgccggtccacagatagagaagaggaggaggaaatggacgacgaagccataatagccgcatggaggcgccgtcaggaggagacccgtacaaaactacagaagcggcgggaggactag

SEQ ID NO: 266864 - DNA, 3477 bp, Artificial Sequence
  derived and/or modified sequence
atggccacccggaaggacaccgaggaggagcaggtggtgcccagcgaggaagacgaagctaatgtacgggccgtccaggcacactacttacgctctcctagtccatcccagtactccatggtgagcgatgctgaaactgagtccatctttatggagcccattcatctgagctctgcaatcgccgctaaacaaataatcaacgaagaactgaaacccccgggcgtccgcgcagatgccgagtgtccagggatgcttgagtctgccgagcaactgctggtggaggacttgtataatagagtcagggagaaaatggacgatacaagcctgtacaatacaccttgcgtgctggacttacagagggcgctcgtccaggatcgtcaggaggccccctggaatgaagtcgacgaggtgtggcctaacgtgttcatagctgagaagagtgttgcggtgaataaaggccgcctgaaaagactggggatcacacatatcttgaacgcagcgcatgggacaggggtctacactggtcccgagttctacaccggattggagatccagtacctgggcgtagaggtggatgacttcccagaggttgatatcagccagcattttcgaaaagccagtgaattcttggacgaggccctgctgacttaccgaggcaaggttctcgtaagctcagaaatggggattagcagaagcgccgtactggtggtagcatacctcatgatattccacaacatggcaattttagaagccctgatgacagtccgaaagaaaagggccatctaccccaacgaagggtttttgaaacagctgagagaactgaacgaaaaactgatggaagagcgagaggaggattacgggcgtgaaggaggatctgctgaggcggaagagggcgaaggaaccggatcgatgctgggagccagagtgcacgccctaaccgtggaggaagaggatgactccgccagtcatttgtcgggctcgagtttgggcaaagcaactcaggcaagcaaacctcttaccctgattgatgaggaagaggaagaaaagctttacgaacagtggaagaaaggccagggattactcagtgacaaggtcccccaggacggcggggggtggcggagcgctagcagcggacagggtggggaagaacttgaagacgaagacgtggagagaattatccaggagtggcagtccagaaatgagcgatatcaggcggaagggtacagacggtggggtcgtgaggaagaaaaagaggaagaatctgacgccggatcctccgtagggcgcaggaggcgaacactcagcgaatcctccgcctgggagtccgtgagttctcacgatatctgggttcttaagcagcagctggaactcaaccgtccggaccacggtagacggcgcagggccgactctatgtcaagcgaatcgacatgggacgcatggaatgagagactgctcgaaatcgaaaaagaggcgagccgccggtatcacgcaaaaagcaaaagagaggaggccgcggatcgaagctctgaagcaggttcccgggttagggaggacgacgaagatagtgtcggatcagaggctagtagcttttacaatttttgctcccggaataaagacaagctgacagccctagagagatggaagattaaacgaatacaattcggtttccacaaaaaagacctgggcgccggagactctagcggagaacctggtgccgaagaagcggtaggagagaagaaccccagcgacgtctcactgacggcataccaggcttggaaactgaagcaccagaagaaggtgggaagtgagaataaggaagaggtggtagaattatcgaaaggcgaggacagcgctctggccaaaaagaggcagcgcagactggagctgttggagaggtcccgacaaactctcgaagaaagccagtccatggcctcgtgggaagctgattcaagcaccgctagcgggagtatccccctttccgccttctggtctgccgatcccagcgtcagtgctgacggcgacacaacatctgtactcagtacacaaagccacaggagtcacctgtcccaggctgcttcaaacattgctgggtgctccaccagcaatcctacaactccactccccaatctccccgtcggcccgggcgataccatcagcatagcgagcatccaaaattggattgctaatgtggtgtccgagaccctcgctcaaaagcagaatgagatgctcctcctgagccgctcccccagcgtcgcaagtatgaaagccgtgccagccgctagttgcttgggcgatgaccaagtaagtatgttgtccggccattcctcatccagtctgggcggttgcttgctgccacagtctcaggcccgcccgtcctccgatatgcagtctgtcctgtcgtgcaacacgactctgtcttcccctgctgaatcgtgtcggtcaaaggtccgaggaacttctaagccaattttttcattatttgccgataatgtggacctgaaggaactcggtagaaaagagaaggagatgcagatggagctgcgcgaaaaaatgtcagagtacaagatggaaaagctggccagcgacaacaagcgctcctccctgttcaagaagaagaaggtgaaggaagatgaggacgacggcgtgggagacggagacgaagacaccgacagcgccatcggaagttttaggtatagctcgcgttcaaactcccagaaaccggaaactgacacttgtagctccctggcggtgtgcgaccactacgcctcggggtctcgggtcgggaaggaaatggacagttccatcaataagtggttgtcaggactgcgcacagaggagaaaccaccgttccaaagcgactggtcaggaagcagtaggggcaaatatactagaagcagtttgctgcgggagacagagagcaagtccagctcatacaagttcagtaagagccagagcgaagagcaggacacgagcagctatcatgaggccaacggcaactccgtgagatctacttcacgattctcttcaagctccaccagggaggggcgggagatgcataaattcagtagaagcacctacaacgagacctctagcagtagagaggagtcccccgagccctatttttttagacgcacacctgagagttctgaacgggaggagtctcccgagccccagagacccaactgggcacggagccgagattgggaggatgtggaggaatctagtaaaagtgatttctctgaatttggggctaaacggaagtttacccaaagcttcatgcggagcgaggaagagggagagaaagaacggacggagaaccgcgaggaggggaggtttgccagtggacggaggtctcagtaccggaggtccaccgaccgggaggaggaagaggagatggatgatgaagctatcatcgctgcttggcgcagacgccaagaagaaacaaggacgaagcttcagaagagacgagaggactag

SEQ ID NO: 266865 - DNA, 3477 bp, Artificial Sequence
  derived and/or modified sequence
atggccacccggaaggacaccgaggaggagcaggtggtgcccagcgaagaggacgaggcgaatgtgcgggctgtccaggctcattatctccggagtcccagtcccagtcaatactctatggtaagtgacgccgagaccgagagtattttcatggaacccattcatctgtcaagcgccatagccgccaagcagatcatcaacgaagagttgaaacccccaggcgtccgcgcagatgctgagtgccccggaatgttagaaagcgcagagcagctcctggtggaggacttatataatagagtcagggagaagatggatgacacttccctgtacaacactccctgtgtcctggatctgcaacgggcgcttgtacaggatcggcaggaagccccttggaacgaggttgatgaggtgtggcccaatgtttttatcgctgagaagagcgtggccgtgaataagggcagattaaaacgcttggggatcacacatatccttaacgctgcccatggaacaggtgtgtacactggcccagagttttacaccggcttggaaatacagtatttgggcgtggaagtggacgacttccccgaggtggacatttctcagcacttccgaaaggcctccgaatttctggacgaggcactgttgacctaccgcggaaaagtgctggtgtccagtgaaatgggaatcagccgatccgcagtcctagtcgtagcgtatctcatgatttttcataacatggccatccttgaagcattaatgacagtcaggaaaaagagggcaatatacccaaacgagggctttctgaagcaattgcgcgaactgaacgagaagcttatggaggagagagaggaggactatgggcgggagggagggagtgcagaggctgaagagggcgaggggacgggatccatgctgggtgcccgggtgcacgctctcacagtggaggaagaggatgattccgcttcccacctgagtgggtctagtctgggtaaggccacacaggctagtaagcccttaacattgatagatgaggaagaagaggaaaaactttatgagcagtggaaaaaaggccaaggcctcctgtcagacaaggttcctcaggacggcggggggtggcgttctgcatccagcggtcagggcggggaggaactagaagacgaagacgtggaacggatcatccaggagtggcaatcacggaacgaaaggtaccaggcagaagggtaccggaggtgggggagggaggaagagaaagaagaggagtccgatgccggctcctctgtgggacgtaggcgccgcacattgagtgaatcaagcgcctgggaatcagtgtcttctcacgacatctgggtgttaaaacaacagttggagttaaacaggcctgatcatgggcgaaggcggagagcagatagtatgagctcagaaagcacctgggacgcctggaacgagcgtttgcttgagattgagaaggaggcctctcgccgatatcacgccaagtctaagcgtgaggaagctgctgatcgctcatccgaagcaggctcacgtgtacgcgaagatgacgaagacagcgtgggatcggaagccagttctttctataatttctgcagccgaaataaggacaaactcaccgccttggaacgatggaagattaagcggatccagtttgggttccacaagaaagatttaggagcaggcgatagtagcggcgaaccgggcgccgaagaagctgtgggagaaaagaatccctccgacgtgtctctgacagcctatcaggcttggaagctcaaacaccagaaaaaagtcggatctgagaacaaagaagaggtggttgagcttagcaaaggtgaagattcggcccttgccaagaagaggcagcggcgtctggagctcttggagagatctagacagactctggaggaatcccagagtatggcgagctgggaagcagactcttccaccgcgtcgggatcgatcccgctgtcagctttctggtctgcggacccctcagtgagtgccgacggagacacaacttccgtgctcagtacacagtcgcacaggtctcacctcagccaagcggccagtaatatcgcggggtgtagcacatcaaacccaactaccccgctccccaacctcccagttgggccaggagatactatcagcatcgcaagtattcaaaattggatcgccaacgtggtctcagagacgttggcacagaaacagaacgagatgttacttctgtcaaggagtccctccgtggccagcatgaaagccgtcccagcagcctcttgcctgggcgatgatcaagtctcaatgctatctggccactcttcctcttcgctgggaggatgtctcctgccccagtcacaagctcgcccctcatcagatatgcaaagcgtattgtcttgcaatactacactgtccagcccagctgaaagctgccgttcaaaggtacgcgggaccagcaagcccatcttctcgttattcgccgataacgtggatcttaaagaactgggccgaaaagagaaggaaatgcagatggaacttagagagaagatgtccgaatataaaatggagaagttagcctctgacaacaagcgaagctcactttttaagaagaagaaagtaaaggaggacgaagacgatggggtgggtgatggagacgaagacacagatagcgcaatcggcagttttcggtattcaagcagatctaactcccagaagcccgagaccgatacgtgttctagtcttgcagtgtgtgatcattacgcctccgggtcaagagtaggcaaggaaatggatagttcgataaacaagtggctgagcgggttgaggacagaggagaagccgcctttccagagcgattggtcaggttcttctaggggcaaatacacccgttcctccctgctccgggaaacagagagcaaatcatcctcttacaaatttagcaagtctcagtccgaagagcaggatactagcagctatcatgaagcaaacggaaactctgtgagaagtacctcccgtttttctagctcaagcactcgagagggcagggagatgcacaagttttccagaagcacgtataatgagacctcctcaagtcgggaggagagtccagagccctacttctttcgaagaacacccgagagcagtgagcgtgaggaatcgccggagccccaacgcccgaactgggcgcggagtagagattgggaggatgtggaggaaagcagcaagtccgatttcagtgagtttggggccaagcgaaagttcacacagtcctttatgcggtccgaagaggagggggagaaggagaggaccgaaaaccgcgaggaaggcagattcgcctctgggcggcgatcacagtaccggcgctccaccgaccgcgaggaggaggaggaaatggacgacgaagccattattgccgcttggcgaaggcgccaggaggaaaccaggactaaacttcagaaaagacgcgaggattag

SEQ ID NO: 266866 - DNA, 3477 bp, Artificial Sequence
  derived and/or modified sequence
atggcgacaaggaaggataccgaggaggaacaagtggtgccttcggaagaggatgaggcaaacgtgagagcagtgcaggctcactacttgaggtctccctcaccctcacagtacagcatggtctccgacgccgaaactgagagcatcttcatggaacccatccacctctcttcagctatagctgcgaagcaaataatcaacgaggaactgaaacctccgggagttcgtgccgatgcagagtgcccgggtatgctcgagagcgccgagcagttgttggtcgaggatctgtataatagagtgcgtgagaagatggatgatacttctctgtataatactccttgcgttctggacttacagcgggctctggtgcaggatcgtcaagaagctccttggaacgaggttgacgaggtttggcccaacgtcttcatagcagagaagtctgtcgctgtcaacaagggacgcttgaagaggttgggaatcacccacatcctcaatgccgctcacgggacgggggtgtacaccggacctgaattctatacaggcttggagatccagtatcttggcgtggaggtggatgattttccagaagtagatatcagtcaacacttcagaaaagcttctgaatttctggacgaggcattgctaacctaccgcggtaaggtgctggttagcagcgaaatgggaatctctagatccgcagttctggtggtggcatatttgatgatcttccataacatggccatcctggaggctctgatgaccgttagaaaaaaacgagctatttacccgaacgagggctttctgaaacagctgcgcgaactcaacgagaaacttatggaagaacgggaagaggactacgggcgtgaaggcggtagcgccgaagctgaagagggggaggggacgggcagcatgctaggcgcacgagtccacgctttgaccgtggaagaggaggacgatagcgcaagccacctgtctggctcatctctgggtaaggcaacacaggcctcaaagccactaactcttatagatgaggaggaagaagaaaaactgtacgaacagtggaaaaaaggccaggggttgctgtcagacaaagtccctcaggacgggggaggatggaggtccgctagctctgggcagggcggtgaagagcttgaggacgaagacgtagagcgcatcattcaagagtggcagtcacgaaatgaaagatatcaagctgagggatacagacggtggggcagggaggaggaaaaggaggaggagtcagatgctggatctagtgtcggtcgtcgcaggcgcactctctcggagtcaagcgcatgggagtcagtaagttcccacgatatttgggttctcaaacaacagctagaacttaaccgcccagaccacggtaggagacgaagggcagattcgatgtcatcagagtcaacctgggacgcatggaatgagcgactactggaaattgagaaagaggcatcccgtcgctaccatgcaaagagtaagcgggaggaggcagccgatcgctcctctgaagccggatctcgcgtccgagaagacgacgaggacagtgtaggttctgaggcgagctccttctataacttttgcagccggaacaaggataagctgacggcactcgaacgatggaagattaagagaatccagtttggctttcataagaaggatctcggtgcaggtgactcaagtggcgaaccgggagctgaggaggctgtaggggagaaaaacccttcagacgttagcctgacagcctaccaggcttggaaacttaaacaccagaagaaagttggctcagaaaacaaagaggaggtcgtagagctgtctaaaggggaggacagcgcacttgcgaagaaacgacaaagaagactcgaactcctcgaaagatcgagacagactctggaggaatcccaaagtatggcctcgtgggaggctgattcgagcactgcgtcaggctctatccctctctctgcgttttggtcggccgaccctagcgtgagtgcagacggagatactacttccgtgctctccactcagtctcataggtcccatctttcccaggccgcaagtaatatcgctggttgttctacttcaaaccctacaacacctctgccgaaccttccggtggggcctggagataccatctccattgccagtattcaaaattggattgccaacgtagtgtcagaaactctcgcccagaagcagaacgagatgctgctcctatcaagatcgcctagcgtggcatcaatgaaggccgtgcctgctgctagctgtttaggagacgaccaggttagcatgctgagcggccacagctcatcctccctgggagggtgcctgcttcctcagtctcaggcgaggccatctagtgacatgcagtcagttctttcgtgtaacaccaccctctcctcacccgctgaatcttgccgaagtaaggtccgtggaacatcaaaaccaattttttccttgtttgccgataacgttgacctcaaagagctcggtcgtaaagagaaggagatgcagatggagcttcgggagaaaatgagcgagtacaaaatggaaaagctggcctctgataacaagagatcttctctgttcaagaagaagaaagttaaggaggatgaagacgatggggtcggagacggagacgaggatacggactctgccatcggaagtttcagatactcttctcgtagcaactcccagaagccggagacagacacttgctcctccctcgcagtgtgcgaccattatgcctcaggatcccgggtcggcaaggagatggactcctctattaacaagtggttatctgggttgcggacggaggagaagcccccttttcagagcgattggtccgggtcttcccgcggaaagtatacacggtcatccctgctgcgggagacagagagcaagagctccagttacaaatttagcaagtcccagagcgaagaacaggatacatcaagctatcatgaggctaacggaaattcagtcagatctaccagtcgttttagctcttcctctacaagggagggacgtgaaatgcataagttcagtcgctctacatataacgagacctcctcaagcagagaggagtccccagagccttatttcttccgccgtactcccgaatccagtgagagggaggagtctcctgaaccccagaggcctaactgggccaggagccgcgattgggaggacgttgaggaatctagcaaatccgatttctctgagttcggggctaagaggaaatttacacagtcttttatgcgtagcgaggaggagggcgaaaaagagcgtacggagaatagggaggaaggccgtttcgcctccggccgacggtctcagtacagaagaagtaccgacagagaagaggaggaagagatggatgatgaggctatcatcgcggcttggaggcggagacaagaagaaacccggaccaagctgcagaagcgcagagaagactag

SEQ ID NO: 266867 - DNA, 3477 bp, Artificial Sequence
  derived and/or modified sequence
atggccaccagaaaagatactgaggaggaacaggtggtacccagtgaagaagacgaggcaaacgtgcgggcagtgcaagcccattatctccggtcgcctagtccaagtcagtattctatggtgagcgacgcagaaacagagtctatttttatggagccaatacacctaagctccgccatagccgctaagcagatcataaatgaagagttaaagcctcctggcgtgcgggctgacgccgaatgccctggaatgctggaatctgccgaacagttactggttgaagatctgtataacagggtcagagagaagatggacgatacctccctttataacaccccctgcgtgctggacttacaacgtgctctggtgcaggacaggcaagaagctccttggaacgaggtcgacgaggtctggcctaatgtattcattgccgagaagtctgttgccgtcaacaaagggaggttaaaacgactgggcatcacccacattctcaacgctgcccacggtacaggcgtctacaccgggcctgaattttacaccggtcttgagatccagtacctgggcgtcgaagtggatgactttccagaggtggacatatctcaacactttaggaaggcgtcagagttcctcgacgaggctcttctcacctacaggggcaaggtattggtgtcctcagaaatgggtatcagtcgcagtgccgtgcttgtggtggcttacctgatgatttttcacaacatggccattttagaggcactgatgacagtaaggaagaaacgggcaatctaccctaacgaaggttttctcaagcagctgagggaacttaatgagaaactgatggaagagagagaagaggattacggacgcgagggaggctctgcagaagctgaggagggagaaggcacaggttcgatgctgggtgccagggtgcatgcacttaccgtcgaagaagaagacgactccgcaagtcacctgagtggctcctcactcggaaaggccacacaggcatcaaagccattaacccttatcgacgaggaagaggaggaaaaactttacgagcagtggaagaaaggccaaggtcttctgtctgacaaggttccccaagacgggggtgggtggagatctgccagttcagggcagggaggcgaggaactggaggacgaagacgtcgagcgcattatacaggaatggcaatctcggaacgagcgctaccaggcagaggggtatagacggtggggccgagaggaggaaaaggaagaggagtccgacgctggatcctcagtcggacgccgacgcagaacactcagtgaatcatctgcttgggagagcgtgtcaagccatgacatttgggttctgaaacagcagctggagttaaacaggcccgaccatgggagaaggcggagggctgacagcatgagcagtgagtctacctgggatgcttggaacgagcgcctgctcgagatcgaaaaggaggcaagccgccgatatcatgctaaatccaaaagagaggaagccgcagacagaagctcagaagcagggagtcgggtgagagaagacgacgaggactcagttggctctgaggccagtagtttctataacttttgctcaagaaataaagataaactcactgcgttggaacgctggaaaattaagagaattcagtttggcttccacaagaaagacttaggtgccggtgacagcagcggcgagcctggcgcagaagaggcggtgggcgagaaaaacccatctgacgttagcctgaccgcatatcaggcatggaaactcaagcaccagaaaaaagtgggatctgagaacaaagaggaggtggttgagctatccaagggagaggacagcgccctggcaaagaaaagacagcgcaggctggaattgttagagagatcccgacagaccctagaagaaagtcaaagcatggcatcctgggaagcagactctagtacagcctctggttccatccccttgtctgctttctggtccgccgacccaagcgtcagcgctgacggcgataccacaagcgtcctgtccacacaaagtcaccggtcacatctgtcccaggctgccagcaatatagcagggtgctctacatccaatcccacaacgccattaccaaatttgccagtcggaccgggtgataccatcagcattgcgtccattcagaactggattgcaaatgttgtgagcgagacattagctcagaagcagaacgagatgcttctcctgtcaagaagtccaagtgttgcaagcatgaaggcggtgccggcagcaagctgtctgggcgatgaccaggtttccatgctgtccggccactcctctagctccctgggcggttgcctactaccccaatcgcaggccagaccctcatccgatatgcaaagcgtgctgagctgtaataccactttgtcttccccagccgaaagctgcaggtccaaagtgcggggaacatccaagccaatcttttccctcttcgccgataatgtggaccttaaagagctcgggaggaaggagaaggagatgcagatggagctgagagagaagatgtccgagtataaaatggaaaagctagcttcagataacaagagatcgtctctgtttaaaaaaaagaaggttaaagaggacgaagatgacggagtgggcgatggagacgaagacacagatagcgccattgggtcttttcgttactcttctcgttctaactctcagaagcctgagacggacacctgttccagcctggcggtttgcgaccattacgctagcggatctagagtgggaaaagagatggattcctcaatcaataaatggctctccggccttcgcactgaagagaagccgccttttcagtctgattggtccggaagcagcaggggcaaatacacccgaagctctctccttcgagagacggagtccaagtcttcaagctacaaattttcgaaaagtcaaagcgaggagcaagacacttcgtcataccacgaggccaatggcaattcggttcgcagcacatctcggttcagctctagttcaactcgcgaggggagggaaatgcacaaattcagccggtcaacctataatgaaacttctagtagccgggaggaatctcctgagccctatttctttcgcagaacacccgagtcttccgagcgtgaggagtccccagagcctcaaagacctaactgggcaagatctagggactgggaggacgttgaggagtcaagtaaatctgactttagcgagtttggggctaaaagaaaattcacccaatccttcatgagaagtgaggaagagggtgaaaaagagagaacagagaatcgggaagaggggagatttgcgagcgggagaaggtcccaatatcgtcggagcactgatagggaagaggaggaggaaatggatgatgaggcgattatcgccgcatggaggcgtcgccaggaagagacacggacaaagctccaaaaacggcgagaagactag

SEQ ID NO: 266868 - DNA, 3477 bp, Artificial Sequence
  derived and/or modified sequence
atggccacacggaaggacacagaagaggagcaagtagtaccttctgaggaggatgaagctaacgtacgggctgtccaggctcactacctgcgttcccccagccctagtcagtacagcatggtgagcgacgcggaaactgagtccatcttcatggagcccattcatctgtcgtcagcgatcgctgcaaaacagatcattaacgaggagttaaaaccgcctggcgtgagggcggatgccgaatgtccaggcatgttagagtctgccgaacagctgcttgtcgaagatctctacaatcgtgtccgtgagaagatggatgacacatcactctataacaccccatgcgtcctagacctccagcgggcattagtccaagaccgccaggaggctccctggaacgaggtggatgaggtatggccgaatgtctttatcgccgagaagtctgtcgccgtcaacaagggtaggctgaagagattgggtataactcatattctaaatgccgctcatggcaccggagtgtacacaggacctgaattttatacgggcttggagatccaatatttgggcgtcgaggtagacgattttcctgaagtggatatatcccagcatttcagaaaggcaagtgagttcctggatgaagctctgttgacttacaggggcaaagtgctcgtgtccagcgagatggggattagcagaagtgcagtgcttgtggtcgcctatcttatgatctttcacaacatggcaattctcgaggcgttgatgactgtccgcaaaaaaagagccatttaccctaacgagggatttctgaaacagctgagagagttaaatgagaagctaatggaagagcgcgaggaggactatggcagggagggaggaagcgctgaggccgaagaaggggaaggtacaggcagtatgttgggcgcacgggtgcacgctttgacagtggaggaggaagatgactctgcgtcacacctctctggttcctcactcgggaaggcaacccaggccagtaagccccttaccctgatcgatgaagaggaggaagagaagctgtatgagcagtggaaaaagggccaagggctgctgtctgataaagtgccccaggatggtggcggttggcggtctgcctcctccggacaagggggagaagagctggaggatgaggatgtggagcggataattcaggaatggcagtcccgtaacgagagatatcaggccgaagggtatcgccgatggggtagggaagaggagaaagaggaggagagtgacgcagggagctccgtgggaaggaggcggagaacgctttcagaaagttctgcatgggagtccgtgtcttctcacgacatttgggtgttgaagcagcagctggaacttaacagaccagaccatggaagaaggaggagggccgactccatgtcctcggaatcaacgtgggacgcctggaacgagcgcctcctggaaatcgaaaaagaggctagccgtcgctaccatgccaagagtaagcgcgaggaagccgcagataggtctagcgaagccggatccagggtccgtgaagacgacgaagattctgtagggtcagaggcgagcagcttctacaacttctgttcccgtaataaagacaagctcacggctctcgagcgctggaagatcaagcggattcaatttggtttccataaaaaagatttgggggcaggggattcttccggggagcccggagctgaggaagccgtgggtgagaagaatccaagtgatgtttcactaacggcctatcaggcgtggaagctgaaacatcagaagaaggtagggagtgaaaataaagaagaggtggtggaactgagtaagggagaggactctgcactggccaaaaagagacaacggagactggagctgctggagcgatcccgccagacacttgaagaatcccagtccatggcgagttgggaggccgactcctccacagcttccgggtctataccactttcagctttctggtcagccgatccaagcgtttctgccgatggggatactacaagtgtcctctctacccaatcgcacaggtctcatctttcacaggcagcttctaacatcgctggctgtagcacttctaacccaacaacgccactaccaaacctgccagttggcccaggagatacaatctccatagcatctattcaaaactggatcgctaatgtggtgtccgaaacactggcccaaaaacaaaacgaaatgcttttgctgagccgatcaccatcagttgcctctatgaaagccgttcctgctgccagttgcctcggggacgaccaagtttcaatgttgagcggtcactccagttcatcactcggcggatgtttgttgccccagtcacaggcacgtccctcgagcgatatgcaatctgttttgtcctgtaatacgactctgagctcaccggcagaatcctgcagatccaaggtgcgcggaaccagcaagccaatattcagcctgtttgcggacaacgtcgatttaaaagagctgggtagaaaggagaaagagatgcagatggaactccgtgagaagatgtcggagtacaaaatggaaaagttagcctcagataataaacgtagcagcttatttaagaagaaaaaagttaaggaggatgaggacgacggtgtgggggatggcgacgaagacacagactcagcgatcgggagctttagatatagtagtagaagtaatagtcagaagcctgaaacagatacctgtagctccctggctgtctgcgaccactacgcaagcggaagcagagtgggtaaggagatggatagttctataaataagtggttgtccggcctcagaacagaggaaaagcctccctttcagagtgattggagcggcagctcacgcggaaagtatacacgctccagtctgctccgggagaccgagagtaagtcatctagttataagtttagcaagtcacaaagcgaggagcaggatacatcctcataccacgaggccaacggtaatagtgtccgatcaactagcaggttctctagttccagcacacgcgagggcagagagatgcataagtttagccgctcaacttataacgagacaagcagttccagggaagagtctccggagccctacttctttagaagaaccccagaatcaagcgagagagaggagtccccagagcctcagcgtcctaattgggctaggagccgcgattgggaagatgtagaagaatccagtaaatccgacttcagtgagttcggggcaaagagaaaattcacccaatccttcatgagatctgaggaggagggggagaaggagcgcaccgagaatcgcgaagagggaaggtttgcctcaggacggcgatcgcaatacagacgatccaccgatagagaggaagaagaggaaatggatgatgaggccatcattgcggcatggcggcgtcgccaggaggagacccgtactaaattgcagaaaagacgtgaagattag

SEQ ID NO: 266869 - protein, 386 aa, Artificial Sequence
  derived and/or modified sequence
MEERPAETNANVDNSASPSVAQLAGRFREQAAAAKEKSPPNASHPPKFKVKSSPLIEKLQANLTFDPAALLPGASPKSPGLKAMVSPFHSPPSTPSSPGVRSRPSEAEEVPVSFDQPPEGSHLPCYNKVRTRGSIKRRPPSRRFRRSQSDCGELGDFRAVESSQQNGAKEEDGDEVLPSKSKAPGSPLSSEGAAGEGVRTLGPAEKPPLRRSPSRTEKQEEDRATEEAKNGEKARRSSEEVDGQHPAQEEVPESPQTSGPEAENRCGSPREEKPAGEEAEMEKATEVKGERVQNEEVGPEHDSQETKKLEEGAAVKETPHSPPGGVKGGDVPKQEKGKEKQQEGAVLEPGCSPQTGPAQLETSSEVQSEPAVPKPEDDTPVQDTKM

SEQ ID NO: 266870 - DNA, 1161 bp, Artificial Sequence
  derived and/or modified sequence
atggaggagagacccgccgagaccaacgccaacgtggacaacagcgccagccccagcgtggcccagctggccggcagattcagagagcaggccgccgccgccaaggagaagagcccccccaacgccagccacccccccaagttcaaggtgaagagcagccccctgatcgagaagctgcaggccaacctgaccttcgaccccgccgccctgctgcccggcgccagccccaagagccccggcctgaaggccatggtgagccccttccacagcccccccagcacccccagcagccccggcgtgagaagcagacccagcgaggccgaggaggtgcccgtgagcttcgaccagccccccgagggcagccacctgccctgctacaacaaggtgagaaccagaggcagcatcaagagaagaccccccagcagaagattcagaagaagccagagcgactgcggcgagctgggcgacttcagagccgtggagagcagccagcagaacggcgccaaggaggaggacggcgacgaggtgctgcccagcaagagcaaggcccccggcagccccctgagcagcgagggcgccgccggcgagggcgtgagaaccctgggccccgccgagaagccccccctgagaagaagccccagcagaaccgagaagcaggaggaggacagagccaccgaggaggccaagaacggcgagaaggccagaagaagcagcgaggaggtggacggccagcaccccgcccaggaggaggtgcccgagagcccccagaccagcggccccgaggccgagaacagatgcggcagccccagagaggagaagcccgccggcgaggaggccgagatggagaaggccaccgaggtgaagggcgagagagtgcagaacgaggaggtgggccccgagcacgacagccaggagaccaagaagctggaggagggcgccgccgtgaaggagaccccccacagcccccccggcggcgtgaagggcggcgacgtgcccaagcaggagaagggcaaggagaagcagcaggagggcgccgtgctggagcccggctgcagcccccagaccggccccgcccagctggagaccagcagcgaggtgcagagcgagcccgccgtgcccaagcccgaggacgacacccccgtgcaggacaccaagatgtag

SEQ ID NO: 266871 - DNA, 1161 bp, Artificial Sequence
  derived and/or modified sequence
atggaagaacgtcctgcggaaacaaacgccaacgtcgacaatagcgcgtccccatctgtagcccagcttgctggccggttccgcgagcaggcagccgccgctaaagagaagtcgccccccaatgccagccaccccccaaaattcaaggtgaaaagcagcccattaatagaaaaactgcaggcaaacttaacgttcgaccctgctgcactcctgcctggagcctctcccaagagccctggcctaaaagctatggtatctccgttccatagccccccatcaaccccttcctctcctggcgtcagatctagaccaagtgaagccgaagaagtccccgtgtcatttgatcagccacccgaggggagccatctgccctgctacaataaagtacggacacgcggcagtatcaaacgccggcccccttcccggcggttccggcggagtcagagtgactgtggagagcttggggacttccgtgcagtggagagcagccagcagaacggcgccaaagaggaagacggagacgaagtgcttccatccaagtcaaaggccccgggatctccgctgtcctccgagggagcagccggagaaggggtgaggaccctggggcctgcagagaagcccccattacggcggtccccgtctcgtaccgaaaagcaggaggaggatcgggctacagaggaagcgaaaaatggtgagaaggcccggaggagcagtgaggaggtggatggccagcacccggcccaggaagaggttcccgagtcaccccagaccagcggcccggaggccgaaaacaggtgtggaagtcctcgggaagaaaaacccgccggggaagaggctgagatggaaaaagctaccgaagtcaagggagagcgcgtgcagaacgaggaggtgggtccggagcatgactcccaggagacaaaaaaactggaagagggggcggccgttaaagaaacaccccatagcccccccggtggcgtgaaaggcggcgatgtgccaaaacaagaaaagggaaaagagaaacagcaagaaggagctgtgctggaacctggctgtagcccacagaccggacccgcgcagctcgagacatctagcgaagtgcaatctgaaccagccgtgcccaaacctgaagatgatacccctgtccaggataccaagatgtag

SEQ ID NO: 266872 - DNA, 1161 bp, Artificial Sequence
  derived and/or modified sequence
atggaggagaggcctgctgagaccaatgccaacgtggacaacagcgccagccccagcgtggcccagctggccggccgcttccgggagcaggccgctgctgccaaggagaagagccccccaaatgccagccacccccccaagttcaaggtgaagagcagccccctcatcgagaagctgcaggccaacctgacctttgatcctgctgccctgctgcccggggccagccccaagagccctggcctgaaggccatggtgagccccttccacagcccccccagcacccccagcagccctggggtgcgcagccggcccagcgaggccgaggaggtgcctgtgtcctttgaccagcccccagagggcagccacctgccctgctacaacaaggtgaggacccggggcagcatcaagagaagaccacccagccgccgcttcagaagaagccagagcgactgtggggagctgggggacttccgggctgtggagagcagccagcagaatggagccaaggaggaggatggagatgaggtgctgcccagcaagagcaaggcccctggcagccccctgagcagcgagggcgccgccggggagggcgtgaggaccctgggccctgctgagaagccacccctgcggcgcagccccagcaggacagagaagcaggaggaggaccgggccacagaggaggccaagaatggagagaaggcccggcgcagcagcgaggaggtggatggccagcacccagcccaggaggaggtgcctgagagcccccagaccagcggccctgaggctgaaaatagatgtggcagcccccgggaggagaagccagctggggaggaggccgagatggagaaggccacagaggtgaagggggagcgggtgcagaatgaggaggtgggccctgagcatgacagccaggagaccaagaagctggaggagggcgctgctgtgaaggagaccccccacagccccccaggaggagtgaagggaggagatgtgcccaagcaggagaagggcaaggagaagcagcaggagggcgctgtgctggagcccggctgcagcccccagacaggccctgcccagctggagaccagcagcgaggtgcagagcgagcctgctgtgcccaagccagaagatgacacccctgtgcaggacaccaagatgtag

SEQ ID NO: 266873 - DNA, 1161 bp, Artificial Sequence
  derived and/or modified sequence
atggaggagcggcccgccgagaccaacgccaacgtggacaacagcgcaagcccctccgttgcacagttggccggtcgcttcagagagcaggcagcagcagccaaagaaaagtctcctccgaacgctagccacccccccaagttcaaagttaaatcctcccccctgatcgaaaaattgcaggccaacttgacattcgaccccgcggcactcctgcctggcgcatctccgaagagcccgggcttgaaagccatggtgagcccattccacagtccaccctctacaccatcttctcccggtgtccggtcccggcctagcgaggccgaagaagtcccggtgagcttcgatcaacctccagagggctcccatctgccttgttacaacaaagttcgtacccgaggctctattaagagacgaccgccatcccgaagattcagaaggagccagtccgattgcggtgaactgggagatttccgggcagtggaatccagccaacagaatggcgctaaggaagaggatggggacgaagtgctgccctcgaaaagcaaagccccggggagcccactgtctagtgaaggtgcggctggggaaggggtgcggactcttgggcccgccgagaaacctcctcttaggaggagcccgagccgaacagaaaaacaggaagaggatcgagccacagaggaggcaaaaaacggcgagaaagccaggagatcatctgaggaagtggacggccagcatcctgcacaggaggaggtaccagagtccccccagacgtccggccctgaagctgaaaaccgatgcggctcacctcgtgaggagaaaccagccggggaggaagccgaaatggagaaggcgactgaagtcaagggagagagggtgcaaaacgaagaagttggacccgaacacgatagccaggagacgaagaagcttgaagagggcgctgctgtcaaggagactccccactcacccccaggcggtgttaaggggggcgacgtgccaaagcaggagaagggaaaggagaagcagcaagaaggggctgtcttggagccaggctgctcaccacaaaccggtcctgctcagttagaaaccagtagcgaggtgcagtcagaacccgctgtaccaaagcccgaagatgacacaccggtgcaggatacaaagatgtag

SEQ ID NO: 266874 - DNA, 1161 bp, Artificial Sequence
  derived and/or modified sequence
atggaagagcgtccagccgagactaatgccaacgtggataattccgcctcaccctccgtggctcagctcgcaggacggttccgcgaacaggcagctgcagcaaaggagaaatccccacccaatgctagccaccctcctaagttcaaagtaaagtcgagcccactgatcgagaagctccaggcaaatcttacgttcgatcctgcagccctgttgcctggcgcaagcccaaagagccccggattaaaggcaatggtgtccccattccacagccctcctagcactccttcctcgcccggtgtgcgctccaggccatcagaggctgaggaggttccagtgtcttttgaccagcctccagagggcagccacttgccttgctacaataaggtaagaactaggggtagcattaagcgccgtcctcccagccgccgttttcgccgttctcagagtgactgtggggaactgggagattttagagccgtagaatcctcccagcagaatggcgctaaggaagaggacggagatgaggttctgccatcaaaaagtaaggcgccaggttcacccctctcttcagaaggagcggcaggagaaggcgttcgcaccctgggtccggctgagaagcccccattgcggaggtctcccagcagaactgaaaagcaagaggaagatagagctactgaggaggcaaagaatggagagaaggccagacgctctagcgaggaagtcgatggccagcaccctgcacaggaagaggttcccgagagcccgcagacctccggcccagaggcagagaatcgttgcggctctccgcgagaggagaagcctgcaggagaagaggcagagatggaaaaggccaccgaggtgaagggggaacgagttcaaaatgaggaggtcgggcctgaacatgattcgcaggagactaaaaagctagaggagggcgctgctgtaaaggagaccccccattctccaccaggtggggtaaaggggggtgacgtcccgaagcaggagaagggcaaagagaaacagcaggagggggctgtcctcgaacctgggtgttccccacagacaggaccagctcaacttgagacctcctccgaggtacagtcagagcctgccgtgccaaaacctgaagatgacacacccgtgcaagatactaagatgtag

SEQ ID NO: 266875 - DNA, 1275 bp, Artificial Sequence
  derived and/or modified sequence
ccgcagagtcggcacctgaaggacatggaggaaagaccggcagagaccaatgccaatgtggacaactcggcgtccccctcggtggcccagctggccgggcggtttagggagcaggcggctgcagccaaggagaaatcaccacccaatgcgagccaccctcctaaattcaaggtcaagagctcgcctctgattgagaagcttcaggccaatttaacctttgacccagctgctctactgcctggggcctcacccaagagtcctggactcaaggctatggtgtcgccatttcacagcccaccttctacccccagcagccctggtgtgcgatctaggcccagcgaggcagaggaggtgcctgtcagcttcgaccagccccctgaaggcagtcatctgccctgttacaacaaggtgcggacgaggggctcaataaaaaggcgccctccctccaggcgattccgaaggtcacagtcagactgtggagaacttggagatttcagggcggtggagtcatctcagcagaacggtgctaaggaagaggatggggatgaagtgttgccatccaagagcaaggccccaggatcccctttgtccagtgagggagcagcgggagagggagtgagaaccctgggacctgctgaaaagcctcctctgaggaggtcacccagcaggacagagaagcaggaggaggacagggccacagaggaagccaagaacggtgaaaaggccaggcggagttcagaggaggtggacggccagcacccggcccaagaggaggtcccggaatcgccccagacctctggcccagaggcagaaaataggtgtgggagccccagggaggaaaagccagctggagaggaagcagagatggaaaaggctacagaggtgaagggggagagggtgcaaaatgaagaggtgggacctgaacatgacagccaagaaacaaagaagctggaggagggagctgcagtgaaggagaccccccacagtccccctggaggagtgaagggcggagatgtccccaagcaggaaaaaggcaaggaaaaacaacaggagggggcagtgctcgagccaggctgcagcccccagaccggccctgcccagctggagaccagcagtgaggtccagagcgagccagcagtccccaagccggaggatgacactcctgtccaggacactaaaatgtgaagaacagctcattgtgccccagtgatgaagttgctggacacatctctttgcaggtagcagcaacagttgtagcagcagcagacgaagcca

SEQ ID NO: 266876 - DNA, 594 bp, Artificial Sequence
  derived and/or modified sequence
tgcacttgcactctaaggaagctgaggtgggggaggcgggaaagtccacagaggagtttaaagcagccatgccaaaagcctgaacagaaacagatggtggcccagcaggaatctatcagagaagggtttcagaagcgctgtttgccagttatggtactgaaagcaaagaagcccttcacgtttgagacccaagaaggcaagcaggagatgtttcatgctacagtggctacagaaaaggaattcttctttgtaaaagtttttaatacactgctgaaagataaattcattccaaagagaataattataatagcaagatattatcggcacagtggtttcttagaggtaaatagcgcctcacgtgtgttagatgctgaatctgaccaaaaggttaatgtcccgctgaacattatcagaaaagctggtgaaaccccgaagatcaacacgcttcaaactcagccccttggaacaattgtgaatggtttgtttgtagtccagaaggtaacagaaaagaagaaaaacatattatttgacctaagtgacaacactgggaaaatggaagtactgggggttagaaacgaggacacaatgaaatgt

SEQ ID NO: 266877 - DNA, 504 bp, Artificial Sequence
  derived and/or modified sequence
atggttgcccagcaagagagtatccgagaaggttttcagaagcgatgtttaccggtcatggtgctgaaagcaaagaagccctttactttcgaaacgcaggagggcaaacaggaaatgtttcacgccacggtagctacagagaaggaatttttcttcgtgaaagtcttcaacaccctgttgaaagacaaattcatccctaagcgcatcatcattattgccagatactatcgtcattcaggatttcttgaagtgaatagtgcttcccgggtgctggatgccgaatctgatcaaaaagtgaatgtgccattgaacatcatccggaaagcaggggaaacacccaaaatcaacactctccagacacaaccattaggcacaatcgtcaacggactttttgtggtccagaaggtgactgagaagaagaaaaatatcctgtttgacctcagtgataacacaggcaagatggaggtgctcggtgttcgtaacgaggacacaatgaagtgctag

SEQ ID NO: 266878 - DNA, 504 bp, Artificial Sequence
  derived and/or modified sequence
atggtggcccagcaggagagcatccgggagggcttccagaagcgctgcctgcctgtgatggtgctgaaggccaagaagcccttcacctttgagacccaggagggcaagcaggagatgtttcatgccaccgtggccacagagaaggagttcttctttgtgaaggtgttcaacaccctgctgaaggacaagttcatccccaagaggatcatcatcatcgcccgctactaccgccacagcggcttcctggaggtgaacagcgccagccgggtgctggatgctgagagtgaccagaaggtgaatgtgcccctgaacatcatcaggaaggccggggagacccccaagatcaacaccctgcagacccagcccctgggcaccatcgtgaatggcctgtttgtggtgcagaaggtgacagagaagaagaagaacatcctgtttgacctgagtgacaacacaggcaagatggaggtgctgggcgtgagaaatgaagacaccatgaagtgctag

SEQ ID NO: 266879 - DNA, 504 bp, Artificial Sequence
  derived and/or modified sequence
atggtggcccagcaggagagcatccgggagggcttccagaagcggtgtctgcccgtcatggtactaaaagcaaaaaagccctttaccttcgagacccaggaagggaagcaagaaatgtttcatgctaccgtagcaacggaaaaagagttcttttttgtgaaggtctttaatactctcctcaaggataaattcattcccaaaagaatcattatcatcgcgagatattatagacactctggctttctggaggtgaatagtgctagcagggttctggacgccgagagcgatcagaaggttaacgtccctctgaacatcataaggaaagccggagaaacacctaaaatcaacaccctgcagacacaacccctgggaacaattgtaaatgggcttttcgttgtccaaaaagtaacagagaaaaagaaaaacatcctgtttgacctcagcgataacactgggaaaatggaggtactgggggtgcgcaacgaggacacaatgaaatgttag

SEQ ID NO: 266880 - DNA, 504 bp, Artificial Sequence
  derived and/or modified sequence
atggtcgcacagcaagaaagcatcagggaaggattccaaaagaggtgcctgcccgtaatggtgttaaaggctaaaaagccattcacttttgaaacacaggaaggcaagcaggagatgttccacgccaccgttgcaacagagaaagaattcttttttgttaaggtgttcaacaccctcctaaaagacaagttcatacctaagcgtattatcatcatcgcgaggtactacagacactcgggatttctggaagttaattcagcctctcgtgtgctggatgcagagtctgaccagaaagtgaatgtgcctctcaatatcatcaggaaggccggtgagaccccaaaaatcaacactttacagacacagcctctgggcacaattgtgaacgggctcttcgttgtgcagaaggtgacagagaagaagaaaaatatcctatttgatctgtctgataatactggaaaaatggaggtgcttggcgtgagaaacgaggatactatgaaatgctag

SEQ ID NO: 266881 - DNA, 504 bp, Artificial Sequence
  derived and/or modified sequence
atggtggcccagcaggagagcatcagagagggcttccagaagagatgcctgcccgtgatggtgctgaaggccaagaagcccttcaccttcgagacccaggagggcaagcaggagatgttccacgccaccgtggccaccgagaaggagttcttcttcgtgaaggtgttcaacaccctgctgaaggacaagttcatccccaagagaatcatcatcatcgccagatactacagacacagcggcttcctggaggtgaacagcgccagcagagtgctggacgccgagagcgaccagaaggtgaacgtgcccctgaacatcatcagaaaggccggcgagacccccaagatcaacaccctgcagacccagcccctgggcaccatcgtgaacggcctgttcgtggtgcagaaggtgaccgagaagaagaagaacatcctgttcgacctgagcgacaacaccggcaagatggaggtgctgggcgtgagaaacgaggacaccatgaagtgctag

SEQ ID NO: 266882 - protein, 693 aa, Artificial Sequence
  derived and/or modified sequence
  misc_feature (1)..(1): Xaa can be any naturally occurring amino acid
XEVFASWKQQCLNRGKQDISERLISASLFLRFLCPAIMSPSLFNLMQEYPDDRTSRTLTLIAKVIQNLANFAKFGNKEEYMAFMNDFLEHEWGGMKRFLLEISNPDTISNTPGFDGYIDLGRELSVLHSLLWEVVSQLDKGENSFLQATVAKLGPLPRVLADITKSLTNPTPIQQQLRRFTEHNSSPNVSGSLSSGLQKIFEDPTDSDLHKLKSPSQDNTDSYFRGKTLLLVQQASSQSMTYSEKDERESSLPNGRSVSLMDLQDTHAAQVEHASVMLDVPIRLTGSQLSITQVASIKQLRETQSTPQSAPQVRRPLHPALNQPGGLQPLSFQNPVYHLNNPIPAMPKASIDSSLENLSTASSRSQSNSEDFKLSGPSNSSMEDFTKRSTQSEDFSRRHTVPDRHIPLALPRQNSTGQAQIRKVDQGGLGARAKAPPSLPHSASLRSTGSMSVVSAALVAEPVQNGSRSRQQSSSSRESPVPKVRAIQRQQTQQVQSPVDSATMSPVERTAAWVLNNGQYEEDVEETEQNLDEAKHAEKYEQEITKLKERLRVSSRRLEEYERRLLVQEQQMQKLLLEYKARLEDSEERLRRQQEEKDSQMKSIISRLMAVEEELKKDHAEMQAVIDAKQKIIDAQVINGDEIIQTGKTDRVPGFSQHQTDERADPSEGAVQHAGPQWHLPHQPHQAFHHGEW

SEQ ID NO: 266883 - DNA, 2082 bp, Artificial Sequence
  derived and/or modified sequence
tgagaggtgttcgccagctggaagcagcagtgcctgaacagaggcaagcaggacatcagcgagagactgatcagcgccagcctgttcctgagattcctgtgccccgccatcatgagccccagcctgttcaacctgatgcaggagtaccccgacgacagaaccagcagaaccctgaccctgatcgccaaggtgatccagaacctggccaacttcgccaagttcggcaacaaggaggagtacatggccttcatgaacgacttcctggagcacgagtggggcggcatgaagagattcctgctggagatcagcaaccccgacaccatcagcaacacccccggcttcgacggctacatcgacctgggcagagagctgagcgtgctgcacagcctgctgtgggaggtggtgagccagctggacaagggcgagaacagcttcctgcaggccaccgtggccaagctgggccccctgcccagagtgctggccgacatcaccaagagcctgaccaaccccacccccatccagcagcagctgagaagattcaccgagcacaacagcagccccaacgtgagcggcagcctgagcagcggcctgcagaagatcttcgaggaccccaccgacagcgacctgcacaagctgaagagccccagccaggacaacaccgacagctacttcagaggcaagaccctgctgctggtgcagcaggccagcagccagagcatgacctacagcgagaaggacgagagagagagcagcctgcccaacggcagaagcgtgagcctgatggacctgcaggacacccacgccgcccaggtggagcacgccagcgtgatgctggacgtgcccatcagactgaccggcagccagctgagcatcacccaggtggccagcatcaagcagctgagagagacccagagcaccccccagagcgccccccaggtgagaagacccctgcaccccgccctgaaccagcccggcggcctgcagcccctgagcttccagaaccccgtgtaccacctgaacaaccccatccccgccatgcccaaggccagcatcgacagcagcctggagaacctgagcaccgccagcagcagaagccagagcaacagcgaggacttcaagctgagcggccccagcaacagcagcatggaggacttcaccaagagaagcacccagagcgaggacttcagcagaagacacaccgtgcccgacagacacatccccctggccctgcccagacagaacagcaccggccaggcccagatcagaaaggtggaccagggcggcctgggcgccagagccaaggccccccccagcctgccccacagcgccagcctgagaagcaccggcagcatgagcgtggtgagcgccgccctggtggccgagcccgtgcagaacggcagcagaagcagacagcagagcagcagcagcagagagagccccgtgcccaaggtgagagccatccagagacagcagacccagcaggtgcagagccccgtggacagcgccaccatgagccccgtggagagaaccgccgcctgggtgctgaacaacggccagtacgaggaggacgtggaggagaccgagcagaacctggacgaggccaagcacgccgagaagtacgagcaggagatcaccaagctgaaggagagactgagagtgagcagcagaagactggaggagtacgagagaagactgctggtgcaggagcagcagatgcagaagctgctgctggagtacaaggccagactggaggacagcgaggagagactgagaagacagcaggaggagaaggacagccagatgaagagcatcatcagcagactgatggccgtggaggaggagctgaagaaggaccacgccgagatgcaggccgtgatcgacgccaagcagaagatcatcgacgcccaggtgatcaacggcgacgagatcatccagaccggcaagaccgacagagtgcccggcttcagccagcaccagaccgacgagagagccgaccccagcgagggcgccgtgcagcacgccggcccccagtggcacctgccccaccagccccaccaggccttccaccacggcgagtggtag

SEQ ID NO: 266884 - DNA, 2082 bp, Artificial Sequence
  derived and/or modified sequence
taggaagtgttcgcctcttggaaacagcagtgtttaaaccggggcaagcaagacatctccgaacggctgatctctgcttcactgttcctgagattcctgtgtcccgccataatgagtccatcactatttaacttgatgcaggagtaccccgatgacaggaccagccgtacgcttacattgatcgcaaaggttatccagaacctggctaatttcgccaagtttgggaacaaagaggagtatatggcattcatgaatgattttctggagcacgagtggggcggcatgaagaggttcctgctggagatctccaatcctgacacgatttcaaatacccctggatttgatggttacatcgacctcggtagggaactcagtgtgctccacagtttactgtgggaagtggtgtcacaattagacaaaggagagaatagctttctccaggcgactgtcgcaaagcttggccccctgcctagggtgctcgctgatattactaaatctctcacaaatcccactccaattcaacaacagctcaggcgatttactgagcacaactcttctcccaatgtgagtggaagtctatctagcgggctccagaagattttcgaagatcctaccgattcggatctccacaagctgaaatccccttcccaggataatactgactcttatttcagaggcaaaactcttttattggttcagcaggcttcctctcagtctatgacctactcagagaaggatgagagggaatctagtctaccaaatggtaggagcgtctcgctgatggaccttcaggacacccacgctgctcaggtcgaacacgcgtctgttatgcttgacgtccctattcgtctcacgggttctcagctcagcatcacccaggtcgctagcattaaacagctcagggagacacagtctacaccccagagcgcccctcaggtgaggcggcctctgcatccagcccttaaccagcccggtggcctacagcccctgagcttccagaaccccgtatatcatctgaacaaccctattccggcgatgccaaaggcgtcaatagatagcagcctcgagaatctcagcaccgctagctctagaagtcagtcgaacagtgaagatttcaaactgtccggcccctcaaatagctcaatggaagactttacaaagcggagcacacagagcgaggacttcagccgcaggcatactgttcctgatcggcacatccctcttgcactgcctcgccagaatagtaccgggcaggcccagatacgaaaagtggaccagggcggactgggtgcacgtgctaaggcgcctcctagtctccctcacagcgcctctctcaggtctaccggttccatgagcgtggtgtcagccgcgttggtggctgaacccgtacagaacggctcacgtagtaggcagcagagctctagttcgagggagagtcccgtcccaaaagttagagcaattcagcgacagcagacgcaacaggtgcaatcgccggtggatagcgccacaatgagcccagtggagcgcaccgcagcctgggtccttaacaatggccagtacgaagaagatgtcgaagaaactgagcaaaatctcgacgaagctaagcacgctgaaaagtacgaacaagagattaccaagttaaaagaaagactgagggtaagtagtaggaggttggaggaatatgagcggagactgctggtccaggagcagcagatgcaaaaattgctactagaatataaggcacgcttggaagatagtgaagaaagactccgaagacagcaggaggagaaagacagccagatgaagagcattatcagccggctcatggcagtggaggaagaactgaagaaagatcacgcagaaatgcaagccgtaatcgacgccaaacagaagattatagatgcccaggtaatcaacggcgacgagatcattcagaccggcaagaccgatagagttcccggattttctcagcatcagactgacgaaagagcagacccgagtgagggggccgtgcagcacgcaggaccacagtggcacctcccccaccagccccaccaggcctttcaccacggagagtggtag

SEQ ID NO: 266885 - DNA, 2082 bp, Artificial Sequence
  derived and/or modified sequence
tgagaagtgtttgcctcctggaagcagcagtgcctgaacagaggcaagcaggacatcagcgagcggctcatcagcgccagcctcttcctgcgcttcctgtgcccagccatcatgagccccagcctcttcaacctgatgcaggagtacccagatgacaggaccagcaggaccctgaccctgattgccaaggtgatccagaacctggccaactttgccaagtttggaaacaaggaggagtacatggccttcatgaatgacttcctggagcacgagtggggcggcatgaagcgcttcctgctggagatcagcaacccagacaccatcagcaacaccccaggctttgatggctacatcgacctgggccgggagctgtctgtgctgcacagcctgctgtgggaggtggtgtcccagctggacaagggggagaacagcttcctgcaggccaccgtggccaagctgggccccctgccccgggtgctggccgacatcaccaagagcctgaccaaccccacccccatccagcagcagctgcggcgcttcacagagcacaacagcagccccaacgtgtctggcagcctgagcagcggcctgcagaagatctttgaggaccccacagacagcgacctgcacaagctgaagagccccagccaggacaacacagacagctacttccggggcaagaccctgctgctggtgcagcaggccagcagccagagcatgacctacagcgagaaggatgagcgggagagcagcctgcccaacggccgctctgtgtccctgatggacctgcaggacacccacgccgcccaggtggagcacgcctctgtgatgctggatgtgcccatccggctgaccggcagccagctgagcatcacccaggtggccagcatcaagcagctgcgggagacccagagcaccccccagagcgccccccaggtgcggcggcccctgcacccagccctgaaccagcccggcggcctgcagcccctgtccttccagaaccctgtgtaccacctgaacaaccccatcccagccatgcccaaggccagcattgacagcagcctggagaacctgagcacagccagcagccgcagccagagcaacagcgaggacttcaagctgagcggccccagcaacagctccatggaggacttcaccaagaggagcacccagagcgaggacttcagcagaagacacacagtgcctgacagacacatccccctggccctgccccggcagaacagcacaggccaggcccagatcaggaaggtggaccagggcggcctgggcgcccgggccaaggccccacccagcctgccccacagcgccagcctgcggagcacaggctccatgtctgtggtgtctgctgccctggtggccgagcctgtgcagaatggcagccgcagccggcagcagagcagcagcagccgggagagccctgtgcccaaggtgcgggccatccagaggcagcagacccagcaggtgcagagccctgtggacagcgccaccatgagccctgtggagaggacagctgcctgggtgctgaacaacggccagtatgaggaggatgtggaggagacagagcagaacctggatgaggccaagcatgctgagaagtatgagcaggagatcaccaagctgaaggagcggctgcgggtgagcagccggcggctggaggagtatgaaagaaggctgctggtgcaggagcagcagatgcagaagctgctgctggagtacaaggcccggctggaggacagcgaggagcggctgcggcggcagcaggaggagaaggacagccagatgaagagcatcatcagccggctgatggctgtggaggaggagctgaagaaggaccacgccgagatgcaggccgtgattgatgccaagcagaagatcattgatgcccaggtgatcaatggagatgagatcatccagacaggcaagacagacagagtgcccggcttcagccagcaccagacagatgaaagagctgaccccagcgagggcgctgtgcagcacgccggcccccagtggcacctgccccaccagccccaccaggccttccaccacggggagtggtag

SEQ ID NO: 266886 - DNA, 2082 bp, Artificial Sequence
  derived and/or modified sequence
tgagaggtgttcgccagctggaagcagcagtgcctgaaccggggcaagcaggatatatcggaacgcctcatcagcgcatccctgtttttgcgctttctgtgcccggcaatcatgtctccgtccttgtttaatctcatgcaggagtatcctgatgatagaacgagtcgaaccctgacactgatcgcgaaggtaattcagaaccttgcaaattttgctaagttcggtaacaaagaagagtacatggcctttatgaacgactttcttgaacatgaatggggtgggatgaaaaggtttttactcgaaatatctaaccccgacacgatatccaacacccccgggttcgacggctatattgacctcgggagagaactatccgttcttcactcgctactctgggaggtcgtaagccagctggacaaaggggagaatagcttcctgcaggctactgtggctaaactgggccccttacctagagttctggccgatattaccaaatctctcacgaacccaacccccatccaacagcagctgagaagattcactgagcataactcttctcctaatgtctccggctcattatcttcgggattacagaaaatctttgaggatcccacagacagcgatttacacaaactaaagagtccctcccaggacaacaccgacagctactttcgtgggaaaaccctattgcttgtgcagcaagcaagctcccagagtatgacatactcagagaaggatgagcgggaatcgtctttgccgaacggaagatcagtctctctaatggacttacaggatacacacgccgcgcaggtggaacacgcgtctgtcatgctggacgtgcctatcaggctgacaggaagccagctctccatcactcaggtggcatctataaaacagctccgagaaacccaatctacaccacagtcggccccccaagtgcgccgccccctccaccccgctctaaaccagcctggcggtcttcagccactctctttccagaaccccgtgtaccatctgaacaaccccatccctgcgatgccaaaagcttctatcgactccagcctggagaacctgagcacggcttccagcagaagccagtccaatagtgaagattttaaactgtcagggccctcaaacagttctatggaggacttcactaaacggtcgacacagtcagaggactttagtcgccgacataccgtgccagaccgccatattcccctagcgctgcccaggcagaacagcactgggcaggctcagataaggaaggtggaccagggagggctgggcgcgcgtgcaaaagcccctccctccctgccccacagtgcttcactgaggagcaccggctccatgtccgtggtatccgccgccttagtggctgaaccggtacagaatggctctaggtccagacagcagagcagcagcagtagagagtcaccagttccaaaggttcgtgcaatacagcgacagcaaacacagcaggtgcagagtccagtagattctgcgaccatgagcccagtggagcgtacagcagcttgggtgctgaacaatggacaatatgaggaggacgtcgaagagactgaacagaacttggatgaagccaagcacgctgagaaatacgagcaagaaataaccaagctgaaagaacgattacgggtatcctcaaggaggctcgaagaatacgagcgcaggctgctcgtgcaggagcagcagatgcaaaagttgctactggagtacaaagctcgcctggaagacagcgaagagcgccttcgccggcagcaagaggaaaaggatagccagatgaagtctatcatatcacgacttatggcagtggaagaagaactgaagaaggatcatgccgaaatgcaggccgtcatcgatgccaaacagaagattattgacgcacaggtgatcaatggtgatgaaatcatccaaacaggcaaaacagatcgggtgcccggcttcagccaacaccaaactgacgagcgcgctgacccttctgaaggtgctgtccagcacgctggaccccagtggcatctgccccatcagccacaccaggctttccaccacggcgagtggtag

SEQ ID NO: 266887 - DNA, 2082 bp, Artificial Sequence
  derived and/or modified sequence
tgagaagtctttgcctcttggaagcagcagtgtctgaaccgtggcaagcaggatataagcgagagactgatatcggctagcctttttctacgctttttgtgtcccgcaattatgtcgccttccctgttcaaccttatgcaagagtatcctgacgaccggacctctcgaacgctcacactgatagctaaggttattcagaacttagcgaatttcgcaaaatttggcaacaaagaggagtacatggccttcatgaatgacttcctggagcacgaatggggcggaatgaagcgattcctactcgagatctcaaatcctgacacaatatcaaacacacccggtttcgatggatatattgacctgggacgggagctctccgtcctccactctctgctgtgggaggtggtatcgcagctcgataaaggcgagaacagttttctgcaggccacagttgcaaaactcgggccactcccccgtgtactggccgacatcaccaagagcttgaccaaccccactccaattcagcagcaattaaggcgattcactgagcataatagttccccaaacgtgtctggcagtctgagctccgggctgcagaagatttttgaagatcccacagattctgacctgcataagttaaagagccctagccaggacaatacagacagctattttcgcggtaaaacccttctgttggtccagcaggcctcctcccagagtatgacctactctgaaaaggacgaacgcgagagctcattgccgaatggtcgctccgtctctcttatggatttgcaagatacgcacgctgcccaggtcgaacacgcaagcgtgatgcttgacgtccctatccgtctgacaggttctcagctttcaatcacacaggtggcctctatcaagcagcttagagagacccagtctacaccccagagcgcccctcaggtaaggaggcctctgcatcctgctctaaatcagcctgggggactacagcctctcagcttccagaatccggtgtaccatctgaataaccctatcccagccatgccaaaggccagtattgatagcagcttagaaaacctgagcacggcatcttcccggagccagtcaaacagcgaagacttcaagctgtcaggtccaagtaacagctctatggaggatttcacaaaaagatctacccaaagtgaagattttagtcgccgacacactgtcccagataggcacataccactcgcgctgcccaggcagaacagcactggccaggcacagatccgcaaggtagatcaaggtgggctcggagccagggcgaaggccccaccttctctgccccacagtgcgtcccttcgcagtacaggatctatgtcggtggtgagtgctgccttagtggccgaaccagtccaaaacggctcacgctcccggcagcagtccagcagcagccgggaaagcccagttcccaaagtgcgtgccattcagagacagcaaacccagcaagtgcagtccccagtcgactcggcaactatgtcccccgtggaaaggaccgccgcttgggtgctaaataacggccagtacgaagaggacgtggaggagactgagcagaacctggatgaggctaaacacgctgaaaagtacgagcaggaaataaccaaacttaaggaaagactaagagtcagtagtagacggctggaggagtacgagagaagattacttgtgcaagaacagcagatgcagaaactgctcttagagtacaaagcaagactggaggacagcgaggagaggctgcgacgccagcaggaagaaaaagattcccagatgaagagcatcatttcccgcctgatggcggtggaagaggagcttaagaaagatcacgctgagatgcaagctgttatcgacgccaaacagaagattatagatgctcaagtgatcaacggggatgaaatcatccaaaccggaaagactgatagggtgcccggtttctctcaacaccaaacagatgagagggctgatccatcagagggggcagtacagcatgcagggcctcagtggcacctgcctcatcagccccatcaggcgttccaccatggcgaatggtag

SEQ ID NO: 266888 - DNA, 2385 bp, Artificial Sequence
  derived and/or modified sequence
agaagtgtttgcatcatggaagcagcagtgcctgaaccgtggcaagcaagacatcagcgagaggctcatcagtgcctcattatttctccgttttctgtgtccagccattatgtctcccagtcttttcaaccttatgcaggagtatcctgatgaccgcacatctcggactctaactcttattgccaaggtcattcagaacctggccaactttgccaagtttggtaacaaagaggaatacatggcattcatgaatgattttttagaacatgaatggggtggaatgaagcgctttcttttggagatctctaatccagacaccatctcaaacaccccaggctttgatggttacattgatctgggccgagagctttcagttttgcattccttactgtgggaagtagtttcccaacttgataagggtgaaaattccttcctacaggcgaccgtggcaaaattggggcctctccctcgtgttcttgctgatattaccaagtcattgactaatcctacgccaatacaacagcaactgagacgcttcactgaacataactccagtccaaatgtcagtggaagcctctcctctgggctgcagaaaatatttgaagaccccactgacagtgatttgcataaactaaaatctccaagccaggacaacacagacagctacttcagagggaaaacattattgctggttcagcaagcctcctctcagagcatgacttattctgaaaaggatgaaagggaaagtagccttcctaatggtcggagcgtctccctcatggacctccaggacactcatgctgctcaagtggagcatgcatctgtcatgcttgatgtgcctatacgcttgaccggaagccagctttccataacccaggtggccagcatcaaacagctgcgggaaacccagagcactccccaaagtgcaccccaagtgagaaggcccctgcacccagccttgaaccagccaggtggccttcagcccttgtcgttccagaaccctgtctatcacctcaataacccaattccagcaatgccaaaggcctctatagattccagtttggagaacctaagcactgccagttccagaagccaaagtaacagtgaagacttcaagctcagtggacccagcaatagcagcatggaagatttcactaaacgtagcactcagagtgaggacttctccaggcggcacacggtgccagatagacacatacctcttgctttgccacgacaaaatagtactgggcaggcccagatccgaaaagtggaccagggtgggttaggtgcccgagccaaagccccaccatccctgccacacagtgcttctttacgtagcaccgggagcatgtcagtggtgtccgcagccctggtggccgaacctgtgcagaatgggagccggtcccggcagcagtcctcttcctccagagagagccctgttcccaaagttagagcaatccagagacaacagacacagcaggttcagtcacctgtggactctgccacaatgtccccagtagagaggacagcagcctgggttctgaacaatgggcagtatgaagaggatgtggaagaaactgagcaaaatctagatgaagccaagcatgctgagaagtatgaacaagaaattactaaactgaaggagcgcctgagagtttccagccggcgactggaggaatatgaacgccgcttgctggtgcaggagcagcagatgcagaagctgctgctggaatacaaggcccgactggaggacagcgaggagcggctccgaagacagcaggaagaaaaagatagccagatgaaaagcatcatcagcaggctaatggctgtggaagaggaactgaagaaggatcatgctgagatgcaagcagttattgatgcaaagcagaaaataattgatgcacaggtcataaatggagatgagattattcaaacaggaaaaacggatcgtgtccctggattcagccaacaccagactgatgagcgcgctgacccaagtgaaggagcggtacagcatgcaggtccgcaatggcatctcccccaccaaccccaccaagctttccatcacggagaatggtgaattcaaaaacagcagctgctgacgggctttgtctgtggaaggagacagaaggaaattgacccactctcctatctccagacctttacctagcccctccaggtttacagaatgttgctacttcacaatggcgatgtggtgagaaactcctgaatgaagaaaggaaccttgtctttcagggcataaggcggcgacttccaaggtcaatgcttttcccccacatctctatgtacatagggaacttagttctgggccatgtacagaaaatatcactgtaatataccaaaaggaagttaataatgtagatt

SEQ ID NO: 266889 - DNA, 174 bp, Artificial Sequence
  derived and/or modified sequence
atgagcatgagaagccccatcagcgcccagctggccctggacggcgtgggcaccatggtgaactgcaccatcaagagcgaggagaagaaggagccctgccacgaggccccccagggcagcgccaccgccgccgagccccagcccggcgaccccgccagagccagccaggactag

SEQ ID NO: 266890 - DNA, 543 bp, Artificial Sequence
  derived and/or modified sequence
atgagcatgagaagccccatcagcgcccagctggccctggacggcgtgggcaccatggtgaactgcaccatcaagagcgaggagaagaaggagccctgccacgaggccccccagggcagcgccaccgccgccgagccccagcccggcgaccccgccagagccagccaggacagcgccgacccccaggcccccgcccagggcaacttcagaggcagctgggactgcagcagccccgagggcaacggcagccccgagcccaagagacccggcgtgagcgaggccgccagcggcagccaggagaagctggacttcaacagaaacctgaaggaggtggtgcccgccatcgagaagctgctgagcagcgactggaaggagagattcctgggcagaaacagcatggaggccaaggacgtgaagggcacccaggagagcctggccgagaaggagctgcagctgctggtgatgatccaccagctgagcaccctgagagaccagctgctgaccgcccacagcgagcagaagaacatggccgccatgctgtag

SEQ ID NO: 266891 - DNA, 174 bp, Artificial Sequence
  derived and/or modified sequence
atgagtatgcggagtcccataagtgcccagctggccttggacggcgtcggaactatggtcaactgtacaatcaaatctgaggagaagaaagaaccatgccacgaggcgccccagggttcagcaacagctgccgagcctcaacccggagatccagcacgtgccagtcaggattag

SEQ ID NO: 266892 - DNA, 543 bp, Artificial Sequence
  derived and/or modified sequence
atgtctatgcggagtccgataagcgcccaactagcgcttgatggcgttggcactatggtcaactgtactatcaaaagtgaggaaaaaaaagagccttgccatgaagcgccccagggatccgccactgccgcagagccccagcctggagaccccgctcgggcctcccaggattcagccgacccacaggccccggcccagggcaattttcggggaagctgggactgttcttctccggagggtaacgggagcccagaaccaaagcgcccaggagtcagtgaggcagccagcggctcgcaagagaaattggactttaatcggaacctgaaagaagtcgtgccagcgatcgagaagctcctgtcctcggattggaaggaacgctttcttggccgcaattccatggaggccaaagacgttaagggtactcaagagagcttagcagaaaaagagctacagctcttagtaatgatacatcaactctccactttacgagaccagctcttgacagcacactctgagcaaaagaatatggcagctatgttgtag

SEQ ID NO: 266893 - DNA, 174 bp, Artificial Sequence
  derived and/or modified sequence
atgtccatgaggagccccatcagcgcccagctggccctggatggagtgggcaccatggtgaactgcaccatcaagtctgaggagaagaaggagccctgccacgaggccccccagggcagcgccacagctgctgagccccagcccggggaccctgcccgggccagccaggactag

SEQ ID NO: 266894 - DNA, 543 bp, Artificial Sequence
  derived and/or modified sequence
atgtccatgaggagccccatcagcgcccagctggccctggatggagtgggcaccatggtgaactgcaccatcaagtctgaggagaagaaggagccctgccacgaggccccccagggcagcgccacagctgctgagccccagcccggggaccctgcccgggccagccaggacagcgctgacccccaggccccagcccagggcaacttccggggctcctgggactgcagcagccctgagggcaatggcagccctgagcccaagaggcctggggtgtctgaggccgccagcggcagccaggagaagctggacttcaacagaaacctgaaggaggtggtgcctgccatcgagaagctgctgagcagtgactggaaggagcgcttcctgggcaggaacagcatggaggccaaggatgtgaagggcacccaggagagcctggccgagaaggagctgcagctgctggtgatgatccaccagctgagcaccctgcgggaccagctgctgacagcccacagcgagcagaagaacatggccgccatgctgtag

SEQ ID NO: 266895 - DNA, 174 bp, Artificial Sequence
  derived and/or modified sequence
atgagcatgcggagccccatcagcgcccagctggccctggacggcgtaggtacgatggtgaactgcactatcaagagcgaggagaaaaaggagccttgtcacgaagcaccacagggcagtgccactgcagccgagccccagccgggggacccagcaagagctagccaggattag

SEQ ID NO: 266896 - DNA, 543 bp, Artificial Sequence
  derived and/or modified sequence
atgagcatgcggagccccatcagcgcccagctggccctggacggcgtcggaactatggttaattgcacaatcaaatccgaggagaaaaaagagccctgtcacgaagcccctcaaggatctgccaccgctgccgaacctcaaccaggcgatcccgctcgggcaagtcaggacagcgctgacccacaagctcctgcgcagggaaacttccgggggtcctgggattgttcttcccctgaaggaaatggatcccctgagcccaaacgcccgggcgtttcagaggccgcctcagggagccaagagaagctggatttcaataggaatctcaaagaagtggtccccgctattgagaaactgctgtctagcgactggaaggaaagattcctggggcggaattctatggaggccaaggatgtcaaagggactcaggagtcattggccgaaaaggaactccaactgttagtcatgatccaccaacttagtacactcagagaccagcttctgactgcccattcggagcagaagaatatggccgccatgctatag

SEQ ID NO: 266897 - DNA, 174 bp, Artificial Sequence
  derived and/or modified sequence
atgagcatgcggagccccatatcggctcagctggcccttgacggcgtgggaacaatggtgaactgtacaatcaagagcgaggaaaaaaaggagccctgtcatgaggccccacagggtagcgctaccgccgctgaaccccagccaggcgaccccgcacgtgcctcgcaggattag

SEQ ID NO: 266898 - DNA, 543 bp, Artificial Sequence
  derived and/or modified sequence
atgtcaatgaggtccccaatttcagcccagttagctttggacggtgtggggaccatggtgaactgtaccatcaaaagcgaggaaaaaaaggagccgtgccatgaggcaccacaggggtcagcaacggcagcggaaccccaaccaggggacccggcacgggcatcccaagacagcgctgacccccaagccccagcacaagggaattttcgcggttcatgggactgtagctcacctgagggaaatggcagcccggaaccaaagcgcccaggagtgagtgaggctgcctcaggatcccaggaaaagcttgatttcaatagaaatttaaaggaagtggtcccagcaattgagaaactgctatcttcggattggaaagagcgttttctgggcaggaatagcatggaggccaaagatgtgaaggggacccaagaatcactcgccgaaaaggagcttcagcttcttgttatgatccaccagctgtcgactttgagagaccaattacttaccgcgcactcagagcagaagaacatggcagctatgctgtag

SEQ ID NO: 266899 - DNA, 538 bp, Artificial Sequence
  derived and/or modified sequence
acgcgggtcgagcttagggtgcacccccaacccgctcctcgccgaccgcagaggactaggtctttctcatcagcccgactatgcgcctagtttaaggatttctcagcgggaagccgaagcgacctgcgcgcgtcctgcgtggggctcaggtgcctgcgacgaggcgcagagctcctccaccatggttgcgtggggtgctgggggacagacgcgctccccttgccacggtttcagggtcgttccccagcggaccagaccagcgcggcatcctgtttgttttctgctccggctgctcctgtcccacccccacccccaccgcaggctgcttcttgctacccccacctcccgccctgggatatcgtaggatgtccatgaggagccccatctctgcccagctggccctggatggcgttggcaccatggtgaactgcaccatcaagtcagaggagaagaaagagccttgccacgaggccccccagggctcagccactgccgctgaacctcagcctggagacccagcccgggcctcccaggatag

SEQ ID NO: 266900 - DNA, 597 bp, Artificial Sequence
  derived and/or modified sequence
agaactgttgggaggctaatggctgatgatgtctgcggcagcagtgctccatgaatggatgtccatgaggagccccatctctgcccagctggccctggatggcgttggcaccatggtgaactgcaccatcaagtcagaggagaagaaagagccttgccacgaggccccccagggctcagccactgccgctgaacctcagcctggagacccagcccgggcctcccaggatagtgctgacccccaagctccagcccaggggaatttcaggggctcctgggactgtagctctccagagggtaatgggtccccagaacccaagagaccaggagtgtcggaggctgcctctggaagccaggagaagctggacttcaaccgaaatttgaaagaagtggtgccagccatagagaagctgttgtccagtgactggaaggagaggtttctaggaaggaactctatggaagccaaagatgtcaaagggacccaagagagcctagcagagaaggagctccagcttctggtcatgattcaccagctgtccaccctgcgggaccagctcctgacagcccactcggagcagaagaacatggctgccatgct

SEQ ID NO: 266901 - protein, 169 aa, Artificial Sequence
  derived and/or modified sequence
MCSRGWDSCLALELLLLPLSLLVTSIQGHLVHMTVVSGSNVTLNISESLPENYKQLTWFYTFDQKIVEWDSRKSKYFESKFKGRVRLDPQSGALYISKVQKEDNSTYIMRVLKKTGNEQEWKIKLQVLGESGEPKSKSPLQWPQMDHCRASWEAWGTLGEEERKTSGQV

SEQ ID NO: 266902 - DNA, 510 bp, Artificial Sequence
  derived and/or modified sequence
atgtgtagcaggggatgggattcctgcctggctctggagctccttctgttacctctgtcgctgctggtcaccagtattcaaggacacttagtgcatatgacagtggtgtcaggaagtaacgtgacgctgaacatttcagaatctcttccagaaaattacaagcaactgacctggttctatacctttgatcaaaaaattgtcgagtgggactcgcgcaaaagtaaatacttcgagagcaagttcaaagggcgggtcaggctcgacccacagagcggagctctgtatatatctaaggtacagaaggaagataatagtacttacatcatgagggtgctcaaaaaaacaggcaatgaacaggagtggaagatcaagctgcaggtgttgggagagagtggcgagcctaagtccaagtcgccgctacagtggcctcagatggatcactgtcgcgcttcctgggaggcatggggcacgctgggagaggaggagcgtaagacatccgggcaggtatag

SEQ ID NO: 266903 - DNA, 510 bp, Artificial Sequence
  derived and/or modified sequence
atgtgcagccggggctgggacagctgcctggccctggagctgctgctgctgcccctgagcctgctggtgaccagcatccagggccacctggtgcacatgacagtggtgtctggcagcaatgtgaccctgaacatcagcgagagcctgcctgagaactacaagcagctgacctggttctacacctttgaccagaagatcgtggagtgggacagcaggaagagcaagtactttgagagcaagttcaagggccgggtgcggctggacccccagagcggggccctgtacatcagcaaggtgcagaaggaggacaacagcacctacatcatgagggtgctgaagaagacaggaaatgagcaggagtggaagatcaagctgcaggtgctgggggagagcggggagcccaagagcaagagccccctgcagtggccccagatggaccactgccgggcctcctgggaggcctggggcaccctgggggaggaggagaggaagaccagcggccaggtgtag

SEQ ID NO: 266904 - DNA, 510 bp, Artificial Sequence
  derived and/or modified sequence
atgtgcagccggggctgggacagctgcctggccctggagctgctgctgctgcctctgtcgctgctagtgacctctatccaggggcacctggtgcatatgacagtagtgtcaggctcaaacgtgactctcaatatttctgaaagcctgcccgagaattacaaacagctaacctggttctacaccttcgatcaaaagatagttgagtgggattcacggaagtccaaatatttcgagtctaagttcaaggggcgcgtgagactcgacccccaatccggagcactgtacatttccaaagtgcagaaagaggacaactccacatacattatgcgggtgctaaaaaaaacgggaaatgagcaggaatggaagatcaagctacaggtgctaggggagtctggagagcctaaatctaagtcaccactccagtggccccagatggaccactgcagggccagctgggaggcctggggaaccctaggagaggaagagcgcaagacctctggccaggtgtag

SEQ ID NO: 266905 - DNA, 510 bp, Artificial Sequence
  derived and/or modified sequence
atgtgctcgcgcggttgggatagctgcttggccctcgaactattgctgctgcccttgtcactgctggtaacctctatccagggacatctcgttcacatgactgtcgtgtccgggtccaatgtgaccctgaacatatcagaatcgcttcctgaaaactataaacagctcacatggttctacactttcgaccagaagattgttgagtgggacagcaggaagagcaagtatttcgagtcgaaattcaagggccgtgtgagactggatcctcagagcggcgctctttatattagcaaggtccagaaagaggataattctacatatatcatgcgggtgctcaaaaagaccggtaatgagcaggaatggaaaatcaagctccaagtcctgggtgagtcgggcgagccaaaaagtaagagtccattacagtggccccaaatggatcattgcagagcctcatgggaagcttggggcaccctgggggaggaagaacgcaaaacgagcgggcaggtatag

SEQ ID NO: 266906 - DNA, 1793 bp, Artificial Sequence
  derived and/or modified sequence
caactgtctcctgcgttgctgggaagttctggaaggaagcatgtgctccagaggttgggattcgtgtctggctctggaattgctactgctgcctctgtcactcctggtgaccagcattcaaggtcacttggtacatatgaccgtggtctccggcagcaacgtgactctgaacatctctgagagcctgcctgagaactacaaacaactaacctggttttatactttcgaccagaagattgtagaatgggattccagaaaatctaagtactttgaatccaaatttaaaggcagggtcagacttgatcctcagagtggcgcactgtacatctctaaggtccagaaagaggacaacagcacctacatcatgagggtgttgaaaaagactgggaatgagcaagaatggaagatcaagctgcaagtgcttggtgagtcaggggagccaaagagcaaatccccactccagtggccccagatggaccactgtagggcttcctgggaggcatggggcactctcggggaggaggagagaaaaacctcaggacaggtttgattcatttttccttgatccaattctatttgggagtgagcctaggtcaacagatatccaaattaacaatcttaggacatttaacacctcttctgaagttagtgagtctaagctttgaagagaaggaaaactagagatttttcctatttccttcattttgtcctgtgatcaacctaaatcagctcagctcatcttgattatatctccgaaattaggcttcattggacttaagaaaaaagagaatgtattaatataaagaatggggcaggagttatcaggagaatttttcaactttcataatgggcaggacaaaaaaacttccactcatagctccagtctaaccagtgtatatggaataaggactcaggcattatacctggagccagacagacttgggttcaaaactggtcagttgctcactagctgtgcagccttgaaaaaagatcttcacatctctgtgcccatattaggtaagattcttttgatagcaaataacagaaactaattcaatgtacctttaccaaaaaaggagaatttagtttaagaaactagggctatttaaagcaattcaaagagtttaaaagagctaggaagggcttaaggggagaagattgaaaaccaggttcgggccagaacccctagcttcaggaatctgtggactgtgcctatggatttggattcctgccattttacacatgttatctctcaaaacttagacttttgctcctctgagtttcaattctcagggcaatttaaagagagagaaactgatagtcccaatttagttcaggtgtgtgtacctgatctaaacatttttggtgaaaggatcagattatagggcagaaacatggatatggggaggggctccaggggttggggtatgcaattcttgtagaagagcggggctaaataatccaagagtggtgttcccttgagagccttgggttcttcatcatattatgagaataattctacttacctttcaggatgttattagagtcaaagtagataaggaaagtgaaaacattttttaaaatgtcaaaacatgcaaatgaagagtgttgtatacattcaagttccaccagccagacagtccctgatccaagcagtcagattccccttctaactcttcttccatgtcatatgggctgaaaattcagaaagtcctgggaacaaaaagattcaaggtctcttacagtggtgttctggttaacaagctctacaagatttaaaaaaaaaaaaaaaa

SEQ ID NO: 266907 - DNA, 510 bp, Artificial Sequence
  derived and/or modified sequence
atgtgcagcagaggctgggacagctgcctggccctggagctgctgctgctgcccctgagcctgctggtgaccagcatccagggccacctggtgcacatgaccgtggtgagcggcagcaacgtgaccctgaacatcagcgagagcctgcccgagaactacaagcagctgacctggttctacaccttcgaccagaagatcgtggagtgggacagcagaaagagcaagtacttcgagagcaagttcaagggcagagtgagactggacccccagagcggcgccctgtacatcagcaaggtgcagaaggaggacaacagcacctacatcatgagagtgctgaagaagaccggcaacgagcaggagtggaagatcaagctgcaggtgctgggcgagagcggcgagcccaagagcaagagccccctgcagtggccccagatggaccactgcagagccagctgggaggcctggggcaccctgggcgaggaggagagaaagaccagcggccaggtgtag

SEQ ID NO: 266908 - protein, 605 aa, Artificial Sequence
  derived and/or modified sequence
MEVRASLQKIVSNGDEQLEKAMEEILRDSEKRPSSLLVDCQSSSEISDHSFGDIPASQTNKPSLQLILDPSNTEISTPRPSSPGGLPEEDSVLFNKLTYLGCMKVSSPRNEVEALRAMATMKSSSQYPFPVTLYVPNVPEGSVRIIDQSSNVEIASFPIYKVLFCARGHDGTTESNCFAFTESSHGSEEFQIHVFSCEIKEAVSRILYSFCTAFKRSSRQVSDVKDSVIPTPDSDVFTFSVSLEVKEDDGKGNFSPVPKDRDKFYFKLKQGIEKKVVITVQQLSNKELAIERCFGMLLSPGRNVKNSDMHLLDMESMGKSYDGRAYVITGMWNPNAPVFLALNEETPKDKQVYMTVAVDMVVTEVVEPVRFLLETVVRVYPANERFWYFSRKTFTETFFMRLKQSEGKGHTNAGDAIYEVVSLQRESDKEEPVTPTSGGGPMSPQDDEAEEESDNELSSGTGDVSKDCPEKILYSWGELLGKWHSNLGARPKGLSTLVKSGVPEALRAEVWQLLAGCHDNQAMLDRYRILITKQQMKFSLTPRQTIHLVKYEGSMKVSMTPCNQLQFDIRLDVLITYTFCFSSFPEPELYKYVLKHQLIKRLNAC

SEQ ID NO: 266909 - DNA, 1077 bp, Artificial Sequence
  derived and/or modified sequence
atgtacgccagccagtggttcctgaccctgttcaccgccaagttccccctgtgcatggtgttccacatcatcgacctgctgctgtgcgagggcctgaacatcatcttccacgtggccctggccctgctgaagaccagcaaggaggacctgctgcaggccgacttcgagggcgccctgaagttcttcagagtgcagctgcccaagagatacagagccgaggagaacgccagaagactgatggagcaggcctgcaacatcaaggtgcccaccaagaagctgaagaagtacgagaaggagtaccagaccatgagagagagccagctgcagcaggaggaccccatggacagatacaagagagagaacagaagactgcaggaggccagcatgagactggagcaggagaacgacgacctggcccacgagctggtgaccagcaagatcgccctgagaaacgacctggaccaggccgaggacaaggccgacgtgctgaacaaggagctgctgctgaccaagcagagactggtggagaccgaggaggagaagagaaagcaggaggaggagaccgcccagctgaaggaggtgttcagaaagcagctggagaaggccgagtacgagatcaagaagaccaccgccatcatcgccgagtacaagcagatctgcagccagctgagcaccagactggagaagcagcaggccgccagcaaggaggagctggaggtggtgaagggcaagatgatggcctgcaagcactgcagcgacatcttcagcaaggagggcgccctgaagctggccgccaccggcagagaggaccagggcatcgagaccgacgacgagaaggacagcctgaagaagcagctgagagagatggagctggagctggcccagaccaagctgcagctggtggaggccaagtgcaagatccaggagctggagcaccagagaggcgccctgatgaacgagatccaggccgccaagaacagctggttcagcaagaccctgaacagcatcaagaccgccaccggcacccagcccctgcagcccgcccccgtgacccagccccccaaggagagcacctag

SEQ ID NO: 266910 - DNA, 1137 bp, Artificial Sequence
  derived and/or modified sequence
atgaaggagcagctgcccgacctgcacagccacttcagcgacctgaacctggaggcccacatgtacgccagccagtggttcctgaccctgttcaccgccaagttccccctgtgcatggtgttccacatcatcgacctgctgctgtgcgagggcctgaacatcatcttccacgtggccctggccctgctgaagaccagcaaggaggacctgctgcaggccgacttcgagggcgccctgaagttcttcagagtgcagctgcccaagagatacagagccgaggagaacgccagaagactgatggagcaggcctgcaacatcaaggtgcccaccaagaagctgaagaagtacgagaaggagtaccagaccatgagagagagccagctgcagcaggaggaccccatggacagatacaagagagagaacagaagactgcaggaggccagcatgagactggagcaggagaacgacgacctggcccacgagctggtgaccagcaagatcgccctgagaaacgacctggaccaggccgaggacaaggccgacgtgctgaacaaggagctgctgctgaccaagcagagactggtggagaccgaggaggagaagagaaagcaggaggaggagaccgcccagctgaaggaggtgttcagaaagcagctggagaaggccgagtacgagatcaagaagaccaccgccatcatcgccgagtacaagcagatctgcagccagctgagcaccagactggagaagcagcaggccgccagcaaggaggagctggaggtggtgaagggcaagatgatggcctgcaagcactgcagcgacatcttcagcaaggagggcgccctgaagctggccgccaccggcagagaggaccagggcatcgagaccgacgacgagaaggacagcctgaagaagcagctgagagagatggagctggagctggcccagaccaagctgcagctggtggaggccaagtgcaagatccaggagctggagcaccagagaggcgccctgatgaacgagatccaggccgccaagaacagctggttcagcaagaccctgaacagcatcaagaccgccaccggcacccagcccctgcagcccgcccccgtgacccagccccccaaggagagcacctag

SEQ ID NO: 266911 - DNA, 1818 bp, Artificial Sequence
  derived and/or modified sequence
atggaggtgagagccagcctgcagaagatcgtgagcaacggcgacgagcagctggagaaggccatggaggagatcctgagagacagcgagaagagacccagcagcctgctggtggactgccagagcagcagcgagatcagcgaccacagcttcggcgacatccccgccagccagaccaacaagcccagcctgcagctgatcctggaccccagcaacaccgagatcagcacccccagacccagcagccccggcggcctgcccgaggaggacagcgtgctgttcaacaagctgacctacctgggctgcatgaaggtgagcagccccagaaacgaggtggaggccctgagagccatggccaccatgaagagcagcagccagtaccccttccccgtgaccctgtacgtgcccaacgtgcccgagggcagcgtgagaatcatcgaccagagcagcaacgtggagatcgccagcttccccatctacaaggtgctgttctgcgccagaggccacgacggcaccaccgagagcaactgcttcgccttcaccgagagcagccacggcagcgaggagttccagatccacgtgttcagctgcgagatcaaggaggccgtgagcagaatcctgtacagcttctgcaccgccttcaagagaagcagcagacaggtgagcgacgtgaaggacagcgtgatccccacccccgacagcgacgtgttcaccttcagcgtgagcctggaggtgaaggaggacgacggcaagggcaacttcagccccgtgcccaaggacagagacaagttctacttcaagctgaagcagggcatcgagaagaaggtggtgatcaccgtgcagcagctgagcaacaaggagctggccatcgagagatgcttcggcatgctgctgagccccggcagaaacgtgaagaacagcgacatgcacctgctggacatggagagcatgggcaagagctacgacggcagagcctacgtgatcaccggcatgtggaaccccaacgcccccgtgttcctggccctgaacgaggagacccccaaggacaagcaggtgtacatgaccgtggccgtggacatggtggtgaccgaggtggtggagcccgtgagattcctgctggagaccgtggtgagagtgtaccccgccaacgagagattctggtacttcagcagaaagaccttcaccgagaccttcttcatgagactgaagcagagcgagggcaagggccacaccaacgccggcgacgccatctacgaggtggtgagcctgcagagagagagcgacaaggaggagcccgtgacccccaccagcggcggcggccccatgagcccccaggacgacgaggccgaggaggagagcgacaacgagctgagcagcggcaccggcgacgtgagcaaggactgccccgagaagatcctgtacagctggggcgagctgctgggcaagtggcacagcaacctgggcgccagacccaagggcctgagcaccctggtgaagagcggcgtgcccgaggccctgagagccgaggtgtggcagctgctggccggctgccacgacaaccaggccatgctggacagatacagaatcctgatcaccaagcagcagatgaagttcagcctgacccccagacagaccatccacctggtgaagtacgagggcagcatgaaggtgagcatgaccccctgcaaccagctgcagttcgacatcagactggacgtgctgatcacctacaccttctgcttcagcagcttccccgagcccgagctgtacaagtacgtgctgaagcaccagctgatcaagagactgaacgcctgctag

SEQ ID NO: 266912 - DNA, 1134 bp, Artificial Sequence
  derived and/or modified sequence
atggagcagctgcccgacctgcacagccacttcagcgacctgaacctggaggcccacatgtacgccagccagtggttcctgaccctgttcaccgccaagttccccctgtgcatggtgttccacatcatcgacctgctgctgtgcgagggcctgaacatcatcttccacgtggccctggccctgctgaagaccagcaaggaggacctgctgcaggccgacttcgagggcgccctgaagttcttcagagtgcagctgcccaagagatacagagccgaggagaacgccagaagactgatggagcaggcctgcaacatcaaggtgcccaccaagaagctgaagaagtacgagaaggagtaccagaccatgagagagagccagctgcagcaggaggaccccatggacagatacaagagagagaacagaagactgcaggaggccagcatgagactggagcaggagaacgacgacctggcccacgagctggtgaccagcaagatcgccctgagaaacgacctggaccaggccgaggacaaggccgacgtgctgaacaaggagctgctgctgaccaagcagagactggtggagaccgaggaggagaagagaaagcaggaggaggagaccgcccagctgaaggaggtgttcagaaagcagctggagaaggccgagtacgagatcaagaagaccaccgccatcatcgccgagtacaagcagatctgcagccagctgagcaccagactggagaagcagcaggccgccagcaaggaggagctggaggtggtgaagggcaagatgatggcctgcaagcactgcagcgacatcttcagcaaggagggcgccctgaagctggccgccaccggcagagaggaccagggcatcgagaccgacgacgagaaggacagcctgaagaagcagctgagagagatggagctggagctggcccagaccaagctgcagctggtggaggccaagtgcaagatccaggagctggagcaccagagaggcgccctgatgaacgagatccaggccgccaagaacagctggttcagcaagaccctgaacagcatcaagaccgccaccggcacccagcccctgcagcccgcccccgtgacccagccccccaaggagagcacctag

SEQ ID NO: 266913 - DNA, 1744 bp, Artificial Sequence
  derived and/or modified sequence
gcacatttggctatttttcaaagagagcatgtagttcaagaaatggcttattttgttttttattcttctttttgtggtctatttaggaaaacaaaatgaaggaacagctaccggacctgcatagccatttttctgatctgaacctggaagctcatatgtatgcatcccagtggtttctcactctttttactgccaagttcccactctgcatggtgttccacatcattgacttactgctttgtgagggtttgaacataatctttcatgtagctttggctctcctaaagacctcaaaggaagaccttctgcaggctgattttgaaggtgctttaaagttctttagagttcagcttccaaagagatacagggcagaggaaaatgcaagaagactgatggagcaggcttgcaatattaaagtaccaaccaagaagctgaagaaatatgagaaagaatatcagacaatgcgagagagtcagctgcaacaggaagacccaatggatagatacaagagggagaaccgaagattacaggaggccagcatgaggttggaacaagagaatgatgaccttgcccatgaactagtaacaagcaaaattgctctacggaatgacttggatcaggcagaagacaaggcagatgtgttgaataaagagctccttttgaccaaacagaggctggtggagactgaagaggagaagaggaagcaagaggaagagactgcccagctaaaagaagtcttcaggaaacagctagagaaggcagaatatgaaataaagaagactacagctatcattgctgagtataaacagatctgttcgcagttgagtaccaggctggagaaacagcaagcagccagcaaggaggagctggaagtggtaaagggtaagatgatggcatgcaaacactgcagtgacattttcagcaaggagggtgctttgaaactagcagccacaggcagagaggaccagggaattgaaacagatgatgagaaggactcacttaagaagcagctgagagagatggaactggaactggcacaaaccaaactgcagttggtggaggccaagtgtaaaattcaggaacttgaacatcagagaggagcccttatgaatgaaatccaagctgcgaaaaactcttggtttagcaaaaccctgaactctatcaaaacggccacgggcacccagccattgcagccagcaccggtcacccagccacccaaggagagcacatagttccagccttacccaagcacaagagcacaatgttcaaaccaatggaaatctgggaggattcttcctggtgtccctttgaaggaaagtcaaggaggccagaaaacaagccagaatttttcagtagctctcactctttcttgtatgacacttttcaaagggatgctatttaaactgacctgttctatgttgaatacctattttccagcttctggaaggccatgttcagatccatcatagtattacacattattttgtttgcctgatgtttagttggaaataagtaattcagaactaaatgcttttttatttagaattattcataattatttttatcttacataaaaatggagacatctgttattccaaggttgaagtgataagaagatctttgtcacaggaaaaaaaaaattgaaacctaaacatcttaagttttcaggatttattcagataaagcacactgtggggccaggcatgaccactctcaggtttcctcctgagcctgattcccaggg

SEQ ID NO: 266914 - DNA, 2605 bp, Artificial Sequence
  derived and/or modified sequence
ggcctggacgagcgcgcttccgacccgccgccaccgcctcctcccctccttctcggcccgccccctccctcgcctcttcctgccaggcggcccttctcccctcccctctcagttccctccgccctcctcgggctccagcggtggcggagcgaacgggaccggcccggcttcagagcgcgaggtggagggtggaacgcgggcgcctgaaggagttgttgtctcggcagcgcccgcggagacgtgaagaggtggttgtgggaagagaagtttgcagaactgaaatggaggtcagagcttcattacagaagatagtttctaatggtgatgaacaattggaaaaagccatggaagagattttgagagattccgagaaaaggccaagcagtcttcttgttgattgtcaaagttccagtgagatttcagaccattcgtttggagatattccagccagccaaacaaataagccatctcttcagttaattttggatccgtctaacacagaaatttctacacccagaccatcttctccaggtggactacctgaagaagatagtgttttatttaataaactgacctacttaggatgtatgaaggtttcttccccacgtaatgaagtagaggctttacgggcaatggcaaccatgaaatcttccagtcaatacccctttcctgttaccctgtatgtaccaaatgttccagaaggttctgtgagaattatagaccaatccagcaatgtggagatagcatcttttccaatctataaggtgttattctgtgcacgtggacatgacggaacaacagagagcaattgctttgcatttacagagagttcccatggttcggaagaatttcagatacatgttttctcctgtgaaattaaagaggcagtaagcagaattttgtacagtttctgtacagcattcaaacgttcttccagacaagtgtctgatgttaaagactcagttattcctacccccgacagtgatgtgtttaccttcagtgtctccttggaggtaaaagaagacgatggaaaaggaaactttagccctgtgcctaaggatagagataaattttatttcaaattaaagcaaggaatagagaagaaggttgtgattacagtgcagcaactttctaacaaagaattagctattgaaagatgttttggaatgttattaagcccaggtcgaaacgtgaagaacagtgacatgcatttactggatatggaatccatgggaaagagctatgatgggagagcttatgtcatcactggcatgtggaaccccaatgcaccagtatttctggcacttaacgaggaaaccccaaaagataagcaagtatacatgactgtggcagtggatatggtagtcacagaggtggtggagcctgttcgctttctcctggagacagtagtccgtgtgtaccctgcaaatgagcgattttggtatttcagcagaaagactttcacagagactttcttcatgagattgaaacagtctgagggaaaaggccataccaatgctggagatgcaatatatgaggtggtgagtctacagcgagagtctgacaaggaggaaccagtcactcctactagtggagggggtccaatgtcaccccaggatgatgaagcagaagaggagagtgataatgaactctcaagtggaacaggtgatgtgtctaaggattgtcctgagaagatcctgtattcttggggagagttgctaggaaaatggcacagtaaccttggtgcacgaccgaaagggctgtctactctggtgaagagtggtgtccctgaagcattgagggcagaggtatggcagttattggcaggctgccatgacaaccaggcaatgctggatagataccgaattcttatcacaaagcaacagatgaaatttagtcttacaccgagacagactattcacctagttaaatatgaagggtctatgaaggtctccatgacaccctgtaaccagctgcaatttgacattagacttgatgttctgattacttatactttttgttttagttcctttcctgagcctgaattgtacaaatatgtcctaaaacaccaacttattaagaggcttaatgcctgttaaatgcgtcagtgctcttggcagcttagcatgagtgctttctttgcatgggaggttgcagtttagaagcaactttatggatcatttcccaggttgatgttacatatgttcattttacaacctgtgtgcataatctctcagggtgaaggtaattaagagaaagcataatctacagaattgaagccaagtaatctaagattctgtttttaaactctttgctatataacattagttaagttgtttaccctcttaatttatccatttgtaaaatgatagtttttgtttttaaagtgctctattacccttactttaaaagtcctgtctaccatatatttaaaactataagtggaaataatgaagaaactctgaacttgcttttgcttatatatggatatatcatattatatgcctaagattggagataaattttataacctgattttctcatggcagtgtacaaatgaaattattctgtaagtttttcaaaacagtaaaatcactatttttca

SEQ ID NO: 266915 - DNA, 1077 bp, Artificial Sequence
  derived and/or modified sequence
atgtatgcttctcagtggttcttgacattatttaccgcgaagttccccctttgcatggtctttcatattattgacctgcttctctgtgagggactcaacatcattttccatgtagctctcgcactgctgaagactagtaaggaagacctacttcaggcagacttcgaaggtgccctcaagtttttccgcgtgcaattgccaaaacgctatagagcggaagagaacgcacggcggttgatggaacaggcctgcaatattaaggttccaaccaagaaacttaagaaatacgagaaagagtatcagacaatgagagagtctcagctccagcaggaggaccccatggatcggtataagcgagagaaccggaggctccaggaagcctccatgcgtctggaacaggagaacgatgacctcgctcatgagcttgtcaccagcaaaatcgcacttcgtaatgaccttgatcaggctgaggataaggccgacgtgttgaacaaggagctgcttctgacaaagcaaaggttagttgagaccgaagaagagaaaaggaaacaggaggaagagaccgctcaactgaaggaggttttccggaaacaacttgaaaaagccgaatatgaaatcaagaaaaccactgccataattgcggagtataaacagatctgctctcagctttcaacacgcctggagaaacagcaagctgcctccaaggaagaactcgaagtggtgaaggggaagatgatggcctgcaaacactgttccgatatctttagcaaggagggtgcattaaagctggccgcgactggccgggaggaccagggaattgagacagacgatgaaaaagattctctgaaaaaacagcttagagaaatggaattggaactcgcccagaccaagctgcaattggttgaagccaagtgcaagatacaggagctggaacaccagcggggggctctgatgaacgagattcaggccgccaagaactcttggttctctaagacgttaaactcaatcaaaacagcaaccggcacgcagcctcttcagcccgcgcctgtgacccaaccaccaaaggaatctacatag

SEQ ID NO: 266916 - DNA, 1137 bp, Artificial Sequence
  derived and/or modified sequence
atgaaggagcagttacccgacctccactctcatttcagcgatcttaatttggaagctcacatgtacgcatcccagtggttcttaactctgtttactgccaagttccccctttgtatggttttccatatcatcgatctcctgctatgcgagggcttgaacatcatctttcacgtcgcgttggcattactgaaaacatctaaagaagacctgctgcaggccgactttgagggggcgcttaaattttttagagtgcagctccccaaacgctatcgggccgaggagaacgctcgtagactcatggagcaggcctgcaatatcaaggtgcctaccaaaaaactgaagaagtatgagaaggagtaccagactatgagggagagccagttacagcaggaagatcctatggacagatataagcgagaaaaccgccggttacaggaggctagtatgcgactggagcaagagaacgacgacttggcacacgagctagtcacctcaaaaatcgctttaagaaatgacctggaccaggcagaggacaaggcagatgtgcttaacaaggagctgctgctcacgaagcaacggctggtcgagacagaggaggagaagcgcaagcaggaggaggaaacagcccagttaaaagaggtgttcagaaagcagctggagaaggcagagtacgagatcaagaaaacaaccgcgatcatcgctgaatataagcagatttgtagccaactgagtactcgcttggaaaagcagcaggcggcatctaaggaggagctggaagtggtaaagggaaaaatgatggcctgcaagcattgttccgacatattttccaaagagggcgctctaaagcttgccgccactgggcgcgaggaccaagggattgaaaccgacgatgagaaggacagcctaaaaaagcagctcagagagatggaactggagcttgctcagaccaaacttcagctggtcgaagcaaagtgtaagattcaggaactcgaacaccaacgcggtgcgttaatgaacgaaatccaggctgccaagaattcctggttctctaagacactgaacagtatcaagacagctactgggacccagcctctgcaaccagcacccgttactcaacctcctaaggagtctacttag

SEQ ID NO: 266917 - DNA, 1818 bp, Artificial Sequence
  derived and/or modified sequence
atggaggtccgtgcctctctccagaaaatcgtgagcaacggagacgagcagctggagaaggcaatggaggagatcctgcgcgactcagagaagcgtccttcctcccttctcgtggattgccaatctagtagcgaaatcagcgatcacagcttcggtgacatacctgcgagccagaccaacaaaccaagcctccagctgattctggatcctagcaatactgaaatctcaaccccccggccctccagccctggcggattacctgaagaggactcggtactctttaataaactgacgtatctgggatgcatgaaggtgtcctccccacgcaacgaagtagaagctcttagagccatggcaacaatgaagtcctccagtcaatatccattcccagtgaccctgtatgtcccaaatgtacccgagggtagcgttagaatcattgatcagtctagcaatgtggaaatcgccagctttccgatctacaaagttctgttctgcgcccgcgggcacgacggaactactgagtctaactgcttcgcctttacagaaagcagtcacggatcggaggaatttcaaattcatgtgtttagttgcgagattaaggaggcagtaagccgtattctgtactcgttctgtaccgccttcaagagaagttccaggcaggtgtctgacgtgaaggatagtgtgattccaacacccgacagcgatgtgtttacattctctgtaagtttggaagtgaaagaagatgatgggaaggggaactttagccctgttcccaaagatagagataaattttactttaaacttaagcagggcattgaaaaaaaggtggtcattaccgtccagcagcttagcaacaaagaactcgcaatcgagagatgttttggcatgctgctgagcccaggccgcaacgtgaaaaactccgatatgcatcttcttgatatggagagtatgggcaaatcttatgatggcagagcttatgttattacaggcatgtggaatcctaatgcgcccgtgttcctcgcactgaacgaagagacaccaaaagacaagcaggtctatatgaccgtagccgtcgacatggtcgtcacagaagtcgttgagcctgtgagattcctactagaaacagtggtgcgggtgtacccagctaacgaacggttctggtatttttctcgaaagacgtttactgagacctttttcatgaggctaaagcagtctgagggcaaaggccacacgaacgcaggcgatgccatctacgaggtggtatctctgcagagggagagcgataaggaggaacccgtgacgccaaccagcggcggaggccctatgtctcctcaggatgacgaggctgaagaagagtccgacaacgagctatcgtcggggactggtgatgtgagtaaggattgccccgagaaaatcctgtattcatggggcgaactgctggggaagtggcattcaaacctcggagctagacctaagggactgagtacactggtgaagagtggggttcccgaagccctgagagcagaagtgtggcagcttcttgccgggtgccatgataaccaggcaatgttggatagatatcgcatattgataaccaagcagcagatgaaattctccctgacgccgcgacaaacaattcacctggtgaaatacgagggttccatgaaagtgtccatgacaccctgcaatcaacttcagtttgacatacggctcgacgtgcttatcacctacactttctgcttttccagcttcccagagcccgagctgtacaaatacgtccttaagcatcagctgataaagcgtctgaatgcctgttag

SEQ ID NO: 266918 - DNA, 1134 bp, Artificial Sequence
  derived and/or modified sequence
atggaacagctaccagatcttcatagtcacttcagcgatctgaaccttgaggctcacatgtacgcttcacaatggtttctcactctgttcaccgccaaattcccactgtgcatggttttccacattattgatcttcttttgtgcgaggggctgaacatcatcttccacgtcgctttagctctgctgaagaccagcaaggaagaccttttgcaggctgatttcgaaggcgccctcaagttttttagagtacagctgcccaagcgctaccgagcagaagagaatgcccggcgcctgatggaacaagcttgtaacataaaagtgcccacgaaaaaactgaagaagtacgagaaagaataccagaccatgagggaatctcagctgcaacaggaggatccaatggatcgctacaaaagggagaaccgtaggcttcaggaggccagcatgaggttggaacaagagaacgacgatctggcccatgagctagtgacatcaaagattgcactgaggaacgacctggatcaagccgaggataaggcagacgtactgaacaaagagctacttctcacaaagcagagacttgtggagacggaagaagagaagaggaagcaggaggaggagactgctcagctgaaagaagtctttaggaagcagctggagaaagctgagtatgaaatcaagaagactacagcgattatcgctgagtataagcaaatttgctcccagctatccacaaggctcgaaaaacagcaggctgcttcgaaggaggaactggaagtagtgaagggtaagatgatggcctgtaagcactgtagcgatatcttctccaaggagggtgccctgaaattagccgcaaccggccgggaggaccagggtatagaaaccgacgacgagaaagatagcttgaaaaagcagttgcgggagatggagctcgaactggctcagacaaaactgcagctggttgaggccaagtgtaaaatccaagaacttgaacaccagaggggagctctgatgaatgaaattcaagcagcaaaaaacagttggttctctaagactcttaattcaatcaagactgccactggcactcaaccactgcagcccgcgcccgtgacccagccgccaaaggagtccacctag

SEQ ID NO: 266919 - DNA, 1849 bp, Artificial Sequence
  derived and/or modified sequence
gggcacatttggctatttttcaaagagagcatgtagttcaagaaatggcttattttgttttttattcttctttttgtggtctatttaggaaaacaaaatgaaggtggcctttgtctttcagttatggaacagctaccggacctgcatagccatttttctgatctgaacctggaagctcatatgtatgcatcccagtggtttctcactctttttactgccaagttcccactctgcatggtgttccacatcattgacttactgctttgtgagggtttgaacataatctttcatgtagctttggctctcctaaagacctcaaaggaagaccttctgcaggctgattttgaaggtgctttaaagttctttagagttcagcttccaaagagatacagggcagaggaaaatgcaagaagactgatggagcaggcttgcaatattaaagtaccaaccaagaagctgaagaaatatgagaaagaatatcagacaatgcgagagagtcagctgcaacaggaagacccaatggatagatacaagagggagaaccgaagattacaggaggccagcatgaggttggaacaagagaatgatgaccttgcccatgaactagtaacaagcaaaattgctctacggaatgacttggatcaggcagaagacaaggcagatgtgttgaataaagagctccttttgaccaaacagaggctggtggagactgaagaggagaagaggaagcaagaggaagagactgcccagctaaaagaagtcttcaggaaacagctagagaaggcagaatatgaaataaagaagactacagctatcattgctgagtataaacagatctgttcgcagttgagtaccaggctggagaaacagcaagcagccagcaaggaggagctggaagtggtaaagggtaagatgatggcatgcaaacactgcagtgacattttcagcaaggagggtgctttgaaactagcagccacaggcagagaggaccagggaattgaaacagatgatgagaaggactcacttaagaagcagctgagagagatggaactggaactggcacaaaccaaactgcagttggtggaggccaagtgtaaaattcaggaacttgaacatcagagaggagcccttatgaatgaaatccaagctgcgaaaaactcttggtttagcaaaaccctgaactctatcaaaacggccacgggcacccagccattgcagccagcaccggtcacccagccacccaaggagagcacatagttccagccttacccaagcacaagagcacaatgttcaaaccaatggaaatctgggaggattcttcctggtgtccctttgaaggaaagtcaaggaggccagaaaacaagccagaatttttcagtagctctcactctttcttgtatgacacttttcaaagggatgctatttaaactgacctgttctatgttgaatacctattttccagcttctggaaggccatgttcagatccatcatagtattacacattattttgtttgcctgatgtttagttggaaataagtaattcagaactaaatgcttttttatttagaattattcataattatttttatcttacataaaaatggagacatctgttattccaaggttgaagtgataagaagatctttgtcacaggaaaaaaaaaattgaaacctaaacatcttaagttttcaggatttattcagataaagcacactgtggggccaggcatgaccactctcaggtttcctcctgagcctgattcccagggaagtgttaatcctgtccaaaggaaagaaccaatcagcgatcattggtttactttcattttctgttcggtacatctggaaa

SEQ ID NO: 266920 - DNA, 1988 bp, Artificial Sequence
  derived and/or modified sequence
ggcctggacgagcgcgcttccgacccgccgccaccgcctcctcccctccttctcggcccgccccctccctcgcctcttcctgccaggcggcccttctcccctcccctctcagttccctccgccctcctcgggctccagcggtggcggagcgaacgggaccggcccggcttcagagcgcgaggtggagggtggaacgcgggcgcctgaaggagttgttgtctcggcagcgcccgcggagacgtgaagaggtggttgtgggaagagaagtttgcagaactgaaatggaggtcagagcttcattacagaagatagtttctaatggtgatgaacaattggaaaaagccatggaagagattttgagagattccgagaaaaggccaagcagtcttcttgttgattgtcaaagttccagtgagatttcagaccattcgtttggagatattccagccagccaaacaaataagccatctcttcagttaattttggatccgtctaacacagaaatttctacacccagaccatcttctccaggtggactacctgaagaagatagtgttttatttaataaactgacctacttaggatgtatgaaggtttcttccccacgtaatgaagtagaggctttacgggcaatggcaaccatgaaatcttccagtcaatacccctttcctgttaccctgtatgtaccaaatgttccagaaggttctgtgagaattatagaccaatccagcaatgtggagatagcatcttttccaatctataaggtgttattctgtgcacgtggacatgacggaacaacagagagcaattgctttgcatttacagagagttcccatggttcggaagaatttcagatacatgttttctcctgtgaaattaaagaggcagtaagcagaattttgtacagtttctgtacagcattcaaacgttcttccagacaagtgtctgatgttaaagactcagttattcctacccccgacagtgatgtgtttaccttcagtgtctccttggaggtaaaagaagacgatggaaaaggaaactttagccctgtgcctaaggatagagataaattttatttcaaattaaagcaaggaatagagaagaaggttgtgattacagtgcagcaactttctaacaaagaattagctattgaaagatgttttggaatgttattaagcccaggtcgaaacgtgaagaacagtgacatgcatttactggatatggaatccatgggaaagagctatgatgggagagcttatgtcatcactggcatgtggaaccccaatgcaccagtatttctggcacttaacgaggaaaccccaaaagataagcaagtatacatgactgtggcagtggatatggtagtcacagaggtggtggagcctgttcgctttctcctggagacagtagtccgtgtgtaccctgcaaatgagcgattttggtatttcagcagaaagactttcacagagactttcttcatgagattgaaacagtctgagggaaaaggccataccaatgctggagatgcaatatatgaggtggtgagtctacagcgagagtctgacaaggaggaaccagtcactcctactagtggagggggtccaatgtcaccccaggatgatgaagcagaagaggagagtgataatgaactctcaagtggaacaggtgatgtgtctaaggattgtcctgagaagatcctgtattcttggggagagttgctaggaaaatggcacagtaaccttggtgcacgaccgaaagggctgtctactctggtgaagagtggtgtccctgaagcattgagggcagaggtatggcagttattggcaggctgccatgacaaccaggcaatgctggatagataccgaattcttatcacaaaggtctgttggagtttgctggaggtccactccagaccctgtttgcctgggtatcaccagtggaagctgcagaacagcaaatattgcagaatggcaaatgttgctgcctga

SEQ ID NO: 266921 - DNA, 1077 bp, Artificial Sequence
  derived and/or modified sequence
atgtatgccagccagtggttcctgaccctcttcaccgccaagttccccctgtgcatggtgttccacatcatcgacctgctgctgtgtgagggcctgaacatcatcttccacgtggccctggccctgctgaagaccagcaaggaggacctgctgcaggccgactttgaaggagccctgaagttcttccgggtgcagctgcccaagcgctacagagctgaggagaatgcccggcggctgatggagcaggcctgcaacatcaaggtgcccaccaagaagctgaagaagtatgagaaggagtaccagaccatgagggagagccagctgcagcaggaggaccccatggaccgctacaagcgggagaacagaaggctgcaggaggcctccatgaggctggagcaggagaatgatgacctggcccacgagctggtgaccagcaagatcgccctgagaaatgacctggaccaggccgaggacaaggcagatgtgctgaacaaggagctgctgctgaccaagcagaggctggtggagacagaggaggagaagaggaagcaggaggaggagacagcccagctgaaggaggtgttcaggaagcagctggagaaggccgagtatgagatcaagaagaccacagccatcatcgccgagtacaagcagatctgcagccagctgagcacccggctggagaagcagcaggccgccagcaaggaggagctggaggtggtgaagggcaagatgatggcctgcaagcactgcagcgacatcttcagcaaggagggcgccctgaagctggccgccaccggccgggaggaccagggcattgaaacagatgatgagaaggacagcctgaagaagcagctgcgggagatggagctggagctggcccagaccaagctgcagctggtggaggccaagtgcaagatccaggagctggagcaccagagaggagccctgatgaatgagatccaggccgccaagaacagctggttcagcaagaccctgaacagcatcaagacagccaccggcacccagcccctgcagcctgcccctgtgacccagccccccaaggagagcacctag

SEQ ID NO: 266922 - DNA, 1137 bp, Artificial Sequence
  derived and/or modified sequence
atgaaggagcagctgcctgacctgcacagccacttcagtgacctgaacctggaggcccacatgtatgccagccagtggttcctgaccctcttcaccgccaagttccccctgtgcatggtgttccacatcatcgacctgctgctgtgtgagggcctgaacatcatcttccacgtggccctggccctgctgaagaccagcaaggaggacctgctgcaggccgactttgaaggagccctgaagttcttccgggtgcagctgcccaagcgctacagagctgaggagaatgcccggcggctgatggagcaggcctgcaacatcaaggtgcccaccaagaagctgaagaagtatgagaaggagtaccagaccatgagggagagccagctgcagcaggaggaccccatggaccgctacaagcgggagaacagaaggctgcaggaggcctccatgaggctggagcaggagaatgatgacctggcccacgagctggtgaccagcaagatcgccctgagaaatgacctggaccaggccgaggacaaggcagatgtgctgaacaaggagctgctgctgaccaagcagaggctggtggagacagaggaggagaagaggaagcaggaggaggagacagcccagctgaaggaggtgttcaggaagcagctggagaaggccgagtatgagatcaagaagaccacagccatcatcgccgagtacaagcagatctgcagccagctgagcacccggctggagaagcagcaggccgccagcaaggaggagctggaggtggtgaagggcaagatgatggcctgcaagcactgcagcgacatcttcagcaaggagggcgccctgaagctggccgccaccggccgggaggaccagggcattgaaacagatgatgagaaggacagcctgaagaagcagctgcgggagatggagctggagctggcccagaccaagctgcagctggtggaggccaagtgcaagatccaggagctggagcaccagagaggagccctgatgaatgagatccaggccgccaagaacagctggttcagcaagaccctgaacagcatcaagacagccaccggcacccagcccctgcagcctgcccctgtgacccagccccccaaggagagcacctag

SEQ ID NO: 266923 - DNA, 1818 bp, Artificial Sequence
  derived and/or modified sequence
atggaggtgcgggccagcctgcagaagatcgtgtccaatggagatgagcagctggagaaggccatggaggagatcctgcgggacagcgagaagaggcccagcagcctgctggtggactgccagagcagcagcgagatcagtgaccacagctttggagacatcccagccagccagaccaacaagcccagcctgcagctgatcctggaccccagcaacacagagatcagcaccccccggcccagcagccctgggggcctgcctgaagaagattctgtgctcttcaacaagctgacctacctgggctgcatgaaggtgagcagccccagaaatgaggtggaggccctgcgggccatggccaccatgaagagcagcagccagtaccccttccctgtgaccctgtatgtgcccaacgtgcctgagggctctgtgcgcatcatcgaccagagcagcaatgtggagatcgccagcttccccatctacaaggtgctcttctgtgcccggggccatgatggcaccacagagagcaactgctttgccttcacagagagcagccacggcagcgaggagttccagatccacgtgttcagctgtgagatcaaggaggccgtgagccgcatcctgtacagcttctgcacagccttcaagaggagcagccggcaggtgtctgatgtgaaggacagcgtcatccccaccccagacagtgatgtgttcaccttctctgtgtccctggaggtgaaggaggatgatggaaaaggaaacttcagccctgtgcccaaggaccgggacaagttctacttcaagctgaagcagggcatcgagaagaaggtggtgatcaccgtgcagcagctgagcaacaaggagctggccatcgagcgctgcttcggcatgctgctgagccctggaagaaatgtgaagaacagcgacatgcacctgctggacatggagagcatgggcaagagctatgatggccgggcctacgtgatcaccggcatgtggaaccccaatgcccctgtgttcctggccctgaatgaggagacccccaaggacaagcaggtgtacatgacagtggccgtggacatggtggtgacagaggtggtggagcctgtgcgcttcctgctggagaccgtggtgcgggtgtacccagccaatgaacgcttctggtacttcagcaggaagaccttcacagagaccttcttcatgaggctgaagcagagcgagggcaagggccacaccaatgctggagatgccatctatgaggtggtgtccctgcagcgggagagtgacaaggaggagcctgtgacccccaccagcggcggcggccccatgagcccccaggatgatgaagctgaggaggagagtgacaatgagctgagcagcggcactggagatgtgtccaaggactgcccagagaagatcctgtacagctggggcgagctgctgggcaagtggcacagcaacctgggcgcccggcccaagggcctgagcaccctggtgaagagcggcgtgcctgaggccctgcgggcagaggtgtggcagctgctggccggctgccacgacaaccaggccatgctggaccgctaccgcatcctgatcaccaagcagcagatgaagttcagcctgaccccccggcagaccatccacctggtgaagtatgagggctccatgaaggtgtccatgaccccctgcaaccagctgcagtttgacatccggctggatgtgctgatcacctacaccttctgcttcagcagcttccctgagcctgagctgtacaagtatgtgctgaagcaccagctgatcaagaggctgaatgcctgctag

SEQ ID NO: 266924 - DNA, 1134 bp, Artificial Sequence
  derived and/or modified sequence
atggagcagctgcctgacctgcacagccacttcagtgacctgaacctggaggcccacatgtatgccagccagtggttcctgaccctcttcaccgccaagttccccctgtgcatggtgttccacatcatcgacctgctgctgtgtgagggcctgaacatcatcttccacgtggccctggccctgctgaagaccagcaaagaagacctgctgcaggccgactttgagggcgccctgaagttcttccgggtgcagctgcccaagcgctacagagcagaagaaaatgcccggcggctgatggagcaggcctgcaacatcaaggtgcccaccaagaagctgaagaagtatgagaaggagtaccagaccatgagggagagccagctgcagcaggaggaccccatggaccgctacaagagagaaaatagaaggctgcaggaggcctccatgaggctggagcaggagaatgatgacctggcccacgagctggtgaccagcaagatcgccctgagaaatgacctggaccaggccgaggacaaggcagatgtgctgaacaaggagctgctgctgaccaagcagaggctggtggagacagaggaggagaagaggaagcaggaggaggagacagcccagctgaaggaggtgttcaggaagcagctggagaaggccgagtatgagatcaagaagaccacagccatcatcgccgagtacaagcagatctgcagccagctgagcacccggctggagaagcagcaggccgccagcaaggaggagctggaggtggtgaagggcaagatgatggcctgcaagcactgcagcgacatcttcagcaaggagggcgccctgaagctggccgccaccggccgggaggaccagggcatcgagacagatgatgagaaggacagcctgaagaagcagctgcgggagatggagctggagctggcccagaccaagctgcagctggtggaggccaagtgcaagatccaggagctggagcaccagagaggagccctgatgaatgagatccaggccgccaagaacagctggttcagcaagaccctgaacagcatcaagacagccaccggcacccagcccctgcagcctgcccctgtgacccagccccccaaggagagcacctag

SEQ ID NO: 266925 - DNA, 1077 bp, Artificial Sequence
  derived and/or modified sequence
atgtacgccagccagtggttcctgaccctgttcaccgccaagttcccactctgtatggtgtttcacattatcgatctgctgctgtgcgagggccttaacatcatcttccatgtcgccctcgctctgctgaaaacatccaaggaggacctgttgcaggctgattttgaaggggcacttaagtttttccgggttcaactgcccaagcgctatcgggctgaggaaaatgcccgccggcttatggagcaggcttgcaatattaaggtgcctacgaaaaagctgaaaaagtacgaaaaggaataccagaccatgcgcgaatctcaacttcagcaagaggatcctatggacaggtacaagagagaaaatagaagattacaggaggcaagcatgcgcctggagcaagaaaacgatgacttggcccatgaactggtcactagtaagatcgccctgcgaaacgacttggaccaagccgaggacaaagctgacgtgctgaataaagagctgctgcttaccaagcagcgcctcgtcgagaccgaagaagagaagcgaaaacaagaagaggagaccgcccagctcaaggaagtgttccggaaacaacttgagaaagccgaatacgaaatcaaaaaaaccactgcgattatcgctgaatataaacagatatgtagtcagttgagcaccaggttagaaaagcagcaagctgcctcaaaagaggaattggaagtcgtcaaaggcaagatgatggcctgtaaacactgctcagacatattttccaaagaaggcgccctaaaactggccgccacagggcgtgaggaccaaggaatcgagacggatgacgagaaagattctctcaagaaacaactgcgggagatggaactcgaattggcccagacaaagcttcaactcgtggaggcaaaatgcaaaattcaggagcttgaacatcagcggggcgcactcatgaatgagatccaggctgctaaaaatagttggttctctaagactctaaacagcatcaaaacagctacaggcacacagcctctgcagccagcccctgttacacagccaccaaaggaatcaacttag

SEQ ID NO: 266926 - DNA, 1137 bp, Artificial Sequence
  derived and/or modified sequence
atgaaggagcagctgcccgacctgcacagccacttcagcgacctgaacttagaggcccacatgtatgcctcgcagtggtttcttaccttgttcaccgccaaatttccactttgcatggtgtttcatattatcgatctgttactgtgtgaaggcctcaatataatttttcacgtagctctcgccctcctgaaaaccagtaaagaggatctgctgcaggcggatttcgaaggcgctttgaaattcttccgtgtgcaactgcccaagagatatagagcagaagaaaatgcgagacggttaatggagcaggcctgtaacattaaggtcccaaccaaaaaacttaaaaagtatgagaaggagtatcagacaatgcgggaatcccaattacagcaagaagatccaatggaccgatataagagggagaaccgtcgactccaggaggcgtctatgcgcttggagcaggagaacgatgacctggcccatgagctcgtgacctccaagattgccttgaggaacgatttagaccaagccgaggataaggcggatgttctaaataaagaactgctgcttacaaagcaaagactagtcgaaacagaggaggagaagcgaaaacaggaagaagagaccgcacagctgaaagaggtgttcagaaagcaacttgaaaaggccgaatatgaaataaagaaaactactgccatcattgccgagtacaaacagatttgtagtcaactttctacgagattggaaaaacagcaagctgccagtaaagaagagctagaggtggtgaaagggaagatgatggcttgcaagcactgctctgacatcttttccaaggaaggtgctctaaagctggcagccacaggcagagaagaccagggaatcgagactgatgacgagaaggactccctgaaaaagcagttgcgggagatggaattggagctagcacaaacaaaattgcagctcgtggaggctaaatgtaaaattcaagaacttgaacaccagcggggcgctctcatgaatgaaatccaagcggccaagaacagttggttctcaaagacactcaatagtattaaaactgccacaggtacgcagcccctgcagccagcgccggtcactcaacctcccaaagagagcacttag

SEQ ID NO: 266927 - DNA, 1818 bp, Artificial Sequence
  derived and/or modified sequence
atggaggtgcgggccagcctgcagaagatcgtgagcaacggcgacgaacagctggagaaggccatggaagaaatcttaagggactcagaaaagcgcccgtcatccctgctggtggattgtcagtcttctagcgaaatttcagatcattccttcggagatataccagcttctcagactaataagcctagccttcagctgattctcgatcctagtaatacagaaatttccaccccacggcctagctcacctggaggactgccggaagaagattccgtgcttttcaacaaactgacttatcttggatgcatgaaggtctcctctccgcgcaacgaagtggaagccctccgtgccatggctactatgaaatcatcatcccagtacccctttccggtaactctgtacgtccccaacgtaccagagggatccgtcagaattattgaccagtctagcaatgtcgaaatcgcaagtttcccaatctacaaagtgctgttttgtgcccgcggccacgacggcaccactgagtctaattgttttgcgtttacagagtcaagccacgggagtgaagagttccagatccacgtgtttagttgtgaaattaaggaagcagtctcacgtatcctttattctttttgcacggccttcaagcggagtagcagacaggtttctgatgtgaaagactcagtcattcctactcctgactcagacgtattcacattcagtgtgtctcttgaagtgaaagaggacgatggcaaagggaacttcagccctgttcctaaagacagagataagttctacttcaagctgaagcagggcatagaaaagaaagtggttatcaccgttcagcagctctcaaacaaggagctcgcaatcgagcgttgcttcggaatgctcctgagccccggtagaaatgtgaaaaatagcgatatgcatctgttggatatggagagcatggggaaatcttatgacgggcgagcttatgtcatcaccggcatgtggaatccaaatgctccagtgttccttgcgctgaacgaggaaacccccaaagacaaacaggtctatatgacagtggctgtcgacatggtggtgacggaagtggtggaaccggtaagattcttgctggaaactgtggtgagagtgtatcccgccaatgagcgcttctggtattttagccgtaagacctttactgaaaccttcttcatgagactgaagcagtctgagggaaaaggccacactaatgctggagacgcaatctacgaggttgtgtccctccaaagagagagtgacaaagaggaacctgttacaccaaccagcgggggtggacctatgtccccccaggatgatgaggctgaggaggaatcagacaatgaattatcttcagggaccggagatgtgtctaaagactgtcccgagaaaatactctacagttggggggagctgcttggcaaatggcactccaatttgggagcccggcctaaggggctatctactctcgtgaaatctggtgtgcccgaggccctgcgcgcagaggtgtggcaactcctggccggatgccacgacaatcaggccatgctggaccggtatagaatcctgattactaaacaacagatgaagttcagcctgactcctaggcaaacaatacatctggttaaatatgaagggtccatgaaagtgtctatgaccccctgcaatcaactgcagttcgatattaggctggatgtacttattacttacactttttgcttctcctcttttcctgaaccggaattatataaatacgtactgaaacatcagttaatcaagcggcttaacgcgtgctag

SEQ ID NO: 266928 - DNA, 1134 bp, Artificial Sequence
  derived and/or modified sequence
atggagcagctgcccgacctgcacagccacttcagcgacctgaacctcgaggctcatatgtacgcatcccagtggtttttgactctgttcactgccaagttccccctatgcatggttttccacataattgacttattgctgtgtgagggactgaacattatctttcacgtggctcttgctcttctgaagaccagtaaggaggacctactgcaagctgactttgagggcgccctcaagttttttcgagtacagctgccgaagaggtatcgggccgaggaaaacgcccgccgcctgatggaacaagcctgcaacatcaaagtgcccaccaaaaaactgaagaagtacgagaaagagtaccagaccatgagggaatctcagctgcagcaggaggatccaatggacaggtataaaagggagaatcgacggctgcaagaggcctctatgaggctagaacaggaaaacgacgacctggcccacgagttagtgacctccaagatcgccctgagaaacgacctggaccaggctgaggacaaggctgatgtccttaacaaggagctcttgctgacaaagcagaggctggttgagaccgaggaggaaaagcgaaagcaggaagaagagaccgcacagttaaaagaagtgttcaggaagcagctggagaaagcagagtacgagataaaaaagaccaccgcgattattgccgaatacaaacagatctgttcccagctgtccacccgcttggagaagcagcaagcggcttccaaagaggagctagaggttgtgaaaggaaagatgatggcttgtaaacattgtagtgatatattttctaaggagggagccctgaaacttgctgcaaccggacgagaggaccagggcattgaaaccgacgacgaaaaagactccctcaagaagcagctcagggagatggagctggaacttgcccaaaccaagttgcagttggtggaagcaaaatgcaagatacaggagttggagcaccagcggggagccctcatgaatgaaattcaagccgcaaagaattcgtggttttctaaaacactaaacagcatcaaaacagccacgggtacccaacccttgcagcccgctccagtgacacagccacccaaagaaagcacatag

SEQ ID NO: 266929 - DNA, 1077 bp, Artificial Sequence
  derived and/or modified sequence
atgtacgctagccagtggttcttaaccctgtttaccgctaagtttcctctgtgcatggtgtttcatatcatcgatttgctcttatgcgaagggctgaatatcatcttccacgtcgccctagcactgctgaagacgagcaaagaggacttactccaagcagatttcgagggcgctttaaagtttttccgggtccagctgcccaaaaggtacagggcggaagagaacgcacggcgtctgatggagcaggcgtgtaacattaaggtacctaccaagaagctgaagaagtatgaaaaggaatatcagacaatgagggagtcccaactgcagcaggaagacccgatggaccggtataagagggagaaccggagactgcaggaggccagcatgcgactggaacaggagaacgatgacttggcacacgagttggtcacttccaagatcgcgctaaggaacgatctcgatcaagcggaggacaaggctgacgtgctgaacaaagagctgctcctaaccaaacagaggctcgttgaaaccgaagaggagaagaggaagcaggaggaggaaacagcccagctgaaggaggtcttccggaagcagttggagaaagccgaatatgagatcaaaaaaaccaccgctattatcgcggaatacaaacagatctgcagtcaacttagcacaagactggaaaaacaacaagctgcgagtaaggaggagctcgaggtggtgaagggcaagatgatggcgtgcaagcattgttccgacatattcagtaaagaaggagcgctgaagctcgccgctacaggcagagaggatcaggggattgaaacagacgacgaaaaggactcattgaaaaaacagctgcgcgagatggagctggagctggcccagacaaaactgcaactcgtcgaagcaaagtgcaagatccaggagttggaacaccagagaggtgccctgatgaacgaaatccaggctgcaaagaattcttggttctctaaaacccttaacagcataaagaccgctaccgggacccaaccactgcagccagcccctgtaacgcaaccacccaaagagtccacatag

SEQ ID NO: 266930 - DNA, 1137 bp, Artificial Sequence
  derived and/or modified sequence
atgaaagagcaacttccagatctgcactcccacttcagtgaccttaacctggaggcccacatgtacgcctcacagtggtttctgacactttttaccgctaagtttccattgtgcatggtcttccacatcattgacctactgctgtgcgagggactgaacatcatcttccacgttgcccttgcgctcctgaagacgtccaaggaggatctccttcaggctgacttcgaaggcgcactcaaattctttcgtgttcagctgcccaaaaggtatcgagctgaagaaaacgcaaggaggctgatggaacaggcttgtaatatcaaggtgcctacaaagaagcttaaaaagtacgagaaggagtaccagacaatgagggaaagccagttgcaacaagaagatcccatggatagatataagcgcgaaaaccgacgcctgcaagaagcttccatgcgtttagagcaagagaatgacgacctcgcccacgaactagtgacatctaagatcgcacttcgaaatgacctagaccaggcggaggataaggcagacgtactgaataaggagctgttactgaccaagcagaggcttgtcgagacggaggaggagaaaagaaagcaggaggaggagacggcccagctgaaagaggtcttcaggaagcagctggaaaaagctgagtacgagattaagaagaccactgccattattgccgaatataagcagatctgtagtcaactgtcgacaaggctggaaaagcagcaggccgcttccaaggaggagctggaggtagtcaaaggaaagatgatggcatgcaaacattgttccgacattttcagcaaagaaggcgctcttaagctggccgcaacagggagagaagatcagggcatcgagaccgacgacgaaaaggacagtctcaaaaagcaattacgagagatggaactcgagctggcccagaccaaactccagctggttgaggccaagtgcaagatacaggaattagagcaccagagaggggcactaatgaatgaaatccaggctgccaagaacagctggtttagcaaaacgctcaatagcatcaagactgccaccggcacccagccattgcagcccgctcctgtgacacagccacctaaagagagcacatag

SEQ ID NO: 266931 - DNA, 1818 bp, Artificial Sequence
  derived and/or modified sequence
atggaggtaagagcatccctacagaagattgtttccaacggggatgagcagcttgagaaggcgatggaagaaattcttagggacagcgaaaaacggccatcgtctctattggtggattgccagagctcgtcggagatcagcgatcatagtttcggggatattcccgcttcgcaaaccaacaagccctccctccagttgatcctcgatccgtccaataccgagatctccacacctagaccatcctcaccgggaggtctgcccgaagaagattctgtgctctttaacaagctaacgtacttaggatgcatgaaggtaagttccccacggaacgaggtagaagccctgagagccatggccaccatgaaaagctcctcgcagtatcctttccccgtgaccctttacgttccaaatgttcccgaggggtcagtaaggatcatagaccagagctcaaacgtagaaatcgccagctttcccatctataaggtactgttctgtgcccgaggccacgacgggaccacagagtccaactgctttgctttcactgaaagctctcacggatccgaggagttccagatccatgtcttctcttgtgagatcaaagaagcagtgagccggattctgtacagcttctgtactgcctttaagcgatcaagtcggcaggtgtccgacgtgaaagattcagtgattcccactcccgatagcgacgtgttcactttttctgtgagcttagaggtgaaagaagacgatggcaagggaaacttcagtccagtcccaaaggatagggacaagttctactttaaacttaaacagggtatcgaaaaaaaggttgtcatcaccgtacagcagctctccaataaggagctcgccattgagagatgtttcgggatgctcttgtcgccaggccgaaatgtcaagaacagtgacatgcaccttcttgatatggaaagcatggggaaaagttacgatggtcgcgcatatgtgatcactggtatgtggaatcctaacgccccagtgttcctggcattgaatgaggaaactcctaaggacaagcaggtctacatgaccgtggccgtggatatggtggtgacggaagttgtggaaccagtgcgctttctgcttgagactgtcgtgcgggtctacccggcaaatgaacgattttggtacttcagtcgcaaaaccttcacagaaaccttcttcatgcggctcaaacagtctgagggaaaaggtcacacaaacgcgggtgatgcaatctatgaggtagtaagtctgcaacgcgaaagcgacaaagaggagcctgtcactcccacatcaggcggtgggccaatgtcaccccaagatgacgaggcagaagaagaaagtgacaacgaactatcgagtggcacaggggacgtcagcaaagactgtccagaaaaaatcttgtacagttggggtgagttgttggggaagtggcacagtaacctaggtgcgcgtcccaaaggcctgagtactctggtaaagtccggtgtgcccgaagctctcagagctgaagtgtggcagcttctggccggttgccacgacaaccaagccatgctggaccgctacaggatacttatcactaaacagcagatgaagttttcactgactcccagacaaacgatccatctggtgaagtacgagggctccatgaaggtgagtatgaccccatgtaatcagctgcaatttgacattagactcgatgtcctgatcacttatactttctgtttctctagtttccccgagcccgagctgtacaagtacgttctcaagcaccaactaattaaacggctgaacgcttgctag

SEQ ID NO: 266932 - DNA, 1134 bp, Artificial Sequence
  derived and/or modified sequence
atggaacagctacccgatttgcatagccactttagcgacctcaacctggaggctcacatgtatgcctcacagtggttcctgactctgttcacagctaagtttccactctgcatggtgttccatatcatcgatctcctgttgtgtgaagggctcaacatcatttttcacgttgcccttgctctgttgaaaacgtcaaaggaagatctcctccaggccgacttcgaaggtgccttgaaattctttagggtgcagctaccgaagcggtatcgagccgaggagaatgcacggaggcttatggagcaggcttgcaatattaaggtgcctactaagaaactgaaaaagtacgagaaggaataccagactatgcgggagtcgcaacttcagcaagaggatcccatggacaggtataaacgcgagaaccgccgtcttcaagaggcttctatgcgtctggagcaggaaaacgatgatcttgcacacgagctggtgacatctaagattgccttacggaatgacttggatcaggccgaggacaaagcagatgtgctcaataaagagttgctgctgactaagcagaggctggtggaaaccgaggaggaaaaaagaaagcaggaggaggaaactgctcaactaaaggaggtcttccggaagcagctcgagaaagctgagtatgagataaagaagaccaccgctattattgcagagtataagcagatctgttcccagttgtcaacacgtcttgagaaacaacaggcagcctccaaggaggagctggaagttgtcaaagggaagatgatggcctgcaagcattgttctgatattttcagcaaggagggggcactgaaactggcagctacggggagagaagatcagggcattgagacagatgacgagaaagactccctgaaaaagcagctgagagagatggagctggagctggctcagaccaagttgcagttggtagaggccaaatgtaaaattcaggagctcgagcaccagaggggagctcttatgaatgagatccaagccgctaaaaattcctggtttagcaagaccctaaattctatcaagactgctactggtacccagcccctgcagccagcaccagtgactcagccccctaaggaatccacatag

SEQ ID NO: 266933 - DNA, 1880 bp, Artificial Sequence
  derived and/or modified sequence
agggaagtgaagccagtaggagactgagagattagaagaacagggcagtagaggatgaatttgcagtgaggttaaaggaacaatttattgggagaagggaatgtaggagggtagaagactttaaaattgaaaagaaataaaaggaggcagggatgtaaaacgagccataagtacaatgacaaatgggcattaaggaggaaaaagactatgtagaagaatctggtaaatatggatattaacagcaataagctcctttttaacgatttaattctaccaagtaaatatttgggattactcgctttttgccttttatttaccaaaaaattcatatattttcaaaggaacagctaccggacctgcatagccatttttctgatctgaacctggaagctcatatgtatgcatcccagtggtttctcactctttttactgccaagttcccactctgcatggtgttccacatcattgacttactgctttgtgagggtttgaacataatctttcatgtagctttggctctcctaaagacctcaaaggaagaccttctgcaggctgattttgaaggtgctttaaagttctttagagttcagcttccaaagagatacagggcagaggaaaatgcaagaagactgatggagcaggcttgcaatattaaagtaccaaccaagaagctgaagaaatatgagaaagaatatcagacaatgcgagagagtcagctgcaacaggaagacccaatggatagatacaagagggagaaccgaagattacaggaggccagcatgaggttggaacaagagaatgatgaccttgcccatgaactagtaacaagcaaaattgctctacggaatgacttggatcaggcagaagacaaggcagatgtgttgaataaagagctccttttgaccaaacagaggctggtggagactgaagaggagaagaggaagcaagaggaagagactgcccagctaaaagaagtcttcaggaaacagctagagaaggcagaatatgaaataaagaagactacagctatcattgctgagtataaacagatctgttcgcagttgagtaccaggctggagaaacagcaagcagccagcaaggaggagctggaagtggtaaagggtaagatgatggcatgcaaacactgcagtgacattttcagcaaggagggtgctttgaaactagcagccacaggcagagaggaccagggaattgaaacagatgatgagaaggactcacttaagaagcagctgagagagatggaactggaactggcacaaaccaaactgcagttggtggaggccaagtgtaaaattcaggaacttgaacatcagagaggagcccttatgaatgaaatccaagctgcgaaaaactcttggtttagcaaaaccctgaactctatcaaaacggccacgggcacccagccattgcagccagcaccggtcacccagccacccaaggagagcacatagttccagccttacccaagcacaagagcacaatgttcaaaccaatggaaatctgggaggattcttcctggtgtccctttgaaggaaagtcaaggaggccagaaaacaagccagaatttttcagtagctctcactctttcttgtatgacacttttcaaagggatgctatttaaactgacctgttctatgttgaatacctattttccagcttctggaaggccatgttcagatccatcatagtattacacattattttgtttgcctgatgtttagttggaaataagtaattcagaactaaatgcttttttatttagaattattcataattatttttatcttacataaaaatggagacatctgttattccaaggttgaagtgataagaagatctttgtcacaggaaaaaaaaaa

SEQ ID NO: 266934 - DNA, 1076 bp, Artificial Sequence
  derived and/or modified sequence
ggagaggcattccataccagattctgtggcctgcaggtgacatgctgcctaagagaagcaggagaacagtcagcaaaagcattggtcccacctgcccctttgctggaagctgtgaagtcagcaagactcagaggcgccactgcccagcctgcaggttgcagaagtgcttagatgctggcatgaggaaagacatgatactgtcggcagaagccctggcattgcggcgagcaaagcaggcccagcggcgggcacagcaaacacctgtgcaactgagtaaggagcaagaagagctgatccggacactcctgggggcccacacccgccacatgggcaccatgtttgaacagtttgtgcagtttaggcctccagctcatctgttcatccatcaccagcccttgcccaccctggcccctgtgctgcctctggtcacacacttcgcagacatcaacactttcatggtactgcaagtcatcaagtttactaaggacctgcccgtcttccgttccctgcccattgaagaccagatctcccttctcaagggagcagctgtggaaatctgtcacatcgtactcaataccactttctgtctccaaacacaaaacttcctctgcgggcctcttcgctacacaattgaagatggagcccgtgtggggttccaggtagagtttttggagttgctctttcacttccatggaacactacgaaaactgcagctccaagagcctgagtatgtgctcttggctgccatggccctcttctctcctgctccctatcttacagaccgacctggagttacccagagagatgagattgatcagctgcaagaggagatggcactgactctgcaaagctacatcaagggccagcagcgaaggccccgggatcggtttctgtatgcgaagttgctaggcctgctggctgagctccggagcattaatgaggcctacgggtaccaaatccagcacatccagggcctgtctgccatgatgccgctgctccaggagatctgcagctgaggccatgctcacttccttccccagctcacctggaacaccctggatacactggagtgggaa

SEQ ID NO: 266935 - DNA, 1380 bp, Artificial Sequence
  derived and/or modified sequence
taactccaatcactggcaactcctgagatcagaggaaaaccagcaacagcgtgggagtttggggagaggcattccataccagattctgtggcctgcaggtgacatgctgcctaagagaagcaggagaacagtcagcaaaagcattggtcccacctgcccctttgctggaagctgtgaagtcagcaagactcagaggcgccactgcccagcctgcaggttgcagaagtgcttagatgctggcatgaggaaagacatgatactgtcggcagaagccctggcattgcggcgagcaaagcaggcccagcggcgggcacagcaaacacctgtgcaactgagtaaggagcaagaagagctgatccggacactcctgggggcccacacccgccacatgggcaccatgtttgaacagtttgtgcagtttaggcctccagctcatctgttcatccatcaccagcccttgcccaccctggcccctgtgctgcctctggtcacacacttcgcagacatcaacactttcatggtactgcaagtcatcaagtttactaaggacctgcccgtcttccgttccctgcccattgaagaccagatctcccttctcaagggagcagctgtggaaatctgtcacatcgtactcaataccactttctgtctccaaacacaaaacttcctctgcgggcctcttcgctacacaattgaagatggagcccgtgtatctcccacagtggggttccaggtagagtttttggagttgctctttcacttccatggaacactacgaaaactgcagctccaagagcctgagtatgtgctcttggctgccatggccctcttctctcctggtgagcacctcccaaagcccagagccttttgctgcaccacctctgcccaaatactcagctccttgagtccatccacccaggccttctagcctagctatcaaacctgcagactaggtctatcccagcctcagtccccggggcaccacgcaggcccacccctgccacccaacttgtccttcccagctccctatcttacagaccgacctggagttacccagagagatgagattgatcagctgcaagaggagatggcactgactctgcaaagctacatcaagggccagcagcgaaggccccgggatcggtttctgtatgcgaagttgctaggcctgctggctgagctccggagcattaatgaggcctacgggtaccaaatccagcacatccagggcctgtctgccatgatgccgctgctccaggagatctgcagctgaggccatgctcacttccttccccagctcacctggaacaccctggatacactggagtgggaaaatgctgggaccaaagattgggccgggttcaaagggagcccagtggt

SEQ ID NO: 266936 - DNA, 1061 bp, Artificial Sequence
  derived and/or modified sequence
ggagaggcattccataccagattctgtggcctgcaggtgacatgctgcctaagagaagcaggagaacagtcagcaaaagcattggtcccacctgcccctttgctggaagctgtgaagtcagcaagactcagaggcgccactgcccagcctgcaggttgcagaagtgcttagatgctggcatgaggaaagacatgatactgtcggcagaagccctggcattgcggcgagcaaagcaggcccagcggcgggcacagcaaacacctgtgcaactgagtaaggagcaagaagagctgatccggacactcctgggggcccacacccgccacatgggcaccatgtttgaacagtttgtgcagtttaggcctccagctcatctgttcatccatcaccagcccttgcccaccctggcccctgtgctgcctctggtcacacacttcgcagacatcaacactttcatggtactgcaagtcatcaagtttactaaggacctgcccgtcttccgttccctgcccattgaagaccagatctcccttctcaagggagcagctgtggaaatctgtcacatcgtactcaataccactttctgtctccaaacacaaaacttcctctgcgggcctcttcgctacacaattgaagatggagcccgtgtggggttccaggtagagtttttggagttgctctttcacttccatggaacactacgaaaactgcagctccaagagcctgagtatgtgctcttggctgccatggccctcttctctcctgaccgacctggagttacccagagagatgagattgatcagctgcaagaggagatggcactgactctgcaaagctacatcaagggccagcagcgaaggccccgggatcggtttctgtatgcgaagttgctaggcctgctggctgagctccggagcattaatgaggcctacgggtaccaaatccagcacatccagggcctgtctgccatgatgccgctgctccaggagatctgcagctgaggccatgctcacttccttccccagctcacctggaacaccctggatacactggagtgggaa

SEQ ID NO: 266937 - protein, 238 aa, Artificial Sequence
  derived and/or modified sequence
MASREDELRNCVVCGDQATGYHFNALTCEGCKGFFRRTVSKSIGPTCPFAGSCEVSKTQRRHCPACRLQKCLDAGMRKDMILSAEALALRRAKQAQRRAQQTPVQLSKEQEELIRTLLGAHTRHMGTMFEQFVQFRPPAHLFIHHQPLPTLAPVLPLVTHFADINTFMVLQVIKFTKDLPVFRSLPIEDQISLLKGAAVEICHIVLNTTFCLQTQNFLCGPLRYTIEDGARGEMVLEQ

SEQ ID NO: 266938 - protein, 2977 aa, Artificial Sequence
  derived and/or modified sequence
MRKHRHLPLVAVFCLFLSGFPTTHAQQQQADVKNGAAADIIFLVDSSWTIGEEHFQLVREFLYDVVKSLAVGENDFHFALVQFNGNPHTEFLLNTYRTKQEVLSHISNMSYIGGTNQTGKGLEYIMQSHLTKAAGSRAGDGVPQVIVVLTDGHSKDGLALPSAELKSADVNVFAIGVEDADEGALKEIASEPLNMHMFNLENFTSLHDIVGNLVSCVHSSVSPERAGDTETLKDITAQDSADIIFLIDGSNNTGSVNFAVILDFLVNLLEKLPIGTQQIRVGVVQFSDEPRTMFSLDTYSTKAQVLGAVKALGFAGGELANIGLALDFVVENHFTRAGGSRVEEGVPQVLVLISAGPSSDEIRYGVVALKQASVFSFGLGAQAASRAELQHIATDDNLVFTVPEFRSFGDLQEKLLPYIVGVAQRHIVLKPPTIVTQVIEVNKRDIVFLVDGSSALGLANFNAIRDFIAKVIQRLEIGQDLIQVAVAQYADTVRPEFYFNTHPTKREVITAVRKMKPLDGSALYTGSALDFVRNNLFTSSAGYRAAEGIPKLLVLITGGKSLDEISQPAQELKRSSIMAFAIGNKGADQAELEEIAFDSSLVFIPAEFRAAPLQGMLPGLLAPLRTLSGTPEESKRDILFLFDGSANLVGQFPVVRDFLYKIIDELNVKPEGTRIAVAQYSDDVKVESRFDEHQSKPEILNLVKRMKIKTGKALNLGYALDYAQRYIFVKSAGSRIEDGVLQFLVLLVAGRSSDRVDGPASNLKQSGVVPFIFQAKNADPAELEQIVLSPAFILAAESLPKIGDLHPQIVNLLKSVHNGAPAPVSGEKDVVFLLDGSEGVRSGFPLLKEFVQRVVESLDVGQDRVRVAVVQYSDRTRPEFYLNSYMNKQDVVNAVRQLTLLGGPTPNTGAALEFVLRNILVSSAGSRITEGVPQLLIVLTADRSGDDVRNPSVVVKRGGAVPIGIGIGNADITEMQTISFIPDFAVAIPTFRQLGTVQQVISERVTQLTREELSRLQPVLQPLPSPGVGGKRDVVFLIDGSQSAGPEFQYVRTLIERLVDYLDVGFDTTRVAVIQFSDDPKVEFLLNAHSSKDEVQNAVQRLRPKGGRQINVGNALEYVSRNIFKRPLGSRIEEGVPQFLVLISSGKSDDEVDDPAVELKQFGVAPFTIARNADQEELVKISLSPEYVFSVSTFRELPSLEQKLLTPITTLTSEQIQKLLASTRYPPPAVESDAADIVFLIDSSEGVRPDGFAHIRDFVSRIVRRLNIGPSKVRVGVVQFSNDVFPEFYLKTYRSQAPVLDAIRRLRLRGGSPLNTGKALEFVARNLFVKSAGSRIEDGVPQHLVLVLGGKSQDDVSRFAQVIRSSGIVSLGVGDRNIDRTELQTITNDPRLVFTVREFRELPNIEERIMNSFGPSAATPAPPGVDTPPPSRPEKKKADIVFLLDGSINFRRDSFQEVLRFVSEIVDTVYEDGDSIQVGLVQYNSDPTDEFFLKDFSTKRQIIDAINKVVYKGGRHANTKVGLEHLRVNHFVPEAGSRLDQRVPQIAFVITGGKSVEDAQDVSLALTQRGVKVFAVGVRNIDSEEVGKIASNSATAFRVGNVQELSELSEQVLETLHDAMHETLCPGVTDAAKACNLDVILGFDGSRDQNVFVAQKGFESKVDAILNRISQMHRVSCSGGRSPTVRVSVVANTPSGPVEAFDFDEYQPEMLEKFRNMRSQHPYVLTEDTLKVYLNKFRQSSPDSVKVVIHFTDGADGDLADLHRASENLRQEGVRALILVGLERVVNLERLMHLEFGRGFMYDRPLRLNLLDLDYELAEQLDNIAEKACCGVPCKCSGQRGDRGPIGSIGPKGIPGEDGYRGYPGDEGGPGERGPPGVNGTQGFQGCPGQRGVKGSRGFPGEKGEVGEIGLDGLDGEDGDKGLPGSSGEKGNPGRRGDKGPRGEKGERGDVGIRGDPGNPGQDSQERGPKGETGDLGPMGVPGRDGVPGGPGETGKNGGFGRRGPPGAKGNKGGPGQPGFEGEQGTRGAQGPAGPAGPPGLIGEQGISGPRGSGGAAGAPGERGRTGPLGRKGEPGEPGPKGGIGNRGPRGETGDDGRDGVGSEGRRGKKGERGFPGYPGPKGNPGEPGLNGTTGPKGIRGRRGNSGPPGIVGQKGDPGYPGPAGPKGNRGDSIDQCALIQSIKDKCPCCYGPLECPVFPTELAFALDTSEGVNQDTFGRMRDVVLSIVNDLTIAESNCPRGARVAVVTYNNEVTTEIRFADSKRKSVLLDKIKNLQVALTSKQQSLETAMSFVARNTFKRVRNGFLMRKVAVFFSNTPTRASPQLREAVLKLSDAGITPLFLTRQEDRQLINALQINNTAVGHALVLPAGRDLTDFLENVLTCHVCLDICNIDPSCGFGSWRPSFRDRRAAGSDVDIDMAFILDSAETTTLFQFNEMKKYIAYLVRQLDMSPDPKASQHFARVAVVQHAPSESVDNASMPPVKVEFSLTDYGSKEKLVDFLSRGMTQLQGTRALGSAIEYTIENVFESAPNPRDLKIVVLMLTGEVPEQQLEEAQRVILQAKCKGYFFVVLGIGRKVNIKEVYTFASEPNDVFFKLVDKSTELNEEPLMRFGRLLPSFVSSENAFYLSPDIRKQCDWFQGDQPTKNLVKFGHKQVNVPNNVTSSPTSNPVTTTKPVTTTKPVTTTTKPVTTTTKPVTIINQPSVKPAAAKPAPAKPVAAKPVATKMATVRPPVAVKPATAAKPVAAKPAAVRPPAAAAAKPVATKPEVPRPQAAKPAATKPATTKPMVKMSREVQVFEITENSAKLHWERAEPPGPYFYDLTVTSAHDQSLVLKQNLTVTDRVIGGLLAGQTYHVAVVCYLRSQVRATYHGSFSTKKSQPPPPQPARSASSSTINLMVSTEPLALTETDICKLPKDEGTCRDFILKWYYDPNTKSCARFWYGGCGGNENKFGSQKECEKVCAPVLAKPGVISVMGT

SEQ ID NO: 266939 - DNA, 8934 bp, Artificial Sequence
  derived and/or modified sequence
atgagaaagcacagacacctgcccctggtggccgtgttctgcctgttcctgagcggcttccccaccacccacgcccagcagcagcaggccgacgtgaagaacggcgccgccgccgacatcatcttcctggtggacagcagctggaccatcggcgaggagcacttccagctggtgagagagttcctgtacgacgtggtgaagagcctggccgtgggcgagaacgacttccacttcgccctggtgcagttcaacggcaacccccacaccgagttcctgctgaacacctacagaaccaagcaggaggtgctgagccacatcagcaacatgagctacatcggcggcaccaaccagaccggcaagggcctggagtacatcatgcagagccacctgaccaaggccgccggcagcagagccggcgacggcgtgccccaggtgatcgtggtgctgaccgacggccacagcaaggacggcctggccctgcccagcgccgagctgaagagcgccgacgtgaacgtgttcgccatcggcgtggaggacgccgacgagggcgccctgaaggagatcgccagcgagcccctgaacatgcacatgttcaacctggagaacttcaccagcctgcacgacatcgtgggcaacctggtgagctgcgtgcacagcagcgtgagccccgagagagccggcgacaccgagaccctgaaggacatcaccgcccaggacagcgccgacatcatcttcctgatcgacggcagcaacaacaccggcagcgtgaacttcgccgtgatcctggacttcctggtgaacctgctggagaagctgcccatcggcacccagcagatcagagtgggcgtggtgcagttcagcgacgagcccagaaccatgttcagcctggacacctacagcaccaaggcccaggtgctgggcgccgtgaaggccctgggcttcgccggcggcgagctggccaacatcggcctggccctggacttcgtggtggagaaccacttcaccagagccggcggcagcagagtggaggagggcgtgccccaggtgctggtgctgatcagcgccggccccagcagcgacgagatcagatacggcgtggtggccctgaagcaggccagcgtgttcagcttcggcctgggcgcccaggccgccagcagagccgagctgcagcacatcgccaccgacgacaacctggtgttcaccgtgcccgagttcagaagcttcggcgacctgcaggagaagctgctgccctacatcgtgggcgtggcccagagacacatcgtgctgaagccccccaccatcgtgacccaggtgatcgaggtgaacaagagagacatcgtgttcctggtggacggcagcagcgccctgggcctggccaacttcaacgccatcagagacttcatcgccaaggtgatccagagactggagatcggccaggacctgatccaggtggccgtggcccagtacgccgacaccgtgagacccgagttctacttcaacacccaccccaccaagagagaggtgatcaccgccgtgagaaagatgaagcccctggacggcagcgccctgtacaccggcagcgccctggacttcgtgagaaacaacctgttcaccagcagcgccggctacagagccgccgagggcatccccaagctgctggtgctgatcaccggcggcaagagcctggacgagatcagccagcccgcccaggagctgaagagaagcagcatcatggccttcgccatcggcaacaagggcgccgaccaggccgagctggaggagatcgccttcgacagcagcctggtgttcatccccgccgagttcagagccgcccccctgcagggcatgctgcccggcctgctggcccccctgagaaccctgagcggcacccccgaggagagcaagagagacatcctgttcctgttcgacggcagcgccaacctggtgggccagttccccgtggtgagagacttcctgtacaagatcatcgacgagctgaacgtgaagcccgagggcaccagaatcgccgtggcccagtacagcgacgacgtgaaggtggagagcagattcgacgagcaccagagcaagcccgagatcctgaacctggtgaagagaatgaagatcaagaccggcaaggccctgaacctgggctacgccctggactacgcccagagatacatcttcgtgaagagcgccggcagcagaatcgaggacggcgtgctgcagttcctggtgctgctggtggccggcagaagcagcgacagagtggacggccccgccagcaacctgaagcagagcggcgtggtgcccttcatcttccaggccaagaacgccgaccccgccgagctggagcagatcgtgctgagccccgccttcatcctggccgccgagagcctgcccaagatcggcgacctgcacccccagatcgtgaacctgctgaagagcgtgcacaacggcgcccccgcccccgtgagcggcgagaaggacgtggtgttcctgctggacggcagcgagggcgtgagaagcggcttccccctgctgaaggagttcgtgcagagagtggtggagagcctggacgtgggccaggacagagtgagagtggccgtggtgcagtacagcgacagaaccagacccgagttctacctgaacagctacatgaacaagcaggacgtggtgaacgccgtgagacagctgaccctgctgggcggccccacccccaacaccggcgccgccctggagttcgtgctgagaaacatcctggtgagcagcgccggcagcagaatcaccgagggcgtgccccagctgctgatcgtgctgaccgccgacagaagcggcgacgacgtgagaaaccccagcgtggtggtgaagagaggcggcgccgtgcccatcggcatcggcatcggcaacgccgacatcaccgagatgcagaccatcagcttcatccccgacttcgccgtggccatccccaccttcagacagctgggcaccgtgcagcaggtgatcagcgagagagtgacccagctgaccagagaggagctgagcagactgcagcccgtgctgcagcccctgcccagccccggcgtgggcggcaagagagacgtggtgttcctgatcgacggcagccagagcgccggccccgagttccagtacgtgagaaccctgatcgagagactggtggactacctggacgtgggcttcgacaccaccagagtggccgtgatccagttcagcgacgaccccaaggtggagttcctgctgaacgcccacagcagcaaggacgaggtgcagaacgccgtgcagagactgagacccaagggcggcagacagatcaacgtgggcaacgccctggagtacgtgagcagaaacatcttcaagagacccctgggcagcagaatcgaggagggcgtgccccagttcctggtgctgatcagcagcggcaagagcgacgacgaggtggacgaccccgccgtggagctgaagcagttcggcgtggcccccttcaccatcgccagaaacgccgaccaggaggagctggtgaagatcagcctgagccccgagtacgtgttcagcgtgagcaccttcagagagctgcccagcctggagcagaagctgctgacccccatcaccaccctgaccagcgagcagatccagaagctgctggccagcaccagataccccccccccgccgtggagagcgacgccgccgacatcgtgttcctgatcgacagcagcgagggcgtgagacccgacggcttcgcccacatcagagacttcgtgagcagaatcgtgagaagactgaacatcggccccagcaaggtgagagtgggcgtggtgcagttcagcaacgacgtgttccccgagttctacctgaagacctacagaagccaggcccccgtgctggacgccatcagaagactgagactgagaggcggcagccccctgaacaccggcaaggccctggagttcgtggccagaaacctgttcgtgaagagcgccggcagcagaatcgaggacggcgtgccccagcacctggtgctggtgctgggcggcaagagccaggacgacgtgagcagattcgcccaggtgatcagaagcagcggcatcgtgagcctgggcgtgggcgacagaaacatcgacagaaccgagctgcagaccatcaccaacgaccccagactggtgttcaccgtgagagagttcagagagctgcccaacatcgaggagagaatcatgaacagcttcggccccagcgccgccacccccgccccccccggcgtggacacccccccccccagcagacccgagaagaagaaggccgacatcgtgttcctgctggacggcagcatcaacttcagaagagacagcttccaggaggtgctgagattcgtgagcgagatcgtggacaccgtgtacgaggacggcgacagcatccaggtgggcctggtgcagtacaacagcgaccccaccgacgagttcttcctgaaggacttcagcaccaagagacagatcatcgacgccatcaacaaggtggtgtacaagggcggcagacacgccaacaccaaggtgggcctggagcacctgagagtgaaccacttcgtgcccgaggccggcagcagactggaccagagagtgccccagatcgccttcgtgatcaccggcggcaagagcgtggaggacgcccaggacgtgagcctggccctgacccagagaggcgtgaaggtgttcgccgtgggcgtgagaaacatcgacagcgaggaggtgggcaagatcgccagcaacagcgccaccgccttcagagtgggcaacgtgcaggagctgagcgagctgagcgagcaggtgctggagaccctgcacgacgccatgcacgagaccctgtgccccggcgtgaccgacgccgccaaggcctgcaacctggacgtgatcctgggcttcgacggcagcagagaccagaacgtgttcgtggcccagaagggcttcgagagcaaggtggacgccatcctgaacagaatcagccagatgcacagagtgagctgcagcggcggcagaagccccaccgtgagagtgagcgtggtggccaacacccccagcggccccgtggaggccttcgacttcgacgagtaccagcccgagatgctggagaagttcagaaacatgagaagccagcacccctacgtgctgaccgaggacaccctgaaggtgtacctgaacaagttcagacagagcagccccgacagcgtgaaggtggtgatccacttcaccgacggcgccgacggcgacctggccgacctgcacagagccagcgagaacctgagacaggagggcgtgagagccctgatcctggtgggcctggagagagtggtgaacctggagagactgatgcacctggagttcggcagaggcttcatgtacgacagacccctgagactgaacctgctggacctggactacgagctggccgagcagctggacaacatcgccgagaaggcctgctgcggcgtgccctgcaagtgcagcggccagagaggcgacagaggccccatcggcagcatcggccccaagggcatccccggcgaggacggctacagaggctaccccggcgacgagggcggccccggcgagagaggcccccccggcgtgaacggcacccagggcttccagggctgccccggccagagaggcgtgaagggcagcagaggcttccccggcgagaagggcgaggtgggcgagatcggcctggacggcctggacggcgaggacggcgacaagggcctgcccggcagcagcggcgagaagggcaaccccggcagaagaggcgacaagggccccagaggcgagaagggcgagagaggcgacgtgggcatcagaggcgaccccggcaaccccggccaggacagccaggagagaggccccaagggcgagaccggcgacctgggccccatgggcgtgcccggcagagacggcgtgcccggcggccccggcgagaccggcaagaacggcggcttcggcagaagaggcccccccggcgccaagggcaacaagggcggccccggccagcccggcttcgagggcgagcagggcaccagaggcgcccagggccccgccggccccgccggcccccccggcctgatcggcgagcagggcatcagcggccccagaggcagcggcggcgccgccggcgcccccggcgagagaggcagaaccggccccctgggcagaaagggcgagcccggcgagcccggccccaagggcggcatcggcaacagaggccccagaggcgagaccggcgacgacggcagagacggcgtgggcagcgagggcagaagaggcaagaagggcgagagaggcttccccggctaccccggccccaagggcaaccccggcgagcccggcctgaacggcaccaccggccccaagggcatcagaggcagaagaggcaacagcggcccccccggcatcgtgggccagaagggcgaccccggctaccccggccccgccggccccaagggcaacagaggcgacagcatcgaccagtgcgccctgatccagagcatcaaggacaagtgcccctgctgctacggccccctggagtgccccgtgttccccaccgagctggccttcgccctggacaccagcgagggcgtgaaccaggacaccttcggcagaatgagagacgtggtgctgagcatcgtgaacgacctgaccatcgccgagagcaactgccccagaggcgccagagtggccgtggtgacctacaacaacgaggtgaccaccgagatcagattcgccgacagcaagagaaagagcgtgctgctggacaagatcaagaacctgcaggtggccctgaccagcaagcagcagagcctggagaccgccatgagcttcgtggccagaaacaccttcaagagagtgagaaacggcttcctgatgagaaaggtggccgtgttcttcagcaacacccccaccagagccagcccccagctgagagaggccgtgctgaagctgagcgacgccggcatcacccccctgttcctgaccagacaggaggacagacagctgatcaacgccctgcagatcaacaacaccgccgtgggccacgccctggtgctgcccgccggcagagacctgaccgacttcctggagaacgtgctgacctgccacgtgtgcctggacatctgcaacatcgaccccagctgcggcttcggcagctggagacccagcttcagagacagaagagccgccggcagcgacgtggacatcgacatggccttcatcctggacagcgccgagaccaccaccctgttccagttcaacgagatgaagaagtacatcgcctacctggtgagacagctggacatgagccccgaccccaaggccagccagcacttcgccagagtggccgtggtgcagcacgcccccagcgagagcgtggacaacgccagcatgccccccgtgaaggtggagttcagcctgaccgactacggcagcaaggagaagctggtggacttcctgagcagaggcatgacccagctgcagggcaccagagccctgggcagcgccatcgagtacaccatcgagaacgtgttcgagagcgcccccaaccccagagacctgaagatcgtggtgctgatgctgaccggcgaggtgcccgagcagcagctggaggaggcccagagagtgatcctgcaggccaagtgcaagggctacttcttcgtggtgctgggcatcggcagaaaggtgaacatcaaggaggtgtacaccttcgccagcgagcccaacgacgtgttcttcaagctggtggacaagagcaccgagctgaacgaggagcccctgatgagattcggcagactgctgcccagcttcgtgagcagcgagaacgccttctacctgagccccgacatcagaaagcagtgcgactggttccagggcgaccagcccaccaagaacctggtgaagttcggccacaagcaggtgaacgtgcccaacaacgtgaccagcagccccaccagcaaccccgtgaccaccaccaagcccgtgaccaccaccaagcccgtgaccaccaccaccaagcccgtgaccaccaccaccaagcccgtgaccatcatcaaccagcccagcgtgaagcccgccgccgccaagcccgcccccgccaagcccgtggccgccaagcccgtggccaccaagatggccaccgtgagaccccccgtggccgtgaagcccgccaccgccgccaagcccgtggccgccaagcccgccgccgtgagaccccccgccgccgccgccgccaagcccgtggccaccaagcccgaggtgcccagaccccaggccgccaagcccgccgccaccaagcccgccaccaccaagcccatggtgaagatgagcagagaggtgcaggtgttcgagatcaccgagaacagcgccaagctgcactgggagagagccgagccccccggcccctacttctacgacctgaccgtgaccagcgcccacgaccagagcctggtgctgaagcagaacctgaccgtgaccgacagagtgatcggcggcctgctggccggccagacctaccacgtggccgtggtgtgctacctgagaagccaggtgagagccacctaccacggcagcttcagcaccaagaagagccagcccccccccccccagcccgccagaagcgccagcagcagcaccatcaacctgatggtgagcaccgagcccctggccctgaccgagaccgacatctgcaagctgcccaaggacgagggcacctgcagagacttcatcctgaagtggtactacgaccccaacaccaagagctgcgccagattctggtacggcggctgcggcggcaacgagaacaagttcggcagccagaaggagtgcgagaaggtgtgcgcccccgtgctggccaagcccggcgtgatcagcgtgatgggcacctag

SEQ ID NO: 266940 - DNA, 8934 bp, Artificial Sequence
  derived and/or modified sequence
atgagaaagcatcgtcatttaccgctcgtggccgtcttttgtttatttctctcaggtttccctaccactcacgcacagcaacagcaggctgacgtgaaaaacggggctgctgccgacattatctttctggtcgactccagctggactattggagaggaacatttccaactcgtgcgggaattcctttatgacgtagtaaaatcactcgccgtgggggagaatgactttcactttgccctggtccagtttaacgggaatccacataccgagtttcttctgaacacttataggaccaagcaggaggtgctgtcgcacattagcaatatgagctatattggaggaactaaccaaaccggcaaaggtctggaatatattatgcagtcacatttgacaaaagctgccggctctagagccggcgacggggtgccccaggttattgtggtgctgactgatggccattcaaaggatgggctcgcccttcccagtgcagagcttaagagtgccgacgtgaatgtgtttgcgatcggggtggaggatgctgatgaaggggcactgaaggaaattgctagcgaacccttaaatatgcacatgtttaatctcgaaaacttcacctcccttcacgacattgttggtaatctggttagctgcgtgcactcgtctgtctctccggagagggcgggcgacactgaaacattaaaagacatcactgctcaggacagcgcggatattatttttcttatcgacggctccaataatacggggtctgtcaactttgccgtgattctggactttctagtcaacctccttgaaaagttgccaattggtactcagcaaatccgagtcggagtcgtccagtttagtgatgagcctaggaccatgttcagtctcgacacttatagcaccaaagcgcaagtgcttggagccgtcaaggcactgggtttcgctgggggtgagctcgctaatatcggattggctctggactttgtcgtggagaatcattttactcgcgcaggaggatcacgtgtggaggagggcgtccctcaggttctggtcttaatctcagctggaccgtctagcgacgaaattcgatatggtgtagtagccctgaagcaggccagcgtgttctcatttggcctgggggcccaagctgcatcacgtgctgaactgcagcacatcgccacagatgacaatcttgtgtttactgtccccgagttcagaagcttcggagacctgcaggaaaagctactcccatacattgtcggcgtcgctcagcggcacatcgtgcttaagccacctacaatagtcacgcaggttattgaggttaacaaaagggatatcgtgtttttagtggatggcagcagcgcactgggacttgctaactttaatgccatcagagatttcatcgcgaaggtgatccagagattagaaatcggacaggacctgattcaggtggcagtggctcagtacgccgatactgttcggcctgaattttacttcaacacacatccaactaaacgggaagtcataactgctgttcgcaagatgaagccactcgacgggtcagctctttatacaggctctgcactggactttgtgaggaacaatctgttcactagctccgcgggttatcgtgccgcggaggggatacctaagttgctggttttaatcaccggtggaaagagcctggatgagatatcccagccggctcaggagcttaagcgttcctcaatcatggccttcgctatcggaaataaaggcgctgatcaggccgaactcgaggaaattgcctttgattcttccctcgtttttatcccggcagaattcagagctgccccacttcagggaatgctacccggtctgctcgcccctctgcgtaccctgagcggaaccccagaggaaagcaagagagatatcctcttcttattcgacggctccgccaatcttgtgggacaattccctgtcgtacgcgactttctttacaagatcattgacgagctcaacgtcaagcctgagggaactagaatcgctgtggctcagtacagtgatgatgttaaggttgagtcgcgctttgacgaacaccagagcaagccagagatcctcaatctggtgaagagaatgaagatcaagactggaaaagctctgaatttaggatatgccctggactacgcccagaggtacattttcgttaaatctgcaggctcacgcatcgaagatggagtgctgcagttcctggttctccttgtcgccggtcggagctcggaccgggtagacggacctgcatccaatcttaagcaatccggagtggtaccgttcattttccaggccaagaacgcggaccctgctgagcttgaacaaattgtcttgagccctgcattcatacttgcagctgagtccctgccaaaaattggcgatcttcacccacagattgttaatctgcttaagagcgtgcacaacggagcgcccgcacctgtgtccggagaaaaagatgttgtttttctactggacggatccgagggagttcggtctggcttcccactgctgaaagaattcgttcagcgggtggtggagagcttagatgttggccaggaccgtgtcagagttgctgtcgtccagtattcggaccggacccgccctgagttttacctcaactcatatatgaataagcaggacgtggtgaacgcggtccgtcagctcaccctcttgggcgggcctacccctaacaccggagcagcactggaatttgtgcttcgtaatatactggtgtcaagcgccggttctcgcatcaccgagggtgttccccagctgctgatcgtgctcacggccgatcgaagcggcgacgatgtcaggaacccaagcgtcgttgtgaaaagaggaggtgctgttcctatagggattggcatcggcaacgccgatatcactgagatgcagactatctcctttataccagattttgctgttgccatacccacatttagacagctaggaactgtgcagcaagtcatcagtgagcgagtgacacaactgacacgggaggagcttagcagactccaacccgtcttacaacctctgccatcccccggggttggcggtaaaagggacgtggtcttcctcattgatggatcgcagagtgccggtcctgaatttcagtatgtgcgtacactaatcgagcgcttggtcgactatttggacgtgggctttgacaccacacgcgtggcagtcatccagttcagcgacgaccctaaggtggaatttttactgaacgcccacagctcaaaggacgaggtacagaatgccgtacaacgtttacgacctaagggaggcagacagataaacgtgggtaatgccctcgaatacgtgtccagaaacatatttaaacgaccactcggcagcaggatagaggaaggtgtcccccagttcttggtgctcatcagctcaggcaaatctgatgacgaggtcgatgatcctgcggtggagttaaaacaattcggggttgctcctttcactatcgcgagaaatgctgaccaagaagagcttgtgaaaatcagcctctccccagaatacgtgttctcagtttcaaccttcagggaattgccttctctggagcagaaacttttgacccccatcaccacgcttactagtgaacaaatccagaaattgctggcctctacccgctacccccctccagctgtggaatccgatgccgccgatatcgtattcctgatcgacagttccgaaggtgtgcgcccagacgggtttgcccacattagagactttgtttccaggatcgtcaggcggctcaatattgggccctcaaaagtacgggtaggcgtagttcagttctcaaatgatgtctttccagagttttatctcaaaacctatagatcccaggctccggtgcttgacgccataaggaggctcaggctgagaggaggatctcccctaaatactggaaaggccctcgagttcgttgctagaaatctcttcgtgaaatcagcaggctcaagaatcgaagatggggtcccacagcacctcgtgcttgttctggggggaaagtcacaggatgacgtgagtagatttgctcaggtcatccgctcttcgggcattgtgagccttggagtgggagaccgcaacattgatcggacagagctgcagacgatcactaatgacccgcgcctcgtcttcaccgtgagggagtttagagagctgcctaatatcgaggaaaggatcatgaactcttttgggccgagcgcagccacaccagctcctccaggggtagatacgcctccccccagtcgcccggagaagaagaaagccgatatcgtttttctgctagacggctcaatcaacttccggcgtgattctttccaggaagtgctgagatttgtctctgagattgtggacaccgtttacgaggatggtgactccatccaggtaggactggttcagtataatagtgatcccaccgacgaattctttctgaaagattttagcacgaaacggcagattattgacgctataaacaaagtcgtctacaaggggggccggcacgccaatacgaaagtcgggctagaacacctgagggttaatcacttcgtgccggaggccggtagcaggttggaccaacgagtccctcagatcgcctttgtcatcacggggggtaaaagcgttgaagatgcgcaggatgtatccctggctctgacccagagaggagtgaaggtgtttgctgtgggggtacgcaatattgacagcgaggaggttggcaagattgcttctaactctgcgaccgcgttcagggttggaaacgtccaggagctgtcggaactgtctgagcaagtgttagagaccctccatgatgccatgcacgaaacattgtgccccggcgtcaccgatgctgccaaagcgtgtaatctggatgtgattctgggatttgatggctctcgcgatcagaatgtcttcgtcgcccagaagggattcgagtctaaagtggatgccattctgaaccgaatctcccaaatgcacagggtgtcctgtagcggcggcagatcccccacagtgcgagtaagcgtggtggccaacacaccttcagggccagttgaggcgtttgatttcgacgaataccagcccgaaatgctggagaagtttaggaatatgcggagccagcacccttatgttctcactgaagacacccttaaggtgtacttaaataagtttaggcagtcatcacccgactcggtcaaggtcgtaattcattttacagatggggcagatggcgatctcgcagatctacatcgcgcttccgagaaccttaggcaggagggcgtgagggccttgatcctggtgggactagagcgtgtggtcaacctggagaggctcatgcaccttgagttcggcagaggcttcatgtatgaccgcccgcttcggttaaatttgttggatctggactacgaactggccgagcaattggacaacattgccgagaaggcttgctgcggagtcccatgtaaatgctcaggtcaacgaggcgaccggggcccgattggcagtatcggaccgaaggggattccaggtgaagatggatatagagggtatcctggcgacgaggggggtccaggggaacgagggcccccaggagtcaacggaactcagggatttcagggctgtcctggacagaggggcgtcaaagggtctcgcggctttcccggggagaagggagaagtcggcgaaatcgggttagatgggctggatggggaggacggagataaaggccttcccgggtctagtggcgaaaaagggaatccaggacggagaggagacaaaggaccgagaggagagaaaggcgaaaggggggacgttgggatccggggtgaccccgggaatcctggccaggacagccaggagaggggcccaaagggagagactggtgaccttggtcccatgggggtgcctggcagagatggcgtgcccggcggccccggtgagaccggtaaaaacggcggttttggtcggcgcggccctcccggcgcaaagggaaacaaggggggccccggccagcccggctttgagggcgagcaggggacaaggggcgcccagggaccagctggtccggccggccctccaggcctgatcggcgaacaagggattagtgggccccggggtagcggtggtgcagctggagcgcctggtgagagagggagaacaggacctttagggagaaaaggggaaccaggcgaacccgggccaaagggcggaattggaaacaggggaccccgcggagagacgggagatgatgggcgcgatggggtgggcagtgaaggcagacgtggaaaaaaaggcgagagaggattccccggctaccctgggccgaaaggaaaccccggggagcccggcctgaatggaacaacgggacccaaaggtattcgaggtcgaaggggcaactcgggaccacctggtatcgtgggccaaaagggtgaccccggttacccaggaccagccgggccaaaaggaaaccgcggcgactctatcgatcagtgtgccctgatacagtcaatcaaggataaatgcccctgctgctatggaccactagaatgtccagtgtttcctaccgaattggccttcgctttggacacaagtgaaggtgtgaaccaagacactttcggacggatgagggacgttgtgctgtccatcgtgaatgatcttaccatcgccgagtcaaattgcccaaggggggctagggtggccgtcgtcacttataataatgaggtcaccaccgaaattcggttcgcagacagcaaaaggaaatctgtgctgttagataaaattaagaatttgcaagttgctttgactagcaaacagcaaagtctcgagactgcgatgtcttttgttgcaaggaatactttcaagagagtccgcaacggattcctcatgcgtaaggttgccgtcttcttcagcaataccccaacccgcgcgagtcctcagctcagagaggccgtcctgaagctgtctgacgcagggattacgcccctgtttctgaccaggcaggaggatcgtcagctgatcaatgccttgcagatcaataatacggccgtgggccacgccctcgtcctgccagcaggcagagacttgacagattttctcgagaacgtcttgacttgtcatgtgtgcctcgacatctgtaacattgacccgtcttgcggatttggatcctggaggccctctttccgtgaccggcgggcagctgggtcagacgtcgacattgacatggcctttatcctcgatagtgctgaaacgactaccctctttcagttcaatgaaatgaagaagtacattgcatacctggttcgacaattggatatgagccccgaccccaaggcaagtcagcatttcgcccgcgtggccgttgtgcaacacgccccctcagagagcgtggacaacgcgtcaatgccccccgttaaggtggaattctccctcaccgattatggcagtaaggaaaaactggtggacttcctgtctaggggaatgactcagttgcagggcaccagagcacttggatcagctatcgaatacactattgaaaacgtgttcgagagtgccccgaacccccgcgacttgaagatcgtcgttctcatgctgacaggcgaggtacccgaacagcaactggaggaagcacagagagtcattctgcaggccaaatgtaagggctatttctttgtggtactgggcataggacggaaagttaacattaaagaagtgtatacttttgctagcgagcctaacgacgtcttcttcaaacttgtggacaaatctacagagctgaacgaggaaccactgatgaggtttggtcggctcctgccatccttcgttagttcagaaaatgccttctacctgtcccctgatatccgaaagcagtgtgactggttccagggcgatcagcccacaaaaaatctggtcaagtttggtcataaacaggtgaacgtccctaataacgttacaagctcacctacctcaaaccctgtaaccactaccaagccagtgacaactaccaagcccgtcacaaccaccacaaaacccgttaccacaacaacaaagccggtcacgataattaatcagccaagtgtgaagcctgctgccgcgaagcctgctcctgctaagcctgtcgccgcaaagccagtggccaccaagatggcgacagtgaggcctcctgttgccgttaagcctgcgacggctgcaaagccagtggctgcgaagccggccgccgttcggccaccagccgccgccgctgcaaaacccgtggccaccaaaccagaagtcccgagaccccaggccgcgaaacccgcagcaacaaagccggccacgactaagcccatggttaagatgtcaagagaggtgcaagtgtttgaaatcacagagaactctgcaaagctccattgggaacgggcagagccaccgggtccttatttttacgacctgactgtaacgtccgcacatgaccaaagtctagtcctgaaacagaatttgaccgtcaccgatagggtcatcgggggcttgttagccggccagacctaccacgtcgcggtggtctgttatctgagaagccaggttcgagcaacatatcacggctccttcagcactaaaaaaagtcagccgcctccgcctcaacccgctagaagtgcaagctccagcacaattaacctgatggtgtcaacagaaccattggccttgactgagacagatatatgcaaattacctaaggatgaaggcacgtgccgtgactttatcctgaagtggtattacgacccgaacactaaatcttgtgcccgattctggtatgggggatgcgggggcaatgagaataagtttgggagccagaaagaatgcgagaaagtttgcgctccggttttggccaaaccgggcgtgatctctgtgatgggtacttag

SEQ ID NO: 266941 - DNA, 8934 bp, Artificial Sequence
  derived and/or modified sequence
atgaggaagcaccgccacctgcccctggtggccgtgttctgcctcttcctgagcggcttccccaccacccacgcccagcagcagcaggctgatgtgaagaatggagctgctgctgacatcatcttcctggtggacagctcctggaccatcggggaggagcacttccagctggtgcgggagttcctgtatgatgtggtgaagagcctggccgtgggagaaaatgacttccactttgccctggtgcagttcaacggcaacccccacacagagttcctgctgaacacctaccgcaccaagcaggaggtgctgagccacatcagcaacatgagctacatcggcggcaccaaccagacaggcaagggcctggagtacatcatgcagagccacctgaccaaggccgccggcagcagagctggagatggagtgccccaggtgattgtggtgctgacagatggccacagcaaggatggcctggccctgcccagcgctgagctgaagtctgcagatgtgaatgtgtttgccatcggcgtggaggatgctgatgaaggagccctgaaggagatcgccagcgagcccctgaacatgcacatgttcaacctggagaacttcaccagcctgcatgacatcgtgggcaacctggtgtcctgtgtgcacagctctgtgtccccagagcgggccggggacacagagaccctgaaggacatcacagcccaggacagcgctgacatcatcttcctgattgatggcagcaacaacacaggctctgtgaactttgctgtgatcctggacttcctggtgaacctgctggagaagctgcccatcggcacccagcagatccgggtgggcgtggtgcagttcagtgatgagcccaggaccatgttcagcctggacacctacagcaccaaggcccaggtgctgggcgctgtgaaggccctgggctttgctggaggagagctggccaacatcggcctggccctggactttgtggtggagaaccacttcaccagggctgggggcagccgggtggaggagggcgtgccccaggtgctggtgctgatctctgctggccccagcagtgatgagatccgctatggagtggtggccctgaagcaggcctctgtgttctcctttggcctgggcgcccaggccgccagcagagctgagctgcagcacatcgccacagatgacaacctggtgttcaccgtgcctgagttccgcagctttggagacctgcaggagaagctgctgccctacatcgtgggcgtggcccagaggcacatcgtgctgaagccacccaccatcgtgacccaggtgattgaggtgaacaagagggacatcgtgttcctggtggatggcagcagcgccctgggcctggccaacttcaatgccatccgggacttcatcgccaaggtgatccagaggctggagatcggccaggacctgatccaggtggccgtggcccagtatgctgacacagtgcggcctgagttctacttcaacacccaccccaccaagcgggaggtgatcacagctgtgaggaagatgaagcccctggatggcagcgccctgtacacaggcagcgccctggactttgtgaggaacaacctcttcaccagcagcgctggctacagagctgctgagggcatccccaagctgctggtgctgatcactggaggcaagagcctggatgagatcagccagcctgcccaggagctgaagaggagcagcatcatggcctttgccatcggcaacaagggagctgaccaggccgagctggaggagatcgcctttgacagcagcctggtgttcatcccagctgagttccgggccgcccccctgcagggcatgctgcccggcctgctggcccccctgcggaccctgagcggcaccccagaggagagcaagagggacatcctcttcctgtttgatggcagcgccaacctggtgggccagtttcctgtggtgcgggacttcctgtacaagatcattgatgagctgaatgtgaagccagagggcaccagaattgctgtggcccagtacagtgatgatgtgaaggtggagagcagatttgatgagcaccagagcaagccagagatcctgaacctggtgaagaggatgaagatcaagacaggcaaggccctgaacctgggctacgccctggactatgcccagcgctacatctttgtgaagtctgctggcagcagaattgaagatggagtgctgcagttcctggtgctgctggtggccggccgcagcagtgacagagtggatggccctgccagcaacctgaagcagagcggcgtggtgcccttcatcttccaggccaagaatgctgaccctgctgagctggagcagatcgtgctgagccctgccttcatcctggccgctgagagcctgcccaagatcggggacctgcacccccagatcgtgaacctgctgaagtctgtgcacaacggggccccagcccctgtgtctggagagaaggatgtggtgttcctgctggatggcagcgagggcgtgcgcagcggcttccccctgctgaaggagtttgtgcagagggtggtggagagcctggatgtgggccaggacagagtgcgggtggccgtggtgcagtacagcgacaggaccaggcctgagttctacctgaacagctacatgaacaagcaggatgtggtgaatgctgtgcggcagctgaccctgctgggcggccccacccccaacacaggagctgccctggagtttgtgctgaggaacatcctggtgtcctctgctggcagccgcatcacagaaggagtgccccagctgctgattgtgctgacagctgacagaagtggagatgatgtgaggaaccccagcgtggtggtgaagaggggcggcgctgtgcccatcggcattggaattggaaatgctgacatcacagagatgcagaccatctccttcatcccagactttgctgtggccatccccaccttccggcagctgggcaccgtgcagcaggtgatcagcgagcgggtgacccagctgacccgggaggagctgagccggctgcagcctgtgctgcagcccctgcccagccctggggtgggcggcaagagagatgtggtgttcctgattgatggcagccagagcgctggccctgagttccagtatgtgaggaccctgattgagcggctggtggactacctggatgtgggctttgacaccaccagggtggccgtcatccagttcagtgatgaccccaaggtggagttcctgctgaatgcccacagcagcaaggatgaggtgcagaatgctgtgcagaggctgcggcccaagggcggccggcagatcaacgtgggcaatgccctggagtatgtgtccaggaacatcttcaagaggcccctgggcagccgcatcgaggagggcgtgccccagttcctggtgctgatcagcagcggcaagagtgatgatgaggtggatgatcctgctgtggagctgaagcagtttggagtggcccccttcaccatcgccagaaatgctgaccaggaggagctggtgaagatcagcctgagcccagaatatgtgttttctgtgtccaccttccgggagctgcccagcctggagcagaagctgctgacccccatcaccaccctgaccagcgagcagatccagaagctgctggccagcacccgctacccacctcctgctgtggagagtgatgctgctgacatcgtgttcctgattgacagcagcgagggcgtgcggccagatggctttgcccacatccgggactttgtgagccgcatcgtgcggcggctgaacatcggccccagcaaggtgcgggtgggcgtggtgcagttcagcaatgatgtgtttcctgagttctacctgaagacctaccgcagccaggcccctgtgctggatgccatccggcggctgcggctgcggggcggcagccccctgaacacaggcaaggccctggagtttgtggccaggaacctgtttgtgaagtctgctggcagcagaattgaagatggagtgccccagcacctggtgctggtgctgggcggcaagagccaggatgatgtgtccagatttgcccaggtgatccgcagcagcggcatcgtgtccctgggcgtgggggacaggaacatcgacagaacagagctgcagaccatcaccaatgacccccggctggtgttcaccgtgcgggagttccgggagctgcccaacatcgaggagcgcatcatgaacagctttggccccagcgctgccaccccagcccctcctggggtggacaccccaccacccagcaggcctgagaagaagaaggctgacatcgtgttcctgctggatggcagcatcaacttcagaagagacagcttccaggaggtgctgcgctttgtgtctgaaattgtggacacagtgtatgaagatggagacagcatccaggtgggcctggtgcagtacaacagcgaccccacagatgagttcttcctgaaggacttcagcaccaagaggcagatcattgatgccatcaacaaggtggtgtacaagggcggcagacatgccaacaccaaggtgggcctggagcacctgcgggtgaaccactttgtgcctgaggccggcagccggctggaccagagggtgccccagatcgccttcgtcatcactggaggcaagtctgtggaggatgcccaggatgtgtccctggccctgacccagaggggcgtgaaggtgtttgctgtgggcgtgagaaatattgattctgaggaggtgggcaagatcgccagcaacagcgccacagccttccgggtgggcaatgtgcaggagctgtctgagctgtctgagcaggtgctggagaccctgcatgatgccatgcatgagaccctgtgccctggggtgacagatgctgccaaggcctgcaacctggatgtgatcctgggctttgatggcagccgggaccagaatgtgtttgtggcccagaagggctttgagagcaaggtggatgccatcctgaaccgcatcagccagatgcaccgggtgtcctgcagcggcggccgcagccccaccgtgcgggtgtctgtggtggccaacaccccatctggccctgtggaggcctttgattttgatgagtaccagcctgagatgctggagaagttcaggaacatgaggagccagcacccctacgtgctgacagaggacaccctgaaggtgtacctgaacaagttccggcagagcagcccagacagcgtgaaggtggtgatccacttcacagatggagcagatggagacctggccgacctgcaccgggccagcgagaacctgcggcaggagggcgtgcgggccctgatcctggtgggcctggagcgggtggtgaacctggagcggctgatgcacctggagtttggccggggcttcatgtatgaccggcccctgcggctgaacctgctggacctggactatgagctggccgagcagctggacaacattgctgagaaggcctgctgcggcgtgccctgcaagtgcagcggccagagaggagaccggggccccatcggcagcatcggccccaagggcatccctggagaagatggctaccggggctacccaggagatgagggcggccctggagagcggggccccccaggagtgaatggcacccagggcttccagggctgccccggccagaggggcgtgaagggcagccggggcttccctggagagaagggggaggtgggggagatcggcctggatggcctggatggagaagatggagacaagggcctgcccggcagcagtggagagaagggcaaccctggaagaagaggagacaagggccccagaggagagaagggggagagaggagatgtgggcatccggggggaccccggcaaccctggccaggacagccaggagcggggccccaagggggagactggagacctgggccccatgggcgtgcccggcagagatggagtgcctgggggccctggagagaccgggaagaatggaggcttcggccggcggggccccccaggggccaagggcaacaagggcggccctggccagcccggctttgaaggagagcagggcaccaggggggcccagggccctgctggccctgctggccccccaggcctcatcggggagcagggcatcagcggcccccggggcagcggcggcgctgctggggcccctggagagcggggccgcacaggccccctgggcaggaagggggagcctggagagcccggccccaagggcggcatcggcaacagaggccccagaggagaaacaggagatgatggaagagatggagtgggcagcgagggccggcggggcaagaagggggagcggggcttccctggctacccaggccccaagggcaaccctggagagcccggcctgaatggcaccaccggccccaagggcatccggggccggcggggcaacagcggccccccaggcatcgtgggccagaagggggaccccggctacccaggccctgctggccccaagggcaacagaggagacagcattgaccagtgtgccctgatccagagcatcaaggacaagtgcccctgctgctacggccccctggagtgccctgtgttccccacagagctggcctttgccctggacaccagcgagggcgtgaaccaggacaccttcggccgcatgagagatgtggtgctgagcatcgtgaatgacctgaccatcgccgagagcaactgccccaggggggcccgggtggccgtggtgacctacaacaatgaggtgaccacagagatccgctttgctgacagcaagaggaagtctgtgctgctggacaagatcaagaacctgcaggtggccctgaccagcaagcagcagagcctggagacagccatgagctttgtggccaggaacaccttcaagagggtgagaaatggcttcctgatgaggaaggtggccgtgttcttcagcaacacccccacccgggccagcccccagctgcgggaggccgtgctgaagctgagtgatgctggcatcacccccctcttcctgacccggcaggaggaccggcagctgatcaatgccctgcagatcaacaacacagctgtgggccacgccctggtgctgcctgctggccgggacctgacagacttcctggagaatgtgctgacctgccacgtgtgcctggacatctgcaacatcgaccccagctgtggcttcggctcctggaggcccagcttccgggacagaagagctgctggcagtgatgtggacatcgacatggccttcatcctggacagcgctgagaccaccaccctcttccagttcaatgagatgaagaagtacatcgcctacctggtgcggcagctggacatgagcccagaccccaaggccagccagcactttgcccgggtggccgtggtgcagcacgcccccagcgagagcgtggacaatgcctccatgcctcctgtgaaggtggagttcagcctgacagattatggcagcaaggagaagctggtggacttcctgagccggggcatgacccagctgcagggcacccgggccctgggcagcgccatcgagtacaccattgaaaatgtgtttgaaagtgcccccaacccccgggacctgaagatcgtggtgctgatgctgaccggggaggtgcctgagcagcagctggaggaggcccagagggtcatcctgcaggccaagtgcaagggctacttctttgtggtgctgggcatcggcaggaaggtgaacatcaaggaggtgtacacctttgccagcgagcccaatgatgtgttcttcaagctggtggacaagagcacagagctgaatgaggagcccctgatgagatttggccgcctgctgcccagctttgtgtccagtgaaaatgccttctacctgagcccagacatcaggaagcagtgtgactggttccagggcgaccagcccaccaagaacctggtgaagtttggccacaagcaggtgaatgtgcccaacaacgtgaccagcagccccaccagcaaccctgtgaccaccaccaagcctgtgaccaccaccaagcctgtgaccaccaccaccaagcctgtgaccaccaccaccaagcctgtgaccatcatcaaccagcccagcgtgaagccagctgctgccaagccagccccagccaagcctgtggccgccaagcctgtggccaccaagatggccaccgtgcggccccctgtggccgtgaagccagccacagctgccaagcctgtggccgccaagccagctgctgtgcggcccccagctgctgctgctgccaagcctgtggccaccaagccagaggtgccccggccccaggccgccaagccagctgccaccaagccagccaccaccaagcccatggtgaagatgagccgggaggtgcaggtgtttgagatcacagagaacagcgccaagctgcactgggagcgggcagagcccccaggcccctacttctatgacctgactgtgaccagcgcccatgaccagagcctggtgctgaagcagaacctgactgtgacagacagagtgattggaggcctgctggccggccagacctaccacgtggccgtggtgtgctacctgcggagccaggtgcgggccacctaccacggcagcttcagcaccaagaagagccagcccccaccaccccagcctgcccggagcgccagcagcagcaccatcaacctgatggtgtccacagagcccctggccctgacagaaacagacatctgcaagctgcccaaggatgagggcacctgccgggacttcatcctgaagtggtactatgaccccaacaccaagagctgtgcccgcttctggtacggcggctgcggcggcaatgaaaacaagtttggcagccagaaggaatgtgagaaggtgtgtgcccctgtgctggccaagccaggagtcatctctgtgatgggcacctag

SEQ ID NO: 266942 - DNA, 9219 bp, Artificial Sequence
  derived and/or modified sequence
aagccctgactggtatccctggccccagtccagtttggagctcagtcttccaccaaaggccgttcagttctcctgggctccagcctcctgcaaggactgcaagagttttcctccgcagctctgagtctccacttttttggtggagaaaggctgcaaaaagaaaaagagacgcagtgagtgggaaaagtatgcatcctattcaaacctaattgaatcgaggagcccagggacacacgccttcaggtttgctcaggggttcatatttggtgcttagacaaattcaaaatgaggaaacatcggcacttgcccttagtggccgtcttttgcctctttctctcaggctttcctacaactcatgcccagcagcagcaagcagatgtcaaaaatggtgcggctgctgatataatatttctagtggattcctcttggaccattggagaggaacatttccaacttgttcgagagtttctatatgatgttgtaaaatccttagctgtgggagaaaatgatttccattttgctctggtccagttcaacggaaacccacataccgagttcctgttaaatacgtatcgtactaaacaagaagtcctttctcatatttccaacatgtcttatattgggggaaccaatcagactggaaaaggattagaatacataatgcaaagccacctcaccaaggctgctggaagccgggccggtgacggagtccctcaggttatcgtagtgttaactgatggacactcgaaggatggccttgctctgccctcagcggaacttaagtctgctgatgttaacgtgtttgcaattggagttgaggatgcagatgaaggagcgttaaaagaaatagcaagtgaaccgctcaatatgcatatgttcaacctagagaattttacctcacttcatgacatagtaggaaacttagtgtcctgtgtgcattcatccgtgagtccagaaagggctggggacacggaaacccttaaagacatcacagcacaagactctgctgacattattttccttattgatggatcaaacaacaccggaagtgtcaatttcgcagtcattctcgacttccttgtaaatctccttgagaaactcccaattggaactcagcagatccgagtgggggtggtccagtttagcgatgagcccagaaccatgttctccttggacacctactccaccaaggcccaggttctgggtgcagtgaaagccctcgggtttgctggtggggagttggccaatatcggcctcgcccttgatttcgtggtggagaaccacttcacccgggcagggggcagccgcgtggaggaaggggttccccaggtgctggtcctcataagtgccgggccttctagtgacgagattcgctacggggtggtagcactgaagcaggctagcgtgttctcattcggccttggagcccaggccgcctccagggcagagcttcagcacatagctaccgatgacaacttggtgtttactgtcccggaattccgtagctttggggacctccaggagaaattactgccgtacattgttggcgtggcccaaaggcacattgtcttgaaaccgccaaccattgtcacacaagtcattgaagtcaacaagagagacatagtcttcctggtggatggctcatctgcactgggactggccaacttcaatgccatccgagacttcattgctaaagtcatccagaggctggaaatcggacaggatcttatccaggtggcagtggcccagtatgcagacactgtgaggcctgaattttatttcaatacccatccaacaaaaagggaagtcataaccgctgtgcggaaaatgaagcccctggacggctcggccctgtacacgggctctgctctagactttgttcgtaacaacctattcacgagttcagccggctaccgggctgccgaggggattcctaagcttttggtgctgatcacaggtggtaagtccctagatgaaatcagccagcctgcccaggagctgaagagaagcagcataatggcctttgccattgggaacaagggtgccgatcaggctgagctggaagagatcgctttcgactcctccctggtgttcatcccagctgagttccgagccgccccattgcaaggcatgctgcctggcttgctggcacctctcaggaccctctctggaacccctgaagagagcaagcgagacattctgttcctctttgacggctcagccaatcttgtgggccagttccctgttgtccgtgactttctctacaagattatcgatgagctcaatgtgaagccagaggggacccgaattgcggtggctcagtacagcgatgatgtcaaggtggagtcccgttttgatgagcaccagagtaagcctgagatcctgaatcttgtgaagagaatgaagatcaagacgggcaaagccctcaacctgggctacgcgctggactatgcacagaggtacatttttgtgaagtctgctggcagccggatcgaggatggagtgcttcagttcctggtgctgctggtcgcaggaaggtcatctgaccgtgtggatgggccagcaagtaacctgaagcagagtggggttgtgcctttcatcttccaagccaagaacgcagaccctgctgagttagagcagatcgtgctgtctccagcgtttatcctggctgcagagtcgcttcccaagattggagatcttcatccacagatagtgaatctcttaaaatcagtgcacaacggagcaccagcaccagtttcaggtgaaaaggacgtggtgtttctgcttgatggctctgagggcgtcaggagcggcttccctctgttgaaagagtttgtccagagagtggtggaaagcctggatgtgggccaggaccgggtccgcgtggccgtggtgcagtacagcgaccggaccaggcccgagttctacctgaattcatacatgaacaagcaggacgtcgtcaacgctgtccgccagctgaccctgctgggagggccgacccccaacaccggggccgccctggagtttgtcctgaggaacatcctggtcagctctgcgggaagcaggataacagaaggtgtgccccagctgctgatcgtcctcacggccgacaggtctggggatgatgtgcggaacccctccgtggtcgtgaagaggggtggggctgtgcccattggcattggcatcgggaacgctgacatcacagagatgcagaccatctccttcatcccggactttgccgtggccattcccacctttcgccagctggggaccgtccaacaggtcatctctgagagggtgacccagctcacccgcgaggagctgagcaggctgcagccggtgttgcagcctctaccgagcccaggtgttggtggcaagagggacgtggtctttctcatcgatgggtcccaaagtgccgggcctgagttccagtacgttcgcaccctcatagagaggctggttgactacctggacgtgggctttgacaccacccgggtggctgtcatccagttcagcgatgaccccaaggtggagttcctgctgaacgcccattccagcaaggatgaagtgcagaacgcggtgcagcggctgaggcccaagggagggcggcagatcaacgtgggcaatgccctggagtacgtgtccaggaacatcttcaagaggcccctggggagccgcattgaagagggcgtcccgcagttcctggtcctcatctcgtctggaaagtctgacgatgaggtggacgacccggcggtggagctcaagcagtttggcgtggcccctttcacgatcgccaggaacgcagaccaggaggagctggtgaagatctcgctgagccccgaatatgtgttctcggtgagcaccttccgggagctgcccagcctggagcagaaactgctgacgcccatcacgaccctgacctcagagcagatccagaagctcttagccagcactcgctatccacctccagcagttgagagtgatgctgcagacattgtctttctgatcgacagctctgagggagttaggccagatggctttgcacatattcgagattttgttagcaggattgttcgaagactcaacatcggccccagtaaagtgagagttggggtcgtgcagttcagcaatgatgtcttcccagaattctatctgaaaacctacagatcccaggccccggtgctggacgccatacggcgcctgaggctcagaggggggtccccactgaacactggcaaggctctcgaatttgtggcaagaaacctctttgttaagtctgcggggagtcgcatagaagacggggtgccccaacacctggtcctggtcctgggtggaaaatcccaggacgatgtgtccaggttcgcccaggtgatccgttcctcgggcattgtgagtttaggggtaggagaccggaacatcgacagaacagagctgcagaccatcaccaatgaccccagactggtcttcacagtgcgagagttcagagagcttcccaacatagaagaaagaatcatgaactcgtttggaccctccgcagccactcctgcacctccaggggtggacacccctcctccttcacggccagagaagaagaaagcagacattgtgttcctgttggatggttccatcaacttcaggagggacagtttccaggaagtgcttcgttttgtgtctgaaatagtggacacagtttatgaagatggcgactccatccaagtggggcttgtccagtacaactctgaccccactgacgaattcttcctgaaggacttctctaccaagaggcagattattgacgccatcaacaaagtggtctacaaagggggaagacacgccaacactaaggtgggccttgagcacctgcgggtaaaccactttgtgcctgaggcaggcagccgcctggaccagcgggtccctcagattgcctttgtgatcacgggaggaaagtcggtggaagatgcacaggatgtgagcctggccctcacccagaggggggtcaaagtgtttgctgttggagtgaggaatatcgactcggaggaggttggaaagatagcgtccaacagcgccacagcgttccgcgtgggcaacgtccaggagctgtccgaactgagcgagcaagttttggaaactttgcatgatgcgatgcatgaaaccctttgccctggtgtaactgatgctgccaaagcttgtaatctggatgtgattctggggtttgatggttctagagaccagaatgtttttgtggcccagaagggcttcgagtccaaggtggacgccatcttgaacagaatcagccagatgcacagggtcagctgcagcggtggccgctcgcccaccgtgcgtgtgtcagtggtggccaacacgccctcgggcccggtggaggcctttgactttgacgagtaccagccagagatgctcgagaagttccggaacatgcgcagccagcacccctacgtcctcacggaggacaccctgaaggtctacctgaacaagttcagacagtcctcgccggacagcgtgaaggtggtcattcattttactgatggagcagacggagatctggctgatttacacagagcatctgagaacctccgccaagaaggagtccgtgccttgatcctggtgggccttgaacgagtggtcaacttggagcggctaatgcatctggagtttgggcgagggtttatgtatgacaggcccctgaggcttaacttgctggacttggattatgaactagcggagcagcttgacaacattgccgagaaagcttgctgtggggttccctgcaagtgctctgggcagaggggagaccgcgggcccatcggcagcatcgggccaaagggtattcctggagaagacggctaccgaggctatcctggtgatgagggtggacccggtgagcgtggtccgcctggtgtgaacggcactcaaggtttccagggctgcccgggccagagaggagtaaagggctctcggggattcccaggagagaagggcgaagtaggagaaattggactggatggtctggatggtgaagatggagacaaaggattgcctggttcttctggagagaaagggaatcctggaagaaggggtgataaaggacctcgaggagagaaaggagaaagaggagatgttgggattcgaggggacccgggtaacccaggacaagacagccaggagagaggacccaaaggagaaaccggtgacctcggccccatgggtgtcccagggagagatggagtacctggaggacctggagaaactgggaagaatggtggctttggccgaaggggaccccccggagctaagggcaacaagggcggtcctggccagccgggctttgagggagagcaggggaccagaggtgcacagggcccagctggtcctgctggtcctccagggctgataggagaacaaggcatttctggacctcggggaagcggaggtgccgctggtgctcctggagaacgaggcagaaccggtccactgggaagaaagggtgagcccggagagccaggaccaaaaggaggaatcgggaaccggggccctcgtggggagacgggagatgacgggagagacggagttggcagtgaaggacgcagaggcaaaaaaggagaaagaggattccctggatacccaggaccaaagggtaacccaggtgaacctgggctaaatggaacaacaggacccaaaggcatcagaggccgaaggggaaattcgggacctccagggatagttggacagaagggagaccctggctacccaggaccagctggtcccaagggcaacaggggcgactccatcgatcaatgtgccctcatccaaagcatcaaagataaatgcccttgctgttacgggcccctggagtgccccgtcttcccaacagaactagcctttgctttagacacctctgagggagtcaaccaagacactttcggccggatgcgagatgtggtcttgagtattgtgaatgacctgaccattgctgagagcaactgcccacggggggcccgggtggctgtggtcacctacaacaacgaggtgaccacggagatccggtttgctgactccaagaggaagtcggtcctcctggacaagattaagaaccttcaggtggctctgacatccaaacagcagagtctggagactgccatgtcgtttgtggccaggaacacatttaagcgtgtgaggaacggattcctaatgaggaaagtggctgttttcttcagcaacacacccacaagagcatccccacagctcagagaggctgtgctcaagctctcagatgcggggatcacccccttgttccttacaaggcaggaagaccggcagctcatcaacgctttgcagatcaataacacagcagtggggcatgcgcttgtcctgcctgcagggagagacctcacagacttcctggagaatgtcctcacgtgtcatgtttgcttggacatctgcaacatcgacccatcctgtggatttggcagttggaggccttccttcagggacaggagagcggcagggagcgatgtggacatcgacatggctttcatcttagacagcgctgagaccaccaccctgttccagttcaatgagatgaagaagtacatagcgtacctggtcagacaactggacatgagcccagatcccaaggcctcccagcacttcgccagagtggcagttgtgcagcacgcgccctctgagtccgtggacaatgccagcatgccacctgtgaaggtggaattctccctgactgactatggctccaaggagaagctggtggacttcctcagcaggggaatgacacagttgcagggaaccagggccttaggcagtgccattgaatacaccatagagaatgtctttgaaagtgccccaaacccacgggacctgaaaattgtggtcctgatgctgacgggcgaggtgccggagcagcagctggaggaggcccagagagtcatcctgcaggccaaatgcaagggctacttcttcgtggtcctgggcattggcaggaaggtgaacatcaaggaggtatacaccttcgccagtgagccaaacgacgtcttcttcaaattagtggacaagtccaccgagctcaacgaggagcctttgatgcgcttcgggaggctgttgccatccttcgtcagcagtgaaaatgctttttacttgtccccagatatcaggaaacagtgtgattggttccaaggggaccaacccacaaagaaccttgtgaagtttggtcacaaacaagtaaatgttccgaataacgttacttcaagtcctacatccaacccagtgacgacaacgaagccggtgactacgacgaagccggtgaccaccacaacaaagcctgtaaccaccacaacaaagcctgtgactattataaatcagccatctgtgaagccagccgctgcaaagccggcccctgcgaaacctgtggctgccaagcctgtggccacaaagatggccactgttagacccccagtggcggtgaagccagcaacggcagcgaagcctgtagcagcaaagccagcagctgtaagaccccccgctgctgctgctgcaaaaccagtggcgaccaagcctgaggtccctaggccacaggcagccaaaccagctgccaccaagccagccaccactaagcccatggttaagatgtcccgtgaagtccaggtgtttgagataacagagaacagcgccaaactccactgggagagggctgagccccccggtccttatttttatgacctcaccgtcacctcagcccatgatcagtccctggttctgaagcagaacctcacggtcacggaccgcgtcattggaggcctgctcgctgggcagacataccatgtggctgtggtctgctacctgaggtctcaggtcagagccacctaccacggaagtttcagtacaaagaaatctcagcccccacctccacagccagcaaggtcagcttctagttcaaccatcaatctaatggtgagcacagaaccattggctctcactgaaacagatatatgcaagttgccgaaagacgaaggaacttgcagggatttcatattaaaatggtactatgatccaaacaccaaaagctgtgcaagattctggtatggaggttgtggtggaaacgaaaacaaatttggatcacagaaagaatgtgaaaaggtttgcgctcctgtgctcgccaaacccggagtcatcagtgtgatgggaacctaa

SEQ ID NO: 266943 - DNA, 8934 bp, Artificial Sequence
  derived and/or modified sequence
atgcggaagcaccggcacctgcccctggtggccgtgttctgcctgtttctgtctgggttccctacgacacacgctcagcaacagcaggccgacgtgaaaaacggggccgctgccgatattatcttcctcgtggattcgagttggacaatcggggaagaacacttccagttggtgcgcgagtttctgtatgacgtagtcaagtctctggctgtgggcgagaacgacttccacttcgcactggtccagtttaacggaaatccccacacagaatttctcctgaatacctatagaactaaacaggaggtactgtcacacatctcaaacatgtcttatatcgggggtaccaatcagacagggaagggcttggagtacattatgcagagtcacctgacaaaggccgccggatcaagggcaggggacggagtgccccaggtaatcgtggtactcacagacggccatagtaaagacggcctggctcttccatccgctgagctgaagtccgccgacgtcaacgttttcgcgataggggtggaagacgccgacgagggcgccctaaaggaaattgccagcgaacccttaaatatgcacatgtttaacttagaaaacttcacgtcacttcatgacatcgtggggaatttagtatcatgcgtgcactccagcgtaagccccgaacgggccggagatacagaaactcttaaggatataaccgcccaggacagcgcagatataatttttcttattgacggatcaaacaatactggtagtgtgaacttcgccgttattctggactttctcgtgaaccttttggaaaaattgcctatcggtacccagcagataagggttggggtggttcagtttagtgacgaaccaaggactatgttctctctggacacttattccaccaaggcgcaggtccttggcgccgtaaaggcgctcggttttgctggaggggagctggctaacatcggactggctcttgacttcgtagtggagaatcacttcaccagggcaggcgggtccagggtggaggaaggagtgccccaggttcttgtgctgatcagtgcagggccttcctctgatgagataagatacggagtggtcgctcttaaacaggcctcggtgttttccttcggattaggggcccaggctgccagtagagccgagctccagcacatcgctaccgatgacaatttggtatttactgtgcccgaatttcgtagttttggggaccttcaggaaaaacttctgccctacattgtgggtgtggcacaaagacacatcgtcctgaagccgcccacgatcgtgacccaagttatcgaggtgaacaagcgggacattgtcttcctcgtcgatggctcatctgccttggggctagctaattttaatgccattagggatttcatcgcgaaagttatacagcgcctcgaaattggacaagatctaatccaggtcgctgtcgcccagtacgccgatactgtaagacccgagttctactttaacacacaccccaccaagcgcgaagtgataactgccgttcgtaaaatgaagcctcttgacgggagcgccttatacactggcagcgccctggattttgtccgcaacaacttatttacgtccagcgctgggtatcgagcggccgaggggatacctaaactcctggttctcattacgggcggtaagtctctagatgagatttcccaacctgctcaggagcttaaacgatccagtattatggccttcgccattggaaataagggggctgaccaggccgagctcgaggagattgcattcgatagctctctggtgtttatcccagctgagtttagagccgccccactccaaggaatgctgccaggcctgttggctccgctgcgcaccctgtctggcacgccagaagagagcaaacgcgacatcctgtttctgttcgatgggagtgccaacctggtcggacagtttcctgtggtaagggattttctgtataagatcatcgacgagctcaacgtcaagcccgagggcacaagaatcgccgttgctcagtacagcgatgatgtgaaggtagagtcacgtttcgatgagcaccagagcaaaccagagatcttgaacctagtcaaacgaatgaaaattaagaccggcaaggctttgaatttaggatatgctctggactacgctcagagatacatcttcgtcaagtctgccggtagtcgcatcgaggatggggtgcttcaatttttggtgctgttggtggccggccgtagctctgatcgggtggatgggccagccagcaacttgaagcagagtggggtggtgccttttattttccaggccaagaacgcggaccccgctgaactggaacaaattgtgctgtcacccgcttttatcttggccgcggaaagccttcctaagatcggcgacctgcaccctcaaattgtgaatctcttgaagagtgttcataatggggccccagcaccggtcagcggcgaaaaagacgttgttttcctgctggatggatcagagggcgttaggagcggatttccactcctcaaggagtttgtacagcgagtggttgaaagcctcgacgtcggccaggatcgggtccgggtcgccgtcgtgcagtactcggaccgcacccggcctgagttctacctcaattcgtatatgaataagcaggacgttgtgaacgcagtcagacaactgacacttctcggggggccaacgcctaacacaggcgccgccctcgaatttgtccttaggaacatcctggtgagctccgctggcagccgtatcaccgagggggtgccacagctgctgattgtgctgacggccgatcgatcaggggacgatgtccgcaatccttccgttgtggtgaaaagagggggagcagtacctatcggaatcgggatcggaaatgcagacatcacggagatgcagacaatctctttcataccagattttgccgtggcgatacccacatttaggcagctgggcactgtacagcaggtgatctctgagagggttacacagctcacccgtgaagaactgagtcgcttgcagccggtgctgcagcccttaccatcaccgggtgtaggggggaagcgggacgtggtttttctgatcgatggaagtcagagcgctggaccggaatttcagtacgttcgcacactcatcgagagactggtggactaccttgatgtgggcttcgacactactagagtggcggttattcagtttagtgacgatcctaaagtagagttcctgctgaatgcccactcaagtaaagatgaggtgcagaacgccgtccagcgactgcgccctaagggtggacgccagatcaatgtgggaaatgcccttgagtatgtttctcgcaacatctttaagagacctctcgggtcaaggattgaagagggcgtgccacagttcttggtgctgataagttctggcaagagtgatgacgaggtggacgatcctgccgtcgaactgaaacaattcggcgtagcacctttcacaattgcaaggaacgccgatcaggaagaactggttaagatatccctgagcccagaatacgtgttttccgtgtccacatttagagagttaccatccttagagcagaagcttctaaccccaatcacgacactcacaagcgagcagatacagaagctgttagcgtcaacgaggtatccccctcccgccgtggaaagcgatgcagccgacatagtttttctcatcgattcgagtgaaggcgttcggcctgacggttttgcccatatccgggattttgtatctaggatcgtacgcaggctcaatattggccctagcaaggtgagagtaggcgtggtgcagttttcaaatgacgttttccctgagttctatctgaagacataccgctcccaggcaccagtgctggatgcaatacgtcggttgcgactccgtggagggtctcccctgaataccgggaaagctctagaatttgttgcaagaaacctatttgtaaaatccgccggatccagaattgaggacggggtgccacaacatttagtgctggtgttaggcggtaagtcgcaagacgacgtgagcagatttgcccaagtcatccgaagctcagggatcgtgtccctgggggtcggcgaccgaaatattgacaggacagagcttcagactataacaaatgaccctcggctcgtgtttaccgtgcgagagtttcgggagctgccaaacattgaagagcgtattatgaattcattcgggcccagcgcagccacgcctgcacccccgggtgtggacactccccctccatccaggccagaaaagaaaaaggccgacatcgtgttcttactcgatggctctattaattttcggcgagactcctttcaagaagttttgcgatttgtctctgagattgtcgatactgtgtacgaggatggagacagcattcaggtcgggctggttcagtacaacagcgatcccaccgacgaattttttctgaaagatttttccacaaagcgacagatcatcgacgctattaacaaagtggtgtacaaaggtgggcgacacgctaatacaaaggtgggcctcgaacacttaagggtgaatcactttgtcccagaagcgggttctcgactggaccagcgcgtgccgcaaatcgcctttgtgatcacgggcggaaagagcgttgaggacgcccaggacgtgtccctggctctcacgcagcggggcgtaaaagtctttgccgtcggggtaagaaacattgacagtgaggaggtaggaaagatagccagtaattccgcaactgcgtttcgagttgggaatgtgcaagagctgagtgaactgtctgagcaggttctcgaaacactgcacgacgcgatgcatgagacactgtgtccaggggtaactgacgcggcgaaagcctgcaacttggatgtgatactgggattcgacgggtcccgggaccaaaatgtgtttgtggctcagaagggctttgagagcaaggttgacgctattctcaaccgcattagccagatgcatagagtgagctgttctgggggccgcagccctactgtgagagtatcagtggtggctaacactccttctggacccgtggaggcattcgatttcgatgaataccagccagagatgctcgaaaagttccgcaacatgaggtcgcaacacccatacgtgttgactgaagacaccctcaaagtgtacctgaataagtttagacagtcctcgccagattcagtaaaagtagtgattcatttcaccgacggggcagatggggatttagcggatctgcacagagcctcagaaaacctgcgtcaggagggcgttcgcgccctgatcctcgtaggccttgagcgcgtggtgaatctggagaggctaatgcacttggagtttggccgcggtttcatgtatgatcgccctcttcggcttaacctcctggaccttgattacgagctggctgagcagctcgacaacattgctgagaaagcttgttgtggggttccatgcaaatgcagcggacagcgtggcgacaggggacctataggctcgatcggtccaaaagggatccctggcgaggacggctaccgggggtatcctggggatgagggcgggcctggcgagcggggacccccaggggtgaacggtactcagggatttcaaggatgcccaggccaaaggggggttaaaggatccagaggttttccaggggagaaaggcgaggtaggagaaataggcctggatggtctggatggcgaagacggcgacaagggtctgccgggatcctctggcgagaaagggaaccctggacgtcgaggggataaaggacctaggggagaaaagggtgaacggggtgatgtgggcataagaggtgacccaggtaaccccggacaggacagtcaagaaagagggccaaagggtgagaccggtgatctcggaccaatgggcgtgccaggaagagacggggtcccgggcggccccggcgagacaggcaagaatggcggtttcggccgacgaggtccacccggagcgaaaggcaataaaggcggtcccggccagcctggatttgagggtgaacagggtacccgaggagctcaagggccagctgggccggccggtccccctgggcttatcggagagcaagggattagcggcccaaggggatccggaggagcagcaggagcccccggcgaacgcggaaggactgggcccttggggcggaagggcgagcccggcgagcccggccccaagggaggaatcggaaatcgaggccctcgcggggagaccggagacgacggaagagatggggttggctctgagggcaggcggggcaaaaagggtgaacgagggtttccagggtaccccgggcccaaagggaacccgggcgaacctggtctgaacggcaccaccggcccaaaggggattcgggggagaagggggaattccggaccacctggaattgtcggacaaaagggggacccaggttaccctgggcccgctggacccaagggcaacagaggagactccatcgaccagtgcgccctcatccaatccatcaaggataagtgtccttgttgttacggacccctggaatgtcccgtctttcccaccgaattggcatttgccctggataccagtgaaggagttaatcaagacacattcggacgcatgcgagatgtcgtcctttcaatcgtgaacgatcttaccattgcagagtccaattgtcctcgcggagcccgggtggccgtcgtgacctacaataacgaggtgacaaccgagattagattcgcggattcaaagagaaagagcgtcttgctggataaaataaaaaatctgcaggtcgccctgacctcgaagcagcagtcccttgagacagctatgtcatttgtggctcgcaacactttcaaaagggttaggaacggattccttatgcgcaaggttgccgtcttcttctcaaacaccccaaccagagcatccccccagttaagagaggctgtgcttaaattgtcagatgctggcattacgccactcttcttgacacgccaggaagatcggcagctcataaacgccctacagatcaacaatactgccgtgggacacgccttagtgttgcctgcgggccgagatctgactgattttctcgaaaacgtgctgacgtgtcacgtgtgtctggacatatgtaacatagatccaagctgcggatttggtagctggaggccctcttttcgggaccgcagggcggctggcagtgatgtagatatcgacatggcgtttattctcgacagcgcagagaccaccaccctatttcagttcaacgagatgaaaaagtatattgcctacctggttcgccaactggacatgagccccgaccctaaggcatcgcagcatttcgcccgggtcgccgtcgttcagcacgctccctcagaatctgttgataacgcttccatgccccctgtcaaggtggagttttccctcactgactacgggtcaaaggaaaagttagttgattttctaagtcgagggatgacccagctccagggaactagggctctaggttcggctattgaatacaccattgagaacgtgtttgagagcgcaccaaatccccgagatctgaaaatcgtcgtgttgatgctgacgggggaggtgcccgaacagcagctggaggaggcccagagggtcattctgcaggcaaaatgcaaaggctactttttcgtggtgctgggaatcgggagaaaagtgaatataaaagaggtatataccttcgctagtgaaccaaatgacgtgttttttaagttggttgacaagagcaccgaactgaatgaggagccgctgatgcgattcggaaggctgttaccatcatttgttagctctgagaacgccttttatctcagcccagatattcgcaagcaatgcgattggtttcagggcgatcagccgacaaagaacctggtaaagttcgggcacaaacaggtgaacgttcccaacaatgtgaccagcagccccacctcgaacccggttactacaaccaagcccgttaccaccacaaaacccgttaccaccactacaaaacctgtgaccaccactactaagcctgtgaccatcatcaaccagccttctgtcaagcctgctgccgccaaaccagcacctgccaaacccgttgctgccaagccggtggctactaagatggctactgtgaggccccccgtcgctgtgaagccagccacagccgccaaacctgtagctgccaagcccgcggccgtgcggcctcctgccgctgccgccgctaagcctgtcgcaactaaacctgaagtgcctcggccacaggccgccaagcctgcggcaactaagccagcaacgaccaaacccatggttaagatgtctcgagaagtgcaggtcttcgaaatcactgagaattctgcaaaattacactgggaacgcgctgaaccacctggcccctacttttatgacctgactgttacatccgctcacgaccagagcttagtcctgaaacaaaacctgactgtgacagaccgcgttattggcggtcttctggccggccagacatatcatgtcgcagtcgtgtgttacctcaggtctcaggtgcgggctacttaccacggttccttttcaaccaaaaaaagccagcctccacctccccagcctgcccgttccgcctcgtcctcaaccatcaacctcatggtttccactgaaccactggctctcaccgagacagatatctgtaagctacccaaagatgagggaacgtgtagggactttatcctgaagtggtactacgaccccaacacaaaatcgtgtgcccgattctggtatgggggctgtggagggaacgagaacaagttcggcagccagaaagagtgcgaaaaagtgtgcgcccctgtgctcgcaaagccaggggtcatctcagttatggggacctag

SEQ ID NO: 266944 - DNA, 8934 bp, Artificial Sequence
  derived and/or modified sequence
atgcggaaacatcgccacctccccctggtggcagtgttctgtctgttcctgagcggcttcccaacgacacacgcgcagcagcagcaggctgatgtcaagaatggagctgctgccgacataatttttctggttgatagctcctggactattggggaggaacacttccaattagtcagggaatttctgtacgatgttgttaagtctttggccgttggtgaaaatgatttccatttcgcgcttgttcagttcaacggcaatccccataccgaatttcttctcaatacgtaccgcacaaaacaagaggtactttcccatatcagcaacatgtcgtatatcggcggtacgaatcagacggggaagggactggaatatatcatgcaaagccatctcaccaaagctgcgggaagtcgagccggagacggcgtgccccaagtgattgttgtccttactgatggacatagcaaagacggactggctctcccatcagccgaattgaagtccgcggacgtaaacgtgtttgccatcggagtggaagatgctgacgagggcgctctaaaggagatagcctctgagcctctgaatatgcacatgttcaacttagagaatttcacatctcttcatgatatcgtcggcaacctggtcagctgtgtccacagcagcgtgagccccgaaagagcaggcgatactgaaactcttaaggacattaccgcccaagatagcgccgatatcatctttcttattgacggatctaacaacacgggaagcgtgaattttgctgtcatccttgacttcctcgtcaatcttctggagaaattacctattggcacacagcaaatcagagtgggcgtggtgcagttctccgacgagcctcgcacaatgttctcactggatacctacagcaccaaggcacaggtgttgggtgctgttaaagccctgggttttgcaggtggggagctggccaatataggcttagccctggacttcgtcgttgaaaatcactttaccagggccggtggcagccgcgtggaggagggcgtgccgcaggtcctggtgctcatatccgctggcccatcttctgacgagatcaggtacggtgttgtggcgctgaagcaggctagcgtgttctcttttggactcggagcgcaggccgcttctagagccgaactgcagcacattgcgaccgatgacaacctcgtgttcacagtcccggagtttaggtcgtttggagatctgcaggagaagctgctgccgtatatcgtgggcgttgcccagagacatatcgtgctgaaaccccctacgatcgtgacgcaggtgatcgaagtgaacaagagggatatcgtgtttctggtagacggctctagtgccttgggattagctaacttcaacgcaatcagagactttatcgccaaggtgatacaacggctcgaaattggacaggacctcattcaagtcgctgtggcccaatacgcggacaccgtcaggcccgaattttatttcaatacacaccctaccaagcgcgaagtgatcacagctgtccgcaagatgaaacctctcgatggctcagcattatatactgggagcgcactcgacttcgtaagaaacaacctgttcacctcaagtgcaggctaccgagcagccgaaggtatacccaagctgctagtcctcataaccggaggcaagtccctagatgagatctcgcagcctgctcaagaactgaaacgatctagtatcatggcattcgcaatcggcaataagggcgcagatcaggcagagttggaagaaattgctttcgacagctctcttgtgtttatacctgctgagtttcgagcagcccctctacagggaatgctccccggattgcttgctcctctgcgcacgctgagtgggacaccagaagagagcaagagagacattctgttcctgttcgatggctcagccaatttagtaggccaatttccagttgttcgagacttcctttataaaatcattgatgaactcaatgtgaaacccgagggcacacgaattgctgtagcgcagtacagcgacgatgttaaagtggagagtcgcttcgatgaacatcagagtaaacctgagatcctgaatcttgtgaagcggatgaaaataaaaacaggaaaagcgctgaatctgggatacgcgctcgactacgcgcaacggtacatatttgtcaagtctgcgggatctagaatcgaagacggcgttttgcagttcctggtcctcctggtggctggcagatcgagcgatagagtagacgggcctgcctctaacttaaaacaatccggcgtggtgccatttatcttccaagcgaagaatgccgaccctgccgaacttgaacagatcgtattgagcccagcgttcatcttagccgcagaaagcctgcccaagattggtgatcttcatccccagatagtgaacttactcaaatccgtacacaacggcgcaccagccccagttagtggtgagaaagacgttgtcttcctcctggatggctcagagggtgtccgctcgggattccctcttctaaaagaattcgttcaacgcgtggttgaaagcctggacgttggccaggacagggtgcgagtcgcagtagtccagtacagcgacaggacaaggcctgagttctatctcaatagctatatgaacaaacaggacgtcgttaatgctgtgcggcagctaacccttcttggagggccaactcccaatactggtgccgctctcgagttcgtcctgagaaacatcctagtaagctctgcaggaagtaggatcaccgagggtgttccgcaactcttaatcgtgctgactgccgacaggtccggagacgatgtgagaaaccctagcgtagtagtgaagcggggtggggcagtccccatcggtataggcataggaaacgccgacataactgaaatgcaaaccattagctttatcccggatttcgctgttgcaatccccacatttagacagctggggactgtgcaacaagtaatctctgaacgcgtcacccagctcaccagagaggaattgtcccggctgcagccggttctgcaaccactgccatctccaggcgtgggcggtaaacgagacgtagttttcttaattgacgggtcccagtctgctggaccagaattccagtacgtgaggactctgatagagcggttggtagactacttagacgtgggattcgacaccacgcgcgtggcggtgatccaattctcagatgaccctaaggtggaattcttactgaacgcccactctagcaaggatgaggttcagaacgctgttcagcgccttagacccaaaggaggcaggcagatcaatgttgggaatgccctcgaatatgtctcaaggaacatctttaagaggcccttgggatctaggatcgaagagggtgtcccccagtttctggtgctgatctctagcggcaagtctgatgacgaagttgatgatcccgctgtcgaactgaaacaatttggtgtcgctcctttcacaatcgcacgtaatgctgatcaggaagaactggtcaaaatctctctttcccctgagtatgtgttttctgtttcaacattccgcgagctgccaagcctggagcaaaagctacttacacccattactaccttgacatccgagcagatacagaaactgttggcatccactaggtaccccccaccagccgtcgagagtgatgccgctgacatagtgtttctcattgattcaagtgagggcgttaggccagatggatttgcacacattcgggactttgtcagcagaattgttcgcagactgaacatagggccaagcaaagtgcgcgtgggcgtcgtgcagttctcaaacgacgtattccctgagttttatctgaagacatatcggtcacaggctcctgtgttggacgccattaggcgcctccgactgcggggaggctctcccctgaatacgggaaaggcccttgaattcgtggctcggaacctatttgtgaaatctgctggaagccgcatcgaggacggagtgcctcaacacctagtgctggtgctcggaggcaagtcccaggacgatgtgtctcgattcgcccaggttatccggtcctcaggcatcgtgtccctaggggttggtgatcgaaatattgaccggaccgagctgcaaacgatcactaacgaccctcgcctggtgtttactgtcagagaatttcgggagctccctaatatcgaggagagaataatgaattcttttggccctagcgcggctacccccgcacctcccggagtggacactcccccaccaagtcgacctgaaaaaaagaaggccgacatcgtctttctgctcgacggaagcattaacttcagaagggacagctttcaggaggtgctgaggttcgtatctgagatcgtggacaccgtgtacgaagatggagatagtattcaggtgggactggtgcagtacaactctgatcccaccgacgaatttttcctgaaggacttttctacaaaacgacaaatcatagacgctatcaacaaagtagtctataaaggaggcaggcacgcgaacactaaggtcggcttagaacacctgcgcgtgaaccacttcgttcccgaggctggctcacgccttgaccagcgagtgcctcagattgctttcgttattaccggcggaaagtcggttgaagatgcccaggacgtttcactcgccttaacacagcggggagtaaaagtgttcgctgtgggtgtgcgcaatatagactctgaggaggttggcaaaattgccagtaatagcgccacagcttttcgagtggggaatgtgcaagaattaagcgagctgtcggagcaggtcctggagaccctgcatgacgctatgcatgaaaccctctgtcccggagttactgacgctgccaaagcctgcaatttagacgtcattctaggcttcgatggttccagagaccagaatgtgttcgtagcccagaaaggatttgaatctaaggtggatgctattttgaatcgcattagccagatgcatcgcgtttcttgctccggcggtcgctcccctacggtccgagtgagtgtggtcgccaacactccatcgggcccagttgaagctttcgacttcgatgagtaccagccggaaatgttggaaaagtttcgcaatatgagatcccaacacccctatgtgctcacagaggatactctgaaggtatacttaaacaaatttaggcaatcctctccagactctgttaaggtggtgatacactttactgacggtgccgatggtgaccttgccgacttgcaccgggcttcagagaatctacgccaggagggagtgcgtgcgcttatactagtggggctggaaagggtcgtgaacctggagaggcttatgcacttggaattcggccgaggatttatgtacgacagacctcttcggctgaacctgttggatctcgactatgagctggccgaacagctggataacatcgcggaaaaagcctgctgtggcgttccttgtaagtgttcaggtcagaggggtgataggggtcccatcggctctattggacctaaaggcattcctggcgaggatggatatcgcggatatccaggggatgagggcggacccggagaacgcggtcctccaggagtcaatgggacacagggattccagggctgcccgggtcaaaggggagtcaagggaagccggggatttcctggcgaaaaaggcgaggtcggcgagatcggactggatggtctggatggcgaggacggagataaaggattacccggatcaagtggggagaaaggcaaccctggcaggcggggtgacaaaggtccccgtggcgaaaaaggcgaacgaggcgatgtggggataaggggagaccctggtaatcccggacaggacagccaggagcgcggtcctaagggggagaccggagacctagggcctatgggtgtgcctggccgagatggtgtgcccggtggacccggtgaaaccgggaaaaatggaggcttcggtaggcggggacccccaggggctaagggaaataaaggcggacctggtcagcctgggttcgaaggagagcaggggacgaggggggcacagggacctgcagggcctgccggaccacccggactaattggggagcagggtatttccggacctagaggctccggcggagccgcaggagcgcctggagagaggggcaggaccggaccattgggcaggaagggcgagccaggagagccaggcccaaagggcggtattgggaataggggtcccaggggggaaacaggagatgatggccgtgatggggtgggttccgaaggaagacgaggcaagaagggagaaagggggttccccggatacccaggacctaagggtaacccaggcgaaccaggactgaacggcaccaccgggcctaaagggattcgcggaagacgtgggaacagcgggccaccaggaatagtagggcagaagggggatcccggatacccgggtcctgcaggcccaaaaggcaataggggggactccatcgaccagtgcgccttgatccagtccatcaaagataagtgcccatgctgctatggtccgctcgagtgccctgttttccctaccgagctcgcattcgctctcgatacctcagagggagtgaaccaggataccttcggcaggatgcgtgacgtggtgctgtccatagtgaacgatctcacaattgctgaatcgaactgccctcggggagccagagtggcagtggttacatataacaacgaagttaccactgagattagattcgccgatagtaaacggaagagcgtgctgttagacaaaatcaagaacttacaggtggccctcacaagcaagcagcagtcgctggaaacagcaatgtcctttgtcgctcggaatacattcaaacgcgtaagaaatggctttctgatgaggaaggttgcagtgttctttagcaatacgccgaccagggcctccccacagctgcgcgaggcagttctgaaattgtctgacgctggaattacacctctgttcctgacccggcaggaggacaggcagctgattaacgcgctgcagataaacaacaccgctgtaggacatgcattggtgctgccagctggacgggatttgacggacttcctggaaaacgtcctgacatgccacgtgtgcttagacatttgtaacatagatccttcctgcggctttggaagttggaggccgagcttccgcgataggagggcagctggatctgacgtagacattgatatggctttcattctggactccgctgagacaactacattgttccagttcaatgagatgaagaagtacattgcctatcttgtccggcaacttgacatgagccccgatccaaaagcgagccagcatttcgcacgggtggcagttgtccagcacgcaccctccgagagcgtcgataacgccagcatgcctcccgtgaaggtcgaattttccctgacagattacggctcaaaggaaaaattggttgacttcctgagtagagggatgacacaactgcaagggacccgagccttaggcagtgctatcgagtatactattgaaaatgtcttcgagtctgctccaaatccccgagacctcaaaattgtcgtactgatgctgaccggggaagtgccggaacagcaactggaggaggcacagagagtaatcctccaggccaagtgtaaagggtacttctttgtagtgttggggatagggcgaaaggtgaatatcaaggaggtctacaccttcgctagtgagcctaatgatgtattcttcaagctggtcgataaatccactgaattgaacgaagaaccacttatgagatttggacggttactcccctcgttcgtatcttccgaaaatgcattttacctgtcccctgacatccggaaacagtgtgactggttccagggagaccaaccaacgaaaaacttggttaaatttgggcacaaacaagtgaatgtcccaaataacgttacgtcctcaccaactagtaacccagtcaccaccactaagcctgtgaccaccaccaaaccagtaaccaccaccaccaagcccgtgacaaccactacaaaacccgtgaccatcatcaatcagccatctgtaaagcccgctgcagctaaaccagcccctgcaaagccagtcgccgctaaaccagttgctaccaaaatggctacagtgaggcctcccgtggcagtaaaacccgcaacagcggctaagccagtggcagctaagccagccgcagtccgccctcccgctgccgctgccgctaagccagtcgccacaaagcccgaggtcccaagacctcaggccgcaaaaccagccgctaccaagccggcaacaacaaaacctatggtcaagatgtcccgggaagtgcaggtttttgagatcacagagaattccgctaaactgcattgggagcgggctgagcctcccggtccttatttctacgaccttacggtgacgtctgctcacgaccagtccctggttctcaagcagaatctgacagtcacagatcgcgtgattggcggtcttctggccggacagacttatcacgtggcagtagtgtgctacctgcgctcacaggtgagagccacctaccatggatcattctcaacaaagaaatcacaacctccgcctccccagcccgctagaagcgcaagtagctccaccatcaacctgatggtctccaccgagcccctggctttgacagaaactgatatctgcaaactcccgaaggacgagggaacctgtcgagatttcattctgaaatggtattacgaccccaacacaaagagttgcgctaggttctggtacggaggttgtggtggtaacgagaacaagtttggatcacagaaggagtgtgagaaggtttgtgctcccgtactggctaagccaggggtgatatcagtgatgggaacgtac

SEQ ID NO: 266945 - DNA, 8934 bp, Artificial Sequence
  derived and/or modified sequence
atgaggaagcacaggcacctgccactggtcgcggtgttttgcctcttcctgtccgggttccccacgacacacgcgcagcagcagcaggctgacgttaagaacggcgctgccgcggacatcatcttcctcgtcgacagttcttggaccattggggaagagcattttcaattggtacgtgagttcctttacgacgtggttaagtcactggctgtgggagagaacgatttccacttcgctctcgtgcaattcaatgggaacccacataccgagttcctgctgaacacgtacaggacaaaacaggaggtcttatcccacataagcaatatgtcgtacattggtggcacaaatcagaccggtaaagggttggaatacatcatgcagtcccacctgaccaaagcggctggcagcagagctggggatggtgttccgcaggttatcgtggttctcactgacggccacagtaaggacggcctggctttgcccagtgcagaacttaaaagtgcagacgtaaacgtgttcgccatcggcgtggaagatgccgacgagggcgccctaaaggagatcgcgtctgaacccctcaacatgcacatgtttaatctcgagaattttacctcgctgcacgacatagtcgggaacctggtaagctgtgtgcactcaagtgtaagtcccgagcgggcaggcgacaccgagacgctgaaggacataacagcccaggacagtgcggatattattttcctgatcgacggttctaataatacaggtagtgtgaacttcgcagtgatcctcgacttcttggtcaaccttttagaaaagctgcccatcggtacccagcaaatacgcgtcggggtcgtgcagttttctgacgaacctagaaccatgtttagtctggatacctattctaccaaagctcaagtgctgggcgcagtgaaagctctggggtttgccggcggcgaactggcaaatatcggtctcgccctggacttcgtcgtcgagaatcatttcacccgcgcagggggaagtagggtcgaggaaggagtgccacaggtcctggtgctgattagcgcgggtccttcgagcgacgagataaggtatggcgtcgtggcgcttaagcaggcatcagtgttttcttttgggctgggcgcccaggcagccagtcgggctgagcttcagcacatcgcaactgacgacaacctagtttttacagtgcctgagttccgtagttttggagatctgcaggagaaacttcttccctatatagtgggtgtggcccaaagacatatcgtgctgaaaccccctacgatcgttacacaggtaatcgaggtgaataaaagagatatcgttttcctcgttgatggctcctcggctctggggctcgccaatttcaacgccatacgggattttattgcaaaagtgattcagagattagagatcggtcaggatctaatacaagtggctgttgcccagtacgcagatacagtgcgccctgaattctacttcaacacccatccaacaaaacgagaagttattaccgctgtgaggaaaatgaaaccgctggacggatcggccctctatacgggtagtgccctcgattttgtccgcaataacctattcacctcctcagcaggatatcgggcagcggaggggatccccaaacttttggtcctgatcactggcggcaagagtctggatgaaataagccagcctgcccaggagcttaaacgttcatctatcatggcctttgccatcggcaataaaggtgccgaccaagcagaactggaggaaatcgccttcgattccagtctcgttttcattccagccgaatttagggctgccccgctgcagggaatgctacctggactgctggccccattaaggactctgtcggggacccctgaagaaagtaagcgcgacattttgttcttatttgatgggtctgcgaacctggtgggccagttccccgtggttcgcgatttcctgtacaaaatcatcgatgagcttaatgtgaaacccgaagggacaaggatcgccgtcgcccaatactcagacgacgtcaaagtggaatcaaggtttgacgaacatcaatctaagccagagatcctcaatctggtaaaacgcatgaaaatcaaaaccggcaaggccctgaatttggggtacgcactcgactatgctcaacgttatattttcgtcaaatcagccggctccagaatcgaggatggcgtgctgcagttcctggtcttgctggtagccggacgttcttccgatcgggtagacgggcccgctagcaacctgaagcagagcggggtggtaccatttattttccaagctaagaatgccgaccctgcagagctggagcaaattgtactctctccagcctttattttagccgccgagtcattgccaaagatcggggacctgcacccccagattgtgaacctattaaagagcgtgcataatggcgcccctgccccagtttccggcgaaaaggacgttgtcttcctactagacgggtcagaaggggttcgcagtggattcccacttttgaaagaatttgtccagagggtggtcgagtcccttgatgtcggccaggaccgcgtgagagtcgccgttgtacagtatagcgacaggacccgccccgagttttatctcaactcttacatgaacaaacaggatgtagtgaatgccgtgcgccaactgacactacttggtggaccgacaccaaacaccggggcggcattggaattcgtcctcaggaatatccttgtcagttccgctggatctcgtatcacagagggagtgccccaactgcttatagtcttgacagcagatcggtcgggagacgatgtcaggaacccaagtgtggtcgtgaaacggggtggagcagtgcccatcggcattggaattgggaatgcagacatcaccgaaatgcaaaccatctcgtttattccggactttgctgtcgcaatccctacattcagacaactgggaaccgttcagcaggtgatcagcgagcgtgttacccaactgactagggaggaactctctagattgcagcccgtgctccaacccctgccctctccaggggtgggaggcaaaagagacgtggtctttttgattgacggcagccagtcggctggccctgagttccagtatgtaaggacgctgatcgaacggctggtcgattacctggacgttggcttcgatacaactcgtgtcgccgtaatccagtttagcgacgaccctaaggtggaattcctgctgaatgctcacagtagcaaggatgaggttcagaatgcggtgcagaggctgagacccaaaggcgggaggcaaatcaatgtgggcaatgccctcgaatacgtaagccgtaatatctttaagaggccgctgggatcgcggatagaagaaggcgtcccccagttcctggtgttgatctcatcaggcaaatcggacgatgaagtagatgacccagcagtcgaactgaagcagtttggcgttgcaccattcacgatagcaagaaatgccgatcaggaggaactggttaaaatttcccttagtccagagtacgtgttcagcgtctccaccttccgcgagctaccgtctcttgagcagaagctgctcacaccgatcacaacactcacctcagaacagattcaaaagttactcgctagcacacgataccctcctccggccgtggaatcggacgccgcagatattgtcttcctgatagacagttctgagggagtaagacccgacggctttgcacacatccgggatttcgtgagcagaatcgtgcggcggctcaacattggacctagtaaagttcgagtgggtgtggttcaattctccaacgacgttttccctgaattttacctgaagacttatcgttcacaggccccagtcttggatgcaatcaggcgactgaggcttcgcgggggtagtccactcaacacaggaaaggccctggagtttgtagccagaaacctcttcgtgaaaagcgcaggctcccgaattgaagacggtgtgccacagcatctcgtgctagtcttgggggggaagagccaagatgacgtttccaggttcgcccaggtaattcgctcttcaggtatcgtgtcactgggcgtgggagatcgaaacatcgatcggaccgaactccagaccataactaacgacccccggctggtgtttacagtgagagaattcagggagttgcccaatatcgaagaaagaatcatgaactcttttggaccctccgctgccactcccgctcctcctggcgtcgacacgccccccccatccagacccgaaaaaaagaaggccgatattgtatttctgctcgatggttcaattaacttccgccgcgattcctttcaagaagttctgcggttcgtcagcgaaatcgtcgacactgtgtatgaggatggcgacagtattcaagtaggcctggtgcagtacaattccgacccgaccgatgaattcttcctgaaagacttttccaccaaaagacagatcatcgacgcgatcaataaagtggtgtataaaggaggacggcacgcaaacaccaaggttggcctggaacacttgagggtgaaccatttcgtacccgaggccggatctcgactggaccagcgggtcccacaaatcgctttcgtaattacaggtggaaagtccgttgaagacgcccaagacgtttccctggccctgacacagagaggggtgaaagtcttcgctgttggcgtcagaaacatcgactcagaggaggtcgggaagattgcttccaacagtgctactgcatttcgagtagggaacgttcaggagctgagcgagctctccgaacaggtgctggagaccctgcacgatgccatgcacgagacattgtgtcctggagttactgatgccgcaaaggcctgcaacctggatgtcatactggggttcgatggcagccgcgatcagaatgtgttcgtggcgcaaaaagggtttgaatctaaagttgatgccattcttaataggatcagtcaaatgcacagggtttcctgcagcggcggcagatcccctactgttcgggttagtgtagtggccaacactccgtctggacctgttgaggccttcgactttgacgagtaccagccagagatgctcgaaaaatttagaaacatgcgcagccaacacccttatgtactgaccgaggatacactcaaggtttatctcaacaaattccgacagtcttctcccgattcagtcaaagtagtcattcattttaccgatggggccgacggagacctggctgacctccaccgggctagtgaaaaccttagacaggagggcgtgagagctctaatcttggtcggccttgagagggttgtgaatctggaacgccttatgcacctcgagttcggaaggggcttcatgtacgaccggcctcttcggctgaacctcttagacttggactacgagctcgccgaacagctggataacatcgccgaaaaggcttgctgtggagtgccctgcaaatgctcagggcagaggggagaccgaggtccaatcgggagtatcgggcccaagggcatccctggagaagatgggtatagaggctaccctggcgacgaagggggaccgggtgagaggggcccaccgggcgtcaatgggacacaggggtttcagggctgcccaggccagagaggggtcaagggaagcagaggctttccaggcgagaaaggcgaagtgggagagatcggattggacggactggacggtgaagatggagataaggggctgcctggaagtagcggcgagaaagggaaccccgggcgccggggcgacaaaggtccccgcggggaaaagggagaaaggggcgatgttggcattcgcggagatcccggtaacccaggccaggatagtcaggagcgtgggcccaagggagagaccggggaccttggtcccatgggcgtaccggggagggatggggtgccgggaggtcccggcgagacaggcaagaatggcggattcggccgccgtggaccgccaggggccaaaggtaacaaaggggggccaggccagcctggattcgagggggagcagggaacccgaggagctcagggaccagccggccccgccggacctcctggccttataggcgagcagggtatctcaggtcctcgcggctccgggggcgcagccggagctcctggagaaagaggccggacgggccctctcggacggaagggagagcccggggagcctggtcctaaagggggcatagggaaccggggaccccggggcgagaccggcgacgacggaagagacggggttggctccgagggacgaagaggtaagaaaggggagcgcggctttcccggctacccgggtcccaagggaaatcccggcgagcccggtcttaatggaactaccgggcccaagggcattaggggacgcagaggcaactcaggccctcccggtattgtgggccagaagggggatccgggatatcccggccccgccgggccaaagggaaacagaggcgattctatagaccagtgtgcactcattcagagtattaaggacaaatgcccttgctgctatgggccacttgagtgccccgtctttccaacagaactggcattcgcccttgacacatccgaaggggtcaatcaggacacgttcggtagaatgcgcgacgttgtgctgagcatcgtaaacgatctgactatcgcagaatctaactgtcctaggggggcccgcgtggcagttgtcacctacaacaatgaggttacaactgagatccgctttgccgatagcaagaggaagagtgtactgttagacaagattaagaatctgcaagtggccctgaccagtaaacaacagtccctcgagaccgccatgagtttcgtcgccaggaatacttttaaacgggtcaggaacggatttcttatgaggaaagtcgcagtatttttttcgaacactcccactcgggccagcccgcagttacgagaagctgtcttgaaattaagtgatgcaggtattacccccctcttcctcacccgccaggaagacagacagctgatcaacgctttacaaataaacaataccgcagttggacatgccttggttctacccgcggggagggaccttacagatttcctcgaaaatgttctaacgtgtcatgtgtgcttagacatctgcaatatagatccctcatgcggtttcggtagttggcgtcccagctttcgagatagaagggctgctgggagcgatgttgacatcgacatggccttcatactcgacagtgcagagactactacactgtttcagttcaacgaaatgaaaaagtatatcgcgtacctagtgcgacaactcgacatgtccccagatccgaaggcttcacagcattttgcacgagtcgccgtggtgcagcatgccccttccgaatccgttgacaatgcttcaatgccgccagtgaaggtggaattcagcctgacagactacggtagcaaggaaaagctcgtagactttctctctcggggtatgactcagctgcagggaactcgggctctggggtccgccatcgagtacactatcgagaacgtttttgagtctgcgccaaatcctcgtgacctgaagatagtggttctgatgctgacaggtgaggtccccgaacaacagctggaagaggcccagcgcgtgatcctccaagcgaagtgcaaggggtattttttcgtggtactcggcataggtagaaaagttaacattaaagaagtctacacctttgcttcggagcctaacgatgtgtttttcaaacttgttgataagtcaacagaactgaacgaagaacctcttatgcgttttgggagactcctgccgagctttgtgtccagcgaaaatgcgttttatttatcgcctgatatccggaagcagtgcgactggtttcagggggatcaaccaacgaagaatctggttaagttcggccataaacaggtgaacgtgcctaataatgtcacttctagccctacctccaacccggtgaccacgaccaaacctgttactactactaagcccgttacaaccacaactaagcctgtcaccaccaccaccaagccggtgacaataatcaaccagccctctgttaaacccgcagctgcgaagcccgcgcccgcaaagccggtcgctgccaaacctgtcgccacaaagatggccaccgtacgacccccagtggccgtcaaacctgccactgccgcaaagccagtggcagctaaaccagctgctgttcgccctcctgcggctgccgccgcaaaacccgtggctaccaaacctgaagtgccacgcccccaagccgctaagccagcagctaccaagcccgccaccactaagcctatggtgaagatgtcacgcgaagtgcaggtgtttgagataacagaaaatagtgctaagctgcactgggaaagagccgagcccccgggtccttatttctatgatctgaccgtcacgagcgcccatgaccagagcctggtcctcaagcagaatcttacagtgacagatagagtcatcggggggcttttggctggtcagacctaccatgtcgcagtcgtatgctatctgaggtcacaagtcagagctacatatcatgggtctttctcaacaaagaaaagccagcctccccccccccagcccgctaggagcgccagtagctcaacaatcaatctcatggtttccactgaacccttggccttgaccgagaccgatatctgcaaactgcctaaagacgaaggtacatgtcgggacttcattctgaaatggtactacgaccccaacactaagtcctgtgctcgcttctggtatggagggtgcgggggcaatgagaacaagttcggcagtcagaaggagtgcgaaaaggtgtgcgctcctgtgctagcaaagcctggagttatttccgttatgggcacatag

SEQ ID NO: 266946 - DNA, 8934 bp, Artificial Sequence
  derived and/or modified sequence
atgagaaagcaccggcatctgcccctagttgcagtgttttgcctgtttctttcaggattcccgacgacccacgctcagcagcaacaagcagacgtgaagaatggcgccgcagctgacattatcttcctggtggattcatcctggacaatcggagaggagcactttcaattagtcagagagtttttatatgacgttgttaaatctttagcagttggagaaaatgatttccacttcgcattagtacagttcaacggtaaccctcacacagaattcctcctcaacacctacaggaccaagcaggaagtcctttcccacatttccaacatgtcctacattggcggaacaaatcaaacgggaaagggactcgaatatattatgcagtcacatcttacaaaagcggcagggagcagggcaggcgacggagtgcctcaggtcattgtggtactgacagatggtcattctaaggacggactcgcgttaccctcagctgagctgaaatctgctgacgtcaatgttttcgcgatcggcgtggaggacgcagacgagggtgcactgaaggaaatcgcttccgaacctctgaacatgcacatgttcaacctcgaaaactttacttcacttcacgatatagtgggcaaccttgtatcctgcgtacacagtagcgtgagcccggaacgggccggagataccgaaaccctcaaagatattactgcacaagattcagcagacattatttttttaatcgatggatcaaataacacaggaagtgtgaattttgctgttatcttggattttctcgtaaacctcctggagaaactaccaatagggacacagcaaattcgtgtgggagttgttcaattttccgatgagccaagaacaatgttctccttggacacttacagcactaaagcccaagtgctaggcgctgtcaaggccctgggattcgcaggcggtgagctggccaacatcggtttagctttagactttgtggtcgagaatcactttacaagggccgggggttcaagagtggaggaaggcgtgccgcaggtgcttgttttgatcagcgcaggacctagcagcgatgagatcagatatggcgtcgttgccctgaagcaagccagtgtgtttagttttggattaggcgctcaagccgcttccagagcggaattgcagcatattgcaaccgacgacaacctggtctttaccgtgccggaatttcgttcttttggagatctgcaagaaaaactcctgccatatatcgtcggagttgcgcagagacatatcgtgcttaagccccctaccattgtgacgcaggtgattgaagtgaacaaacgggacattgttttccttgttgacgggagttctgctcttggcttagctaatttcaacgccataagagactttatcgccaaagtgatccaaagacttgaaattggacaggatctcattcaggttgccgtagcacagtatgcggataccgttaggcccgaattttacttcaacacgcatcccactaagcgagaggtaattaccgccgttagaaaaatgaagcccttggacgggagtgcactatacaccggatctgcactagatttcgttagaaataaccttttcacgtcatcggccggctacagagcagctgagggaattccaaaactcctcgtgctgattactgggggaaaatctttagacgagattagtcagcctgcccaggaactgaaacgcagttccattatggctttcgcaatcggtaacaaaggcgctgaccaggcagagctggaagaaattgcatttgactctagcttagtgtttataccagccgaattccgcgctgcccctctgcagggcatgctgcccggcctccttgctcctctgcgaactctatctggaacccctgaggagagcaagagggacatcttatttctgtttgatggttccgcaaacctcgtagggcaatttccagttgttcgggacttcctctataaaatcattgatgagctgaatgtcaagccagaaggtaccagaattgctgtcgcccagtatagcgacgatgtgaaggttgagtctagattcgacgagcatcagtccaaacccgaaatccttaaccttgtaaaacggatgaaaataaagaccggtaaagcactgaatctgggctatgctttagattatgcgcagagatacatctttgtgaaaagcgccggttcacgaattgaggatggggtcctccaattcctggtgctgctggtggccggaagatcctccgatcgcgttgacggacctgcaagcaacctgaagcaaagtggtgttgtacctttcatattccaggccaagaacgccgacccggctgagctcgaacagattgtattaagccccgccttcattttagcggctgaaagcttacctaagataggagaccttcatcctcagatcgtcaatctgctcaagagcgttcacaatggcgccccagccccagtatctggtgaaaaagatgtggttttcctgctggatggctcagagggcgtaagaagcggtttcccccttctgaaagaatttgttcagcgagtcgtagagtcactcgatgttggtcaggatcgcgtgcgagtagctgtagtacagtattctgatcggacaagaccagagttttatcttaacagttatatgaataagcaggacgtagtcaacgccgtgcgtcaattgacacttcttggcgggcctacaccgaacactggagctgcgttggaatttgtgctgcggaatattctagtcagctcagccggctcccgcattacagagggcgtcccacagcttctaatagtactaactgctgacagatctggagatgatgttaggaacccatctgttgtagtgaaaagaggtggtgcagtgcctatcggaataggaatcgggaacgctgatattacagagatgcagaccattagtttcatccctgatttcgctgtggccattcctaccttcagacagctcggaaccgtgcagcaggtcatttcagagagagtgacccaacttacgagagaggagttgagcagattgcagcccgtgttacagcctctaccaagcccgggagtagggggcaaaagagatgtggtcttccttatcgacggcagtcagtccgcaggtcctgagttccagtatgtgcgcacactgatagagagactggtggattatcttgacgtaggcttcgacactaccagagttgccgttatccagttttctgatgacccaaaggtcgaatttttgctgaacgcccattcgagcaaggatgaagtgcagaatgcagtgcagcggcttagaccaaaaggaggcaggcaaattaacgtaggcaacgctcttgaatatgtatctcgcaacatctttaagcgacctttagggtctcgcatcgaagaaggcgtcccacaattcttggtgctgatctctagtggaaagtcagacgatgaagtggatgaccctgcagtcgagctcaagcaatttggagtagcacctttcaccattgcaagaaacgccgatcaggaagagctggtcaagatcagcctttcacccgaatatgtcttttcagtgtccactttcagggaactgcccagcctggagcagaaattgctaacacccatcacaactctgaccagcgaacagattcaaaaactgttggcttccacccgctacccgccccccgccgttgagtcagatgcagcggatatcgtatttttgatcgactccagtgaaggcgttcggcccgacgggttcgcacatattagagacttcgtgtctcgcatagttagacgacttaatatcggtccgtcgaaagttagggtaggtgtcgtccagttctctaacgatgtattcccagaattttaccttaagacatatcgctcccaggcacctgtgttagatgctattcggcgattgagacttcgggggggatcaccattaaacactggaaaagcgctggagttcgtggctcgcaacctgtttgtgaagagcgctggatctcgaattgaggacggcgtgcctcaacatttagtgctggtgttggggggaaaatcacaggacgacgtgtccaggtttgctcaagttatccgatctagcggtattgtttctttgggcgtcggggacaggaatatagaccgaactgaactgcaaactattactaatgatcctaggctcgtctttaccgtgagagaattcagggagttgcccaatatcgaagaaagaatcatgaactcttttggaccctccgctgccactcccgctcctcctggcgtcgacacgccccccccatccagacccgaaaaaaagaaggccgatattgtatttctgctcgatggttcaattaacttccgccgcgattcctttcaagaagttctgcggttcgtcagcgaaatcgtcgacactgtgtatgaggatggcgacagtattcaagtaggcctggtgcagtacaattccgacccgaccgatgaattcttcctgaaagacttttccaccaaaagacagatcatcgacgcgatcaataaagtggtgtataaaggaggacggcacgcaaacaccaaggttggcctggaacacttgagggtgaaccatttcgtacccgaggccggatctcgactggaccagcgggtcccacaaatcgctttcgtaattacaggtggaaagtccgttgaagacgcccaagacgtttccctggccctgacacagagaggggtgaaagtcttcgctgttggcgtcagaaacatcgactcagaggaggtcgggaagattgcttccaacagtgctactgcatttcgagtagggaatgtgcaggagcttagcgaactttcagaacaagtgttagaaactctgcacgacgctatgcatgagacactctgcccaggcgtcaccgacgctgcgaaagcgtgcaacttagatgtgatcctcggatttgacggatcaagagatcagaacgtatttgtcgcacaaaaaggcttcgaatccaaggtggacgctatacttaatagaatctctcagatgcaccgagtaagctgctcaggcgggaggtctccaaccgtcagggtgtctgtcgtcgctaacaccccctctggtccggtggaggcgttcgactttgacgagtaccagccagagatgctcgaaaaatttagaaacatgcgcagccaacacccttatgtactgaccgaggatacactcaaggtttatctcaacaaattccgacagtcttctcccgattcagtcaaagtagtcattcattttaccgatggggccgacggagacctggctgacctccaccgggctagtgaaaaccttagacaggagggcgtgagagctctaatcttggtcggccttgagagggttgtgaatctggaacgccttatgcacctcgagttcggaaggggcttcatgtatgaccgaccattacgcttaaatcttttagatctggattacgaattagcggaacaattggataatattgctgagaaagcttgttgcggagtcccttgcaaatgttccggacagcgcggcgatcgaggccccattgggagtattggaccaaaaggaatccctggcgaagacggctaccgcggataccctggtgatgaaggcggtcccggggaacgtgggccccccggagtgaacggaacccaaggcttccaaggctgtcccgggcagcgcggtgtgaaggggtcccgaggatttccaggggagaagggagaagttggcgaaatcggattagacggattggacggcgaagacggcgataaaggcttacccggtagcagcggagaaaagggcaacccgggccgaaggggtgataaaggccctaggggtgaaaaaggagagaggggagatgtggggatacgcggagacccgggaaatcctggacaggactctcaagaaagaggtcctaagggggaaacaggcgatttaggtccaatgggggtgccaggacgcgacggagtgcccgggggtccgggagagacaggcaaaaatggcgggtttggccgacgaggacctccaggagccaaaggtaacaaaggcggccccggtcaaccgggatttgagggagaacaaggaacgcggggggcacaaggacctgcgggccccgccggccccccaggtcttattggcgaacagggcatctcgggacccaggggtagtggcggcgcagctggagctccaggtgagaggggaaggacgggaccactcggtcgaaaaggggaaccaggggagccgggcccaaaagggggaataggcaatagggggccgagaggagaaacgggcgatgacggccgggacggggtcggctccgagggaaggagaggcaagaagggcgagcggggatttccagggtacccaggaccaaaggggaatcccggagagcctggtctcaatggcacaacaggccccaaaggaatacgtgggaggagaggaaatagcggacccccaggaattgtagggcaaaaaggagatccaggataccctgggccggccggacccaaaggcaacaggggagacagcatcgatcaatgcgcacttattcagtccataaaggataaatgcccatgctgctatggccccctggaatgcccagtttttcccacggaactggcctttgctctcgatacaagtgaaggcgtgaatcaagacactttcggacggatgcgggacgtagtactatctatcgtaaatgacctgacaatagctgagtctaactgccctcgcggggctagggtagcagtcgtgacgtacaataacgaggtgaccaccgagattcgctttgctgacagcaagagaaaaagcgtcctcttagacaagatcaaaaaccttcaggtcgctcttacttcaaaacaacaaagcctcgagacggcaatgtcctttgtggcacggaacacattcaagcgcgtccgcaacgggtttctgatgagaaaggtagcggtattcttctctaacaccccgacgagagcctctcctcaacttcgggaagccgtgctcaaactaagtgatgccgggatcacccccttgttcctgacacgccaagaggacagacaattaataaatgccctgcagataaacaatacagctgtgggacacgcccttgtgctgcccgctggtcgcgacctcacagacttccttgaaaatgttctgacatgccacgtgtgcttagacatctgtaacatcgatccttcctgtgggtttggatcctggcgaccgtcttttagggaccggcgagcagcaggctcagatgttgatatcgatatggccttcattctggacagcgctgagacaacgacgctattccaatttaatgaaatgaaaaaatatatcgcatacctcgttagacagcttgacatgtcccccgacccaaaagcatctcagcacttcgcccgagtggccgttgtgcaacacgcaccctctgaatccgtggacaatgcttctatgccccctgtcaaggttgagttctcactcacagattatggaagcaaagaaaaattggtggacttcctgtcgagagggatgacccaactgcagggaactcgcgccttgggatcagccattgagtataccatcgaaaatgtgtttgagtccgccccaaaccctagagatctgaaaattgtggtcttaatgcttactggtgaagtgccagaacagcagctggaagaagcacagcgagtaattttgcaggccaagtgtaaagggtactttttcgtcgtgcttggaataggtagaaaggtcaacataaaagaggtgtacacattcgcctccgaacccaatgatgtgttctttaaactggtcgataaatccaccgaactgaatgaagaaccgctgatgcgcttcggaagactgctcccgtccttcgtgagttctgagaacgctttttacctgtcacccgacatccgcaagcaatgcgattggtttcaaggagaccaacctactaagaacctggtcaaattcggtcataagcaggtcaacgtgcctaataatgttactagcagcccgacatcaaaccctgtgaccactacaaagccagtaaccaccactaaacctgtgactacaaccactaagccggtgacaactactaccaaaccagtaactataatcaatcagcccagtgtgaaacccgctgctgcaaagccagcccctgctaaaccagtcgccgctaagccggtggccaccaagatggcaaccgtccgccctccagtggcagtcaaaccggctaccgccgctaaacctgtcgccgccaagcctgctgccgtgagacctcccgccgccgccgcagctaagcccgtcgctacaaagcccgaagttccccggccccaggcagccaagccagcagccaccaagcccgcaaccactaagcctatggtcaaaatgagccgcgaggtacaggtctttgaaatcaccgagaatagcgctaagctgcactgggagagagccgaacctccagggccttatttttacgaccttactgttacctctgcccacgatcaatctctcgtcctcaagcaaaaccttaccgttacagatagggtgatcggaggccttctcgcaggacaaacctatcacgtggctgtggtatgctacttacggagtcaggttcgcgccacttaccacggctctttttccaccaaaaaatctcagccccccccaccacaacccgcccgcagcgcaagctcctctacaatcaaccttatggtgagtaccgaacctctggctttaacggaaactgatatatgtaagttgcctaaggacgagggcacttgtcgagactttatacttaaatggtactacgaccctaatacaaagagctgtgccagattttggtatggtggctgcggtggaaatgaaaataagttcggttctcagaaggaatgtgaaaaggtctgtgcacctgtattagccaaacccggggttatatccgtgatgggaacatag

SEQ ID NO: 266947 - RNA, 8934 nt, Artificial Sequence
  derived and/or modified sequence
augaggaagcacaggcaccugccacuggucgcgguguuuugccucuuccuguccggguuccccacgacacacgcgcagcagcagcaggcugacguuaagaacggcgcugccgcggacaucaucuuccucgucgacaguucuuggaccauuggggaagagcauuuucaauugguacgugaguuccuuuacgacgugguuaagucacuggcugugggagagaacgauuuccacuucgcucucgugcaauucaaugggaacccacauaccgaguuccugcugaacacguacaggacaaaacaggaggucuuaucccacauaagcaauaugucguacauugguggcacaaaucagaccgguaaaggguuggaauacaucaugcagucccaccugaccaaagcggcuggcagcagagcuggggaugguguuccgcagguuaucgugguucucacugacggccacaguaaggacggccuggcuuugcccagugcagaacuuaaaagugcagacguaaacguguucgccaucggcguggaagaugccgacgagggcgcccuaaaggagaucgcgucugaaccccucaacaugcacauguuuaaucucgagaauuuuaccucgcugcacgacauagucgggaaccugguaagcugugugcacucaaguguaagucccgagcgggcaggcgacaccgagacgcugaaggacauaacagcccaggacagugcggauauuauuuuccugaucgacgguucuaauaauacagguagugugaacuucgcagugauccucgacuucuuggucaaccuuuuagaaaagcugcccaucgguacccagcaaauacgcgucggggucgugcaguuuucugacgaaccuagaaccauguuuagucuggauaccuauucuaccaaagcucaagugcugggcgcagugaaagcucugggguuugccggcggcgaacuggcaaauaucggucucgcccuggacuucgucgucgagaaucauuucacccgcgcagggggaaguagggucgaggaaggagugccacagguccuggugcugauuagcgcggguccuucgagcgacgagauaagguauggcgucguggcgcuuaagcaggcaucaguguuuucuuuugggcugggcgcccaggcagccagucgggcugagcuucagcacaucgcaacugacgacaaccuaguuuuuacagugccugaguuccguaguuuuggagaucugcaggagaaacuucuucccuauauaguggguguggcccaaagacauaucgugcugaaacccccuacgaucguuacacagguaaucgaggugaauaaaagagauaucguuuuccucguugauggcuccucggcucuggggcucgccaauuucaacgccauacgggauuuuauugcaaaagugauucagagauuagagaucggucaggaucuaauacaaguggcuguugcccaguacgcagauacagugcgcccugaauucuacuucaacacccauccaacaaaacgagaaguuauuaccgcugugaggaaaaugaaaccgcuggacggaucggcccucuauacggguagugcccucgauuuuguccgcaauaaccuauucaccuccucagcaggauaucgggcagcggaggggauccccaaacuuuugguccugaucacuggcggcaagagucuggaugaaauaagccagccugcccaggagcuuaaacguucaucuaucauggccuuugccaucggcaauaaaggugccgaccaagcagaacuggaggaaaucgccuucgauuccagucucguuuucauuccagccgaauuuagggcugccccgcugcagggaaugcuaccuggacugcuggccccauuaaggacucugucggggaccccugaagaaaguaagcgcgacauuuuguucuuauuugaugggucugcgaaccuggugggccaguuccccgugguucgcgauuuccuguacaaaaucaucgaugagcuuaaugugaaacccgaagggacaaggaucgccgucgcccaauacucagacgacgucaaaguggaaucaagguuugacgaacaucaaucuaagccagagauccucaaucugguaaaacgcaugaaaaucaaaaccggcaaggcccugaauuugggguacgcacucgacuaugcucaacguuauauuuucgucaaaucagccggcuccagaaucgaggauggcgugcugcaguuccuggucuugcugguagccggacguucuuccgaucggguagacgggcccgcuagcaaccugaagcagagcggggugguaccauuuauuuuccaagcuaagaaugccgacccugcagagcuggagcaaauuguacucucuccagccuuuauuuuagccgccgagucauugccaaagaucggggaccugcacccccagauugugaaccuauuaaagagcgugcauaauggcgccccugccccaguuuccggcgaaaaggacguugucuuccuacuagacgggucagaagggguucgcaguggauucccacuuuugaaagaauuuguccagaggguggucgagucccuugaugucggccaggaccgcgugagagucgccguuguacaguauagcgacaggacccgccccgaguuuuaucucaacucuuacaugaacaaacaggauguagugaaugccgugcgccaacugacacuacuugguggaccgacaccaaacaccggggcggcauuggaauucguccucaggaauauccuugucaguuccgcuggaucucguaucacagagggagugccccaacugcuuauagucuugacagcagaucggucgggagacgaugucaggaacccaaguguggucgugaaacgggguggagcagugcccaucggcauuggaauugggaaugcagacaucaccgaaaugcaaaccaucucguuuauuccggacuuugcugucgcaaucccuacauucagacaacugggaaccguucagcaggugaucagcgagcguguuacccaacugacuagggaggaacucucuagauugcagcccgugcuccaaccccugcccucuccaggggugggaggcaaaagagacguggucuuuuugauugacggcagccagucggcuggcccugaguuccaguauguaaggacgcugaucgaacggcuggucgauuaccuggacguuggcuucgauacaacucgugucgccguaauccaguuuagcgacgacccuaagguggaauuccugcugaaugcucacaguagcaaggaugagguucagaaugcggugcagaggcugagacccaaaggcgggaggcaaaucaaugugggcaaugcccucgaauacguaagccguaauaucuuuaagaggccgcugggaucgcggauagaagaaggcgucccccaguuccugguguugaucucaucaggcaaaucggacgaugaaguagaugacccagcagucgaacugaagcaguuuggcguugcaccauucacgauagcaagaaaugccgaucaggaggaacugguuaaaauuucccuuaguccagaguacguguucagcgucuccaccuuccgcgagcuaccgucucuugagcagaagcugcucacaccgaucacaacacucaccucagaacagauucaaaaguuacucgcuagcacacgauacccuccuccggccguggaaucggacgccgcagauauugucuuccugauagacaguucugagggaguaagacccgacggcuuugcacacauccgggauuucgugagcagaaucgugcggcggcucaacauuggaccuaguaaaguucgagugggugugguucaauucuccaacgacguuuucccugaauuuuaccugaagacuuaucguucacaggccccagucuuggaugcaaucaggcgacugaggcuucgcggggguaguccacucaacacaggaaaggcccuggaguuuguagccagaaaccucuucgugaaaagcgcaggcucccgaauugaagacggugugccacagcaucucgugcuagucuugggggggaagagccaagaugacguuuccagguucgcccagguaauucgcucuucagguaucgugucacugggcgugggagaucgaaacaucgaucggaccgaacuccagaccauaacuaacgacccccggcugguguuuacagugagagaauucagggaguugcccaauaucgaagaaagaaucaugaacucuuuuggacccuccgcugccacucccgcuccuccuggcgucgacacgccccccccauccagacccgaaaaaaagaaggccgauauuguauuucugcucgaugguucaauuaacuuccgccgcgauuccuuucaagaaguucugcgguucgucagcgaaaucgucgacacuguguaugaggauggcgacaguauucaaguaggccuggugcaguacaauuccgacccgaccgaugaauucuuccugaaagacuuuuccaccaaaagacagaucaucgacgcgaucaauaaagugguguauaaaggaggacggcacgcaaacaccaagguuggccuggaacacuugagggugaaccauuucguacccgaggccggaucucgacuggaccagcgggucccacaaaucgcuuucguaauuacagguggaaaguccguugaagacgcccaagacguuucccuggcccugacacagagaggggugaaagucuucgcuguuggcgucagaaacaucgacucagaggaggucgggaagauugcuuccaacagugcuacugcauuucgaguagggaacguucaggagcugagcgagcucuccgaacaggugcuggagacccugcacgaugccaugcacgagacauuguguccuggaguuacugaugccgcaaaggccugcaaccuggaugucauacugggguucgauggcagccgcgaucagaauguguucguggcgcaaaaaggguuugaaucuaaaguugaugccauucuuaauaggaucagucaaaugcacaggguuuccugcagcggcggcagauccccuacuguucggguuaguguaguggccaacacuccgucuggaccuguugaggccuucgacuuugacgaguaccagccagagaugcucgaaaaauuuagaaacaugcgcagccaacacccuuauguacugaccgaggauacacucaagguuuaucucaacaaauuccgacagucuucucccgauucagucaaaguagucauucauuuuaccgauggggccgacggagaccuggcugaccuccaccgggcuagugaaaaccuuagacaggagggcgugagagcucuaaucuuggucggccuugagaggguugugaaucuggaacgccuuaugcaccucgaguucggaaggggcuucauguacgaccggccucuucggcugaaccucuuagacuuggacuacgagcucgccgaacagcuggauaacaucgccgaaaaggcuugcuguggagugcccugcaaaugcucagggcagaggggagaccgagguccaaucgggaguaucgggcccaagggcaucccuggagaagauggguauagaggcuacccuggcgacgaagggggaccgggugagaggggcccaccgggcgucaaugggacacagggguuucagggcugcccaggccagagaggggucaagggaagcagaggcuuuccaggcgagaaaggcgaagugggagagaucggauuggacggacuggacggugaagauggagauaaggggcugccuggaaguagcggcgagaaagggaaccccgggcgccggggcgacaaagguccccgcggggaaaagggagaaaggggcgauguuggcauucgcggagaucccgguaacccaggccaggauagucaggagcgugggcccaagggagagaccggggaccuuggucccaugggcguaccggggagggauggggugccgggaggucccggcgagacaggcaagaauggcggauucggccgccguggaccgccaggggccaaagguaacaaaggggggccaggccagccuggauucgagggggagcagggaacccgaggagcucagggaccagccggccccgccggaccuccuggccuuauaggcgagcaggguaucucagguccucgcggcuccgggggcgcagccggagcuccuggagaaagaggccggacgggcccucucggacggaagggagagcccggggagccugguccuaaagggggcauagggaaccggggaccccggggcgagaccggcgacgacggaagagacgggguuggcuccgagggacgaagagguaagaaaggggagcgcggcuuucccggcuacccgggucccaagggaaaucccggcgagcccggucuuaauggaacuaccgggcccaagggcauuaggggacgcagaggcaacucaggcccucccgguauugugggccagaagggggauccgggauaucccggccccgccgggccaaagggaaacagaggcgauucuauagaccagugugcacucauucagaguauuaaggacaaaugcccuugcugcuaugggccacuugagugccccgucuuuccaacagaacuggcauucgcccuugacacauccgaaggggucaaucaggacacguucgguagaaugcgcgacguugugcugagcaucguaaacgaucugacuaucgcagaaucuaacuguccuaggggggcccgcguggcaguugucaccuacaacaaugagguuacaacugagauccgcuuugccgauagcaagaggaagaguguacuguuagacaagauuaagaaucugcaaguggcccugaccaguaaacaacagucccucgagaccgccaugaguuucgucgccaggaauacuuuuaaacgggucaggaacggauuucuuaugaggaaagucgcaguauuuuuuucgaacacucccacucgggccagcccgcaguuacgagaagcugucuugaaauuaagugaugcagguauuaccccccucuuccucacccgccaggaagacagacagcugaucaacgcuuuacaaauaaacaauaccgcaguuggacaugccuugguucuacccgcggggagggaccuuacagauuuccucgaaaauguucuaacgugucaugugugcuuagacaucugcaauauagaucccucaugcgguuucgguaguuggcgucccagcuuucgagauagaagggcugcugggagcgauguugacaucgacauggccuucauacucgacagugcagagacuacuacacuguuucaguucaacgaaaugaaaaaguauaucgcguaccuagugcgacaacucgacauguccccagauccgaaggcuucacagcauuuugcacgagucgccguggugcagcaugccccuuccgaauccguugacaaugcuucaaugccgccagugaagguggaauucagccugacagacuacgguagcaaggaaaagcucguagacuuucucucucgggguaugacucagcugcagggaacucgggcucugggguccgccaucgaguacacuaucgagaacguuuuugagucugcgccaaauccucgugaccugaagauagugguucugaugcugacaggugagguccccgaacaacagcuggaagaggcccagcgcgugauccuccaagcgaagugcaagggguauuuuuucgugguacucggcauagguagaaaaguuaacauuaaagaagucuacaccuuugcuucggagccuaacgauguguuuuucaaacuuguugauaagucaacagaacugaacgaagaaccucuuaugcguuuugggagacuccugccgagcuuuguguccagcgaaaaugcguuuuauuuaucgccugauauccggaagcagugcgacugguuucagggggaucaaccaacgaagaaucugguuaaguucggccauaaacaggugaacgugccuaauaaugucacuucuagcccuaccuccaacccggugaccacgaccaaaccuguuacuacuacuaagcccguuacaaccacaacuaagccugucaccaccaccaccaagccggugacaauaaucaaccagcccucuguuaaacccgcagcugcgaagcccgcgcccgcaaagccggucgcugccaaaccugucgccacaaagauggccaccguacgacccccaguggccgucaaaccugccacugccgcaaagccaguggcagcuaaaccagcugcuguucgcccuccugcggcugccgccgcaaaacccguggcuaccaaaccugaagugccacgcccccaagccgcuaagccagcagcuaccaagcccgccaccacuaagccuauggugaagaugucacgcgaagugcagguguuugagauaacagaaaauagugcuaagcugcacugggaaagagccgagcccccggguccuuauuucuaugaucugaccgucacgagcgcccaugaccagagccugguccucaagcagaaucuuacagugacagauagagucaucggggggcuuuuggcuggucagaccuaccaugucgcagucguaugcuaucugaggucacaagucagagcuacauaucaugggucuuucucaacaaagaaaagccagccuccccccccccagcccgcuaggagcgccaguagcucaacaaucaaucucaugguuuccacugaacccuuggccuugaccgagaccgauaucugcaaacugccuaaagacgaagguacaugucgggacuucauucugaaaugguacuacgaccccaacacuaaguccugugcucgcuucugguauggagggugcgggggcaaugagaacaaguucggcagucagaaggagugcgaaaaggugugcgcuccugugcuagcaaagccuggaguuauuuccguuaugggcacauag

SEQ ID NO: 266948 - RNA, 8934 nt, Artificial Sequence
  derived and/or modified sequence
augagaaagcaccggcaucugccccuaguugcaguguuuugccuguuucuuucaggauucccgacgacccacgcucagcagcaacaagcagacgugaagaauggcgccgcagcugacauuaucuuccugguggauucauccuggacaaucggagaggagcacuuucaauuagucagagaguuuuuauaugacguuguuaaaucuuuagcaguuggagaaaaugauuuccacuucgcauuaguacaguucaacgguaacccucacacagaauuccuccucaacaccuacaggaccaagcaggaaguccuuucccacauuuccaacauguccuacauuggcggaacaaaucaaacgggaaagggacucgaauauauuaugcagucacaucuuacaaaagcggcagggagcagggcaggcgacggagugccucaggucauugugguacugacagauggucauucuaaggacggacucgcguuacccucagcugagcugaaaucugcugacgucaauguuuucgcgaucggcguggaggacgcagacgagggugcacugaaggaaaucgcuuccgaaccucugaacaugcacauguucaaccucgaaaacuuuacuucacuucacgauauagugggcaaccuuguauccugcguacacaguagcgugagcccggaacgggccggagauaccgaaacccucaaagauauuacugcacaagauucagcagacauuauuuuuuuaaucgauggaucaaauaacacaggaagugugaauuuugcuguuaucuuggauuuucucguaaaccuccuggagaaacuaccaauagggacacagcaaauucgugugggaguuguucaauuuuccgaugagccaagaacaauguucuccuuggacacuuacagcacuaaagcccaagugcuaggcgcugucaaggcccugggauucgcaggcggugagcuggccaacaucgguuuagcuuuagacuuuguggucgagaaucacuuuacaagggccggggguucaagaguggaggaaggcgugccgcaggugcuuguuuugaucagcgcaggaccuagcagcgaugagaucagauauggcgucguugcccugaagcaagccaguguguuuaguuuuggauuaggcgcucaagccgcuuccagagcggaauugcagcauauugcaaccgacgacaaccuggucuuuaccgugccggaauuucguucuuuuggagaucugcaagaaaaacuccugccauauaucgucggaguugcgcagagacauaucgugcuuaagcccccuaccauugugacgcaggugauugaagugaacaaacgggacauuguuuuccuuguugacgggaguucugcucuuggcuuagcuaauuucaacgccauaagagacuuuaucgccaaagugauccaaagacuugaaauuggacaggaucucauucagguugccguagcacaguaugcggauaccguuaggcccgaauuuuacuucaacacgcaucccacuaagcgagagguaauuaccgccguuagaaaaaugaagcccuuggacgggagugcacuauacaccggaucugcacuagauuucguuagaaauaaccuuuucacgucaucggccggcuacagagcagcugagggaauuccaaaacuccucgugcugauuacugggggaaaaucuuuagacgagauuagucagccugcccaggaacugaaacgcaguuccauuauggcuuucgcaaucgguaacaaaggcgcugaccaggcagagcuggaagaaauugcauuugacucuagcuuaguguuuauaccagccgaauuccgcgcugccccucugcagggcaugcugcccggccuccuugcuccucugcgaacucuaucuggaaccccugaggagagcaagagggacaucuuauuucuguuugaugguuccgcaaaccucguagggcaauuuccaguuguucgggacuuccucuauaaaaucauugaugagcugaaugucaagccagaagguaccagaauugcugucgcccaguauagcgacgaugugaagguugagucuagauucgacgagcaucaguccaaacccgaaauccuuaaccuuguaaaacggaugaaaauaaagaccgguaaagcacugaaucugggcuaugcuuuagauuaugcgcagagauacaucuuugugaaaagcgccgguucacgaauugaggaugggguccuccaauuccuggugcugcugguggccggaagauccuccgaucgcguugacggaccugcaagcaaccugaagcaaagugguguuguaccuuucauauuccaggccaagaacgccgacccggcugagcucgaacagauuguauuaagccccgccuucauuuuagcggcugaaagcuuaccuaagauaggagaccuucauccucagaucgucaaucugcucaagagcguucacaauggcgccccagccccaguaucuggugaaaaagaugugguuuuccugcuggauggcucagagggcguaagaagcgguuucccccuucugaaagaauuuguucagcgagucguagagucacucgauguuggucaggaucgcgugcgaguagcuguaguacaguauucugaucggacaagaccagaguuuuaucuuaacaguuauaugaauaagcaggacguagucaacgccgugcgucaauugacacuucuuggcgggccuacaccgaacacuggagcugcguuggaauuugugcugcggaauauucuagucagcucagccggcucccgcauuacagagggcgucccacagcuucuaauaguacuaacugcugacagaucuggagaugauguuaggaacccaucuguuguagugaaaagagguggugcagugccuaucggaauaggaaucgggaacgcugauauuacagagaugcagaccauuaguuucaucccugauuucgcuguggccauuccuaccuucagacagcucggaaccgugcagcaggucauuucagagagagugacccaacuuacgagagaggaguugagcagauugcagcccguguuacagccucuaccaagcccgggaguagggggcaaaagagauguggucuuccuuaucgacggcagucaguccgcagguccugaguuccaguaugugcgcacacugauagagagacugguggauuaucuugacguaggcuucgacacuaccagaguugccguuauccaguuuucugaugacccaaaggucgaauuuuugcugaacgcccauucgagcaaggaugaagugcagaaugcagugcagcggcuuagaccaaaaggaggcaggcaaauuaacguaggcaacgcucuugaauauguaucucgcaacaucuuuaagcgaccuuuagggucucgcaucgaagaaggcgucccacaauucuuggugcugaucucuaguggaaagucagacgaugaaguggaugacccugcagucgagcucaagcaauuuggaguagcaccuuucaccauugcaagaaacgccgaucaggaagagcuggucaagaucagccuuucacccgaauaugucuuuucaguguccacuuucagggaacugcccagccuggagcagaaauugcuaacacccaucacaacucugaccagcgaacagauucaaaaacuguuggcuuccacccgcuacccgccccccgccguugagucagaugcagcggauaucguauuuuugaucgacuccagugaaggcguucggcccgacggguucgcacauauuagagacuucgugucucgcauaguuagacgacuuaauaucgguccgucgaaaguuaggguaggugucguccaguucucuaacgauguauucccagaauuuuaccuuaagacauaucgcucccaggcaccuguguuagaugcuauucggcgauugagacuucgggggggaucaccauuaaacacuggaaaagcgcuggaguucguggcucgcaaccuguuugugaagagcgcuggaucucgaauugaggacggcgugccucaacauuuagugcugguguuggggggaaaaucacaggacgacguguccagguuugcucaaguuauccgaucuagcgguauuguuucuuugggcgucggggacaggaauauagaccgaacugaacugcaaacuauuacuaaugauccuaggcucgucuuuaccgugagagaauucagggaguugcccaauaucgaagaaagaaucaugaacucuuuuggacccuccgcugccacucccgcuccuccuggcgucgacacgccccccccauccagacccgaaaaaaagaaggccgauauuguauuucugcucgaugguucaauuaacuuccgccgcgauuccuuucaagaaguucugcgguucgucagcgaaaucgucgacacuguguaugaggauggcgacaguauucaaguaggccuggugcaguacaauuccgacccgaccgaugaauucuuccugaaagacuuuuccaccaaaagacagaucaucgacgcgaucaauaaagugguguauaaaggaggacggcacgcaaacaccaagguuggccuggaacacuugagggugaaccauuucguacccgaggccggaucucgacuggaccagcgggucccacaaaucgcuuucguaauuacagguggaaaguccguugaagacgcccaagacguuucccuggcccugacacagagaggggugaaagucuucgcuguuggcgucagaaacaucgacucagaggaggucgggaagauugcuuccaacagugcuacugcauuucgaguagggaaugugcaggagcuuagcgaacuuucagaacaaguguuagaaacucugcacgacgcuaugcaugagacacucugcccaggcgucaccgacgcugcgaaagcgugcaacuuagaugugauccucggauuugacggaucaagagaucagaacguauuugucgcacaaaaaggcuucgaauccaagguggacgcuauacuuaauagaaucucucagaugcaccgaguaagcugcucaggcgggaggucuccaaccgucagggugucugucgucgcuaacacccccucugguccgguggaggcguucgacuuugacgaguaccagccagagaugcucgaaaaauuuagaaacaugcgcagccaacacccuuauguacugaccgaggauacacucaagguuuaucucaacaaauuccgacagucuucucccgauucagucaaaguagucauucauuuuaccgauggggccgacggagaccuggcugaccuccaccgggcuagugaaaaccuuagacaggagggcgugagagcucuaaucuuggucggccuugagaggguugugaaucuggaacgccuuaugcaccucgaguucggaaggggcuucauguaugaccgaccauuacgcuuaaaucuuuuagaucuggauuacgaauuagcggaacaauuggauaauauugcugagaaagcuuguugcggagucccuugcaaauguuccggacagcgcggcgaucgaggccccauugggaguauuggaccaaaaggaaucccuggcgaagacggcuaccgcggauacccuggugaugaaggcggucccggggaacgugggccccccggagugaacggaacccaaggcuuccaaggcugucccgggcagcgcggugugaaggggucccgaggauuuccaggggagaagggagaaguuggcgaaaucggauuagacggauuggacggcgaagacggcgauaaaggcuuacccgguagcagcggagaaaagggcaacccgggccgaaggggugauaaaggcccuaggggugaaaaaggagagaggggagauguggggauacgcggagacccgggaaauccuggacaggacucucaagaaagagguccuaagggggaaacaggcgauuuagguccaaugggggugccaggacgcgacggagugcccggggguccgggagagacaggcaaaaauggcggguuuggccgacgaggaccuccaggagccaaagguaacaaaggcggccccggucaaccgggauuugagggagaacaaggaacgcggggggcacaaggaccugcgggccccgccggccccccaggucuuauuggcgaacagggcaucucgggacccagggguaguggcggcgcagcuggagcuccaggugagaggggaaggacgggaccacucggucgaaaaggggaaccaggggagccgggcccaaaagggggaauaggcaauagggggccgagaggagaaacgggcgaugacggccgggacggggucggcuccgagggaaggagaggcaagaagggcgagcggggauuuccaggguacccaggaccaaaggggaaucccggagagccuggucucaauggcacaacaggccccaaaggaauacgugggaggagaggaaauagcggacccccaggaauuguagggcaaaaaggagauccaggauacccugggccggccggacccaaaggcaacaggggagacagcaucgaucaaugcgcacuuauucaguccauaaaggauaaaugcccaugcugcuauggcccccuggaaugcccaguuuuucccacggaacuggccuuugcucucgauacaagugaaggcgugaaucaagacacuuucggacggaugcgggacguaguacuaucuaucguaaaugaccugacaauagcugagucuaacugcccucgcggggcuaggguagcagucgugacguacaauaacgaggugaccaccgagauucgcuuugcugacagcaagagaaaaagcguccucuuagacaagaucaaaaaccuucaggucgcucuuacuucaaaacaacaaagccucgagacggcaauguccuuuguggcacggaacacauucaagcgcguccgcaacggguuucugaugagaaagguagcgguauucuucucuaacaccccgacgagagccucuccucaacuucgggaagccgugcucaaacuaagugaugccgggaucacccccuuguuccugacacgccaagaggacagacaauuaauaaaugcccugcagauaaacaauacagcugugggacacgcccuugugcugcccgcuggucgcgaccucacagacuuccuugaaaauguucugacaugccacgugugcuuagacaucuguaacaucgauccuuccuguggguuuggauccuggcgaccgucuuuuagggaccggcgagcagcaggcucagauguugauaucgauauggccuucauucuggacagcgcugagacaacgacgcuauuccaauuuaaugaaaugaaaaaauauaucgcauaccucguuagacagcuugacaugucccccgacccaaaagcaucucagcacuucgcccgaguggccguugugcaacacgcacccucugaauccguggacaaugcuucuaugcccccugucaagguugaguucucacucacagauuauggaagcaaagaaaaauugguggacuuccugucgagagggaugacccaacugcagggaacucgcgccuugggaucagccauugaguauaccaucgaaaauguguuugaguccgccccaaacccuagagaucugaaaauuguggucuuaaugcuuacuggugaagugccagaacagcagcuggaagaagcacagcgaguaauuuugcaggccaaguguaaaggguacuuuuucgucgugcuuggaauagguagaaaggucaacauaaaagagguguacacauucgccuccgaacccaaugauguguucuuuaaacuggucgauaaauccaccgaacugaaugaagaaccgcugaugcgcuucggaagacugcucccguccuucgugaguucugagaacgcuuuuuaccugucacccgacauccgcaagcaaugcgauugguuucaaggagaccaaccuacuaagaaccuggucaaauucggucauaagcaggucaacgugccuaauaauguuacuagcagcccgacaucaaacccugugaccacuacaaagccaguaaccaccacuaaaccugugacuacaaccacuaagccggugacaacuacuaccaaaccaguaacuauaaucaaucagcccagugugaaacccgcugcugcaaagccagccccugcuaaaccagucgccgcuaagccgguggccaccaagauggcaaccguccgcccuccaguggcagucaaaccggcuaccgccgcuaaaccugucgccgccaagccugcugccgugagaccucccgccgccgccgcagcuaagcccgucgcuacaaagcccgaaguuccccggccccaggcagccaagccagcagccaccaagcccgcaaccacuaagccuauggucaaaaugagccgcgagguacaggucuuugaaaucaccgagaauagcgcuaagcugcacugggagagagccgaaccuccagggccuuauuuuuacgaccuuacuguuaccucugcccacgaucaaucucucguccucaagcaaaaccuuaccguuacagauagggugaucggaggccuucucgcaggacaaaccuaucacguggcugugguaugcuacuuacggagucagguucgcgccacuuaccacggcucuuuuuccaccaaaaaaucucagccccccccaccacaacccgcccgcagcgcaagcuccucuacaaucaaccuuauggugaguaccgaaccucuggcuuuaacggaaacugauauauguaaguugccuaaggacgagggcacuugucgagacuuuauacuuaaaugguacuacgacccuaauacaaagagcugugccagauuuugguaugguggcugcgguggaaaugaaaauaaguucgguucucagaaggaaugugaaaaggucugugcaccuguauuagccaaacccgggguuauauccgugaugggaacauag

SEQ ID NO: 266949 - protein, 362 aa, Artificial Sequence
  derived and/or modified sequence
MDLHLFDYSEPGNFSDISWPCNSSDCIVVDTVMCPNMPNKSVLLYTLSFIYIFIFVIGMIANSVVVWVNIQAKTTGYDTHCYILNLAIADLWVVLTIPVWVVSLVQHNQWPMGELTCKVTHLIFSINLFGSIFFLTCMSVDRYLSITYFTNTPSSRKKMVRRVVCILVWLLAFCVSLPDTYYLKTVTSASNNETYCRSFYPEHSIKEWLIGMELVSVVLGFAVPFSIIAVFYFLLARAISASSDQEKHSSRKIIFSYVVVFLVCWLPYHVAVLLDIFSILHYIPFTCRLEHALFTALHVTQCLSLVHCCVNPVLYSFINRNYRYELMKAFIFKYSAKTGLTKLIDASRVSETEYSALEQSTK

SEQ ID NO: 266950 - protein, 211 aa, Artificial Sequence
  derived and/or modified sequence
MDLHLFDYSEPGNFSDISWPCNSSDCIVVDTVMCPNMPNKSVLLYTLSFIYIFIFVIGMIANSVVVWVNIQAKTTGYDTHCYILNLAIADLWVVLTIPVWVVSLVQHNQWPMGELTCKVTHLIFSINLFGSIFFLTCMSVDRYLSITYFTNTPSSRKKMVRRVVCILVWLLAFCVSLPDTYYLKTVTSASNNETYCRSFYPEHSIKEWLIG

SEQ ID NO: 266951 - DNA, 1089 bp, Artificial Sequence
  derived and/or modified sequence
atggacctgcacctgttcgactactccgaacctgggaacttctccgacatttcctggccctgtaatagtagcgattgtattgtggtcgacactgtcatgtgccctaacatgcccaataaaagtgtgctgctgtacaccctgtccttcatctacatctttatttttgtgattggcatgatcgctaactccgtggtcgtctgggtaaacatccaggccaagactaccgggtatgatacccactgctacattctgaacctggctatcgctgatctttgggtggtccttaccatacctgtgtgggtggtcagcctggtgcagcacaaccaatggccaatgggcgaacttacgtgcaaggtgacccatctgatattcagtatcaatctctttgggtctatttttttccttacatgcatgagtgtcgacagatacttgtccataacatattttaccaatactccatcatctcggaaaaagatggtgcgccgtgttgtgtgcattctggtgtggcttttggccttctgtgttagcttgcccgacacctactacctgaagacggtaacaagcgcctccaacaacgaaacttactgtcgcagcttttacccagagcactccattaaggagtggctgatcggtatggagctggtgtcggttgtcttgggcttcgccgtgcctttctctatcatagccgtcttctatttcctcttggctagggcgatctccgcaagttcggaccaggaaaaacattccagcagaaagataatcttctcctacgtggtggtgtttctggtttgctggctaccttaccacgtggctgtcctgctggatatcttttccatcctgcactacataccatttacctgccgccttgagcatgcactcttcactgctctccatgtcacccaatgtcttagcctagtgcactgctgcgtgaaccctgttctctacagcttcataaatagaaactatcgctacgagcttatgaaagcattcatttttaagtattctgccaagaccggtctgaccaagctgatcgatgcctcacgggtgagtgaaactgagtattcggcactagagcaatcaacgaagtag

SEQ ID NO: 266952 - DNA, 636 bp, Artificial Sequence
  derived and/or modified sequence
atggacctgcacctgtttgactactccgaacctggaaacttttccgatatctcatggccatgtaactcctctgactgtattgtcgtggataccgtcatgtgccccaatatgccaaacaagtccgtgctgctatacacgctgagttttatttacatctttatcttcgtcattggtatgattgctaactccgtggtggtttgggtgaacatccaagctaaaactactgggtatgacactcactgttatatcctaaacctcgccatcgccgacctttgggtagtgttgacaattccggtgtgggttgtgtcacttgtgcagcacaatcaatggcccatgggggaattaacatgcaaggtgacacatctgatcttctcaataaacttattcggctccatcttcttcctgacctgcatgtccgtggatcgttacttatctatcacttactttaccaatacccctagtagtaggaagaagatggtgcgtcgcgtggtgtgcattttggtctggctcctggctttttgcgtgtctctgcccgacacctactatttgaaaactgtgacgagcgcctccaacaacgagacgtactgcaggtccttctacccggagcattccattaaggagtggttaattggatag

SEQ ID NO: 266953 - DNA, 1089 bp, Artificial Sequence
  derived and/or modified sequence
atggacctgcacctgtttgactacagcgagcccggcaacttcagtgacatctcctggccctgcaacagcagtgactgcatcgtggtggacacagtgatgtgccccaacatgcccaacaagtctgtgctgctgtacaccctgtccttcatctacatcttcatctttgtgattggcatgattgccaacagcgtggtggtgtgggtgaacatccaggccaagaccaccggctatgacacccactgctacatcctgaacctggccatcgctgacctgtgggtggtgctgaccatccctgtgtgggtggtgtccctggtgcagcacaaccagtggcccatgggagagctgacctgcaaggtgacccacctgatcttcagcatcaacctgtttggcagcatcttcttcctgacctgcatgtctgtggaccgctacctgagcatcacctacttcaccaacacccccagcagcaggaagaagatggtgagaagagtggtgtgcatcctggtgtggctgctggccttctgtgtgtccctgcctgacacctactacctgaagacagtgaccagcgccagcaacaatgagacctactgccgctccttctacccagagcacagcatcaaggagtggctgattggcatggagctggtgtctgtggtgctgggctttgctgtgcccttcagcatcatcgctgtgttctacttcctgctggcccgggccatcagcgccagcagtgaccaggagaagcacagcagcaggaagatcatcttctcctatgtggtggtgttcctggtgtgctggctgccctaccacgtggccgtgctgctggacatcttcagcatcctgcactacatccccttcacctgccgcctggagcacgccctcttcaccgccctgcacgtgacccagtgcctgagcctggtgcactgctgcgtgaaccctgtgctgtacagcttcatcaacagaaactaccgctatgagctgatgaaggccttcatcttcaagtacagcgccaagacaggcctgaccaagctgattgatgccagccgggtgtctgaaacagagtacagcgccctggagcagagcaccaagtag

SEQ ID NO: 266954 - DNA, 636 bp, Artificial Sequence
  derived and/or modified sequence
atggacctgcacctgtttgactacagcgagcccggcaacttcagtgacatctcctggccctgcaacagcagtgactgcatcgtggtggacacagtgatgtgccccaacatgcccaacaagtctgtgctgctgtacaccctgtccttcatctacatcttcatctttgtgattggcatgattgccaacagcgtggtggtgtgggtgaacatccaggccaagaccaccggctatgacacccactgctacatcctgaacctggccatcgctgacctgtgggtggtgctgaccatccctgtgtgggtggtgtccctggtgcagcacaaccagtggcccatgggagagctgacctgcaaggtgacccacctgatcttcagcatcaacctgtttggcagcatcttcttcctgacctgcatgtctgtggaccgctacctgagcatcacctacttcaccaacacccccagcagcaggaagaagatggtgagaagagtggtgtgcatcctggtgtggctgctggccttctgtgtgtccctgcctgacacctactacctgaagacagtgaccagcgccagcaacaatgagacctactgccgctccttctacccagagcacagcatcaaggagtggctgattggatag

SEQ ID NO: 266955 - DNA, 1089 bp, Artificial Sequence
  derived and/or modified sequence
atggacctgcacctgttcgactacagcgagcccggcaacttcagcgatatatcctggccttgcaactccagtgactgtatcgtagtggacactgtaatgtgtcctaacatgcccaataaatcagtgctgctgtacacactctccttcatttatatttttatcttcgtgattggcatgatagctaattctgtggtcgtgtgggtgaatatacaggccaagaccacaggctacgacacgcactgctacatactcaacctggccattgctgacctctgggtcgtcctgacaataccggtctgggtggtatcattagtgcagcacaaccagtggccaatgggcgagctcacatgcaaggtgacccaccttatcttcagtattaacctgttcggctccattttttttctgacatgcatgagcgttgatcgatacctgagcattacttattttactaacacaccctccagccgtaaaaagatggtgcggagagtagtatgtatactcgtctggttgctcgccttctgcgttagtctgccagatacatattacctaaagaccgtgacaagcgcgagcaataatgagacctattgtaggagtttctaccccgagcattcaatcaaggagtggctaataggaatggaactcgtttccgttgtcctcgggttcgccgttcccttttccatcatcgctgtgttctattttctgttggcacgcgcaatttcggcttcttctgaccaggagaaacactcatctagaaaaattatctttagctatgtggttgtgttcctcgtttgctggcttccttatcatgtagccgttctcctggacattttcagtattctgcactacataccattcacctgcagactggaacatgcacttttcacggccctacatgtgacacagtgcctcagcctcgtgcattgctgtgtgaatccggtgctgtattcctttataaacaggaattaccggtacgagctgatgaaagctttcatcttcaaatactctgcaaaaaccggacttactaagctgatcgacgcgtctcgcgtgtctgagacagaatactcagcacttgagcagagcactaagtag

SEQ ID NO: 266956 - DNA, 636 bp, Artificial Sequence
  derived and/or modified sequence
atggacctgcacctgttcgactacagcgagcccggcaacttcagcgatattagttggccatgcaactctagcgattgtatcgttgtggacaccgtgatgtgtccaaatatgcctaataagagcgtgctgctttataccctgtctttcatctatattttcatcttcgtaattggcatgatcgccaacagcgtcgtagtatgggttaacatccaggctaagaccacgggatacgacactcactgttacattttgaaccttgcaatcgcagatttgtgggtcgtactgactattccagtttgggttgtgtccctggtccagcataaccagtggccgatgggcgagctgacctgtaaagtgactcaccttattttttccataaatctctttggttccatcttttttctgacttgcatgtcagttgaccgctacttatccatcacttacttcacgaatacacccagcagccggaaaaaaatggtgcgacgagtggtatgtatcctagtgtggctgttggccttctgtgtcagtttgcccgacacctattacctgaagacagtcacgagcgcctctaacaatgaaacgtattgccgctcattctaccccgagcacagtattaaagagtggctgatcggatag

SEQ ID NO: 266957 - DNA, 1089 bp, Artificial Sequence
  derived and/or modified sequence
atggatctccatctatttgactattcagagccgggtaacttctctgatattagctggccctgcaattcctccgattgtattgtagtggacactgttatgtgccctaatatgcccaacaagtctgtcctgctatacactctgtcattcatttatatattcatattcgtgattggaatgattgcaaatagcgttgtagtctgggtcaatattcaggcaaagaccacggggtacgacacacattgttacattcttaatttggcaattgcagacctatgggtggtgctgaccatccctgtgtgggtggtaagcctcgttcaacataatcagtggcctatgggtgaactgacgtgtaaggtaacccatctaatattttccataaatctcttcgggtccatattcttccttacatgtatgtcagtggatcgctatctatctattacatactttacaaacacgcccagctcgaggaagaaaatggtgaggcgagtggtctgcattttagtttggcttctcgctttctgcgtgtctttacccgacacgtactatctgaagaccgttactagtgcctcgaacaacgaaacttactgccgctcgttctatcccgagcactctattaaggaatggttaatcgggatggagcttgtttctgtcgtccttgggttcgctgtccccttttcaattatcgctgtcttttatttccttctcgctagagcaatttctgcctcttccgatcaggaaaagcatagctctcggaagatcatattctcttacgtagtggttttcctggtctgttggctgccatatcacgtcgcagtattactagacattttttcgatcctacactatatcccttttacttgtcgactggaacatgccctctttactgccctccacgttacccagtgcctgagcttggtgcactgttgtgtgaaccctgtcctgtatagttttattaaccgcaattatcggtacgagctcatgaaggcctttatcttcaagtacagcgccaagacaggcttaacgaagcttattgacgcctccagggtatcagagaccgaatacagcgctcttgaacaatccaccaagtag

SEQ ID NO: 266958 - DNA, 636 bp, Artificial Sequence
  derived and/or modified sequence
atggacctgcaccttttcgattattccgagcctggcaacttctctgacatttcatggccatgcaattcaagcgactgtattgtggtcgatactgtgatgtgccccaatatgccgaacaaaagtgtcctgttgtacaccctgtcgttcatctatatcttcatctttgtgatcgggatgatagccaactccgtggtggtgtgggttaacatccaggccaagactacaggctacgacacacactgctatatcctgaacctggcgatcgcagacttgtgggtcgtgctgactatcccggtgtgggtggtgagccttgtgcagcacaaccagtggcctatgggggaattaacgtgtaaggtgactcatctcattttttccatcaacctcttcggatccatctttttccttacctgcatgtctgtggacaggtacttatccataacttattttaccaatactccgtcaagtcgtaagaagatggtgcgccgtgtggtctgtatccttgtgtggttgctggccttttgtgtttctctgcctgatacatattatttaaaaaccgtcacctctgcgtccaacaatgaaacttactgccgcagtttctatcctgaacattccatcaaggagtggttgatcgggtag

SEQ ID NO: 266959 - DNA, 2203 bp, Artificial Sequence
  derived and/or modified sequence
acacttgtgcaggaaacaacagactagtgaggtttacaagaggggggtgtgtgtgtgtgtgtgtctgcctgtgggatgggggtggcacgggggagagagagatgtgggttacaaagctgccatctagaggctagaggctcctttctgcagtgtatataatgcaagtctgcagccagcagagctcacagttgttgcaaagtgctcagcactaagggagccagcgcacagcacagccaggaaggcgagcgagcccagccagcccagccagcccagccagcccggaggtcatttgattgcccgcctcagaacgatggatctgcatctcttcgactactcagagccagggaacttctcggacatcagctggccatgcaacagcagcgactgcatcgtggtggacacggtgatgtgtcccaacatgcccaacaaaagcgtcctgctctacacgctctccttcatttacattttcatcttcgtcatcggcatgattgccaactccgtggtggtctgggtgaatatccaggccaagaccacaggctatgacacgcactgctacatcttgaacctggccattgccgacctgtgggttgtcctcaccatcccagtctgggtggtcagtctcgtgcagcacaaccagtggcccatgggcgagctcacgtgcaaagtcacacacctcatcttctccatcaacctcttcggcagcattttcttcctcacgtgcatgagcgtggaccgctacctctccatcacctacttcaccaacacccccagcagcaggaagaagatggtacgccgtgtcgtctgcatcctggtgtggctgctggccttctgcgtgtctctgcctgacacctactacctgaagaccgtcacgtctgcgtccaacaatgagacctactgccggtccttctaccccgagcacagcatcaaggagtggctgatcggcatggagctggtctccgttgtcttgggctttgccgttcccttctccattatcgctgtcttctacttcctgctggccagagccatctcggcgtccagtgaccaggagaagcacagcagccggaagatcatcttctcctacgtggtggtcttccttgtctgctggctgccctaccacgtggcggtgctgctggacatcttctccatcctgcactacatccctttcacctgccggctggagcacgccctcttcacggccctgcatgtcacacagtgcctgtcgctggtgcactgctgcgtcaaccctgtcctctacagcttcatcaatcgcaactacaggtacgagctgatgaaggccttcatcttcaagtactcggccaaaacagggctcaccaagctcatcgatgcctccagagtctcagagacggagtactctgccttggagcagagcaccaaatgatctgccctggagaggctctgggacgggtttacttgtttttgaacagggtgatgggccctatggttttctagagcaaagcaaagtagcttcgggtcttgatgcttgagtagagtgaagaggggagcacgtgccccctgcatccattctctctttctcttgatgacgcagctgtcatttggctgtgcgtgctgacagttttgcaacaggcagagctgtgtcgcacagcagtgctgtgcgtcagagccagctgaggacaggcttgcctggacttctgtaagataggattttctgtgtttcctgaattttttatatggtgatttgtatttaaattttaagactttattttctcactattggtgtaccttataaatgtatttgaaagttaaatatattttaaatattgtttgggaggcatagtgctgacatatattcagagtgttgtagttttaaggttagcgtgacttcagttttgactaaggatgacactaattgttagctgttttgaaattatatatatataaatatatataaatatataaatatatgccagtcttggctgaaatgttttatttaccatagttttatatctgtgtggtgttttgtaccggcacgggatatggaacgaaaactgctttgtaatgcagtttgtgacattaatagtattgtaaagttacattttaaaataaacaaaaaactgttctggactgcaaatctgcacacacaacgaacagttgcatttcagagagttctctcaatttgtaagttatttttttttaataaagatttttgtttcctaaaaatgca

SEQ ID NO: 266960 - DNA, 713 bp, Artificial Sequence
  derived and/or modified sequence
ggtgaccccggggccagaattctcgcaggcgcctgggccgggtgcccggccgtgcgtcatttgattgcccgcctcagaacgatggatctgcatctcttcgactactcagagccagggaacttctcggacatcagctggccatgcaacagcagcgactgcatcgtggtggacacggtgatgtgtcccaacatgcccaacaaaagcgtcctgctctacacgctctccttcatttacattttcatcttcgtcatcggcatgattgccaactccgtggtggtctgggtgaatatccaggccaagaccacaggctatgacacgcactgctacatcttgaacctggccattgccgacctgtgggttgtcctcaccatcccagtctgggtggtcagtctcgtgcagcacaaccagtggcccatgggcgagctcacgtgcaaagtcacacacctcatcttctccatcaacctcttcggcagcattttcttcctcacgtgcatgagcgtggaccgctacctctccatcacctacttcaccaacacccccagcagcaggaagaagatggtacgccgtgtcgtctgcatcctggtgtggctgctggccttctgcgtgtctctgcctgacacctactacctgaagaccgtcacgtctgcgtccaacaatgagacctactgccggtccttctaccccgagcacagcatcaaggagtggctgatcgg

SEQ ID NO: 266961 - DNA, 1089 bp, Artificial Sequence
  derived and/or modified sequence
atggacctgcacctgttcgactacagcgagcccggcaacttcagcgacatcagctggccctgcaacagcagcgactgcatcgtggtggacaccgtgatgtgccccaacatgcccaacaagagcgtgctgctgtacaccctgagcttcatctacatcttcatcttcgtgatcggcatgatcgccaacagcgtggtggtgtgggtgaacatccaggccaagaccaccggctacgacacccactgctacatcctgaacctggccatcgccgacctgtgggtggtgctgaccatccccgtgtgggtggtgagcctggtgcagcacaaccagtggcccatgggcgagctgacctgcaaggtgacccacctgatcttcagcatcaacctgttcggcagcatcttcttcctgacctgcatgagcgtggacagatacctgagcatcacctacttcaccaacacccccagcagcagaaagaagatggtgagaagagtggtgtgcatcctggtgtggctgctggccttctgcgtgagcctgcccgacacctactacctgaagaccgtgaccagcgccagcaacaacgagacctactgcagaagcttctaccccgagcacagcatcaaggagtggctgatcggcatggagctggtgagcgtggtgctgggcttcgccgtgcccttcagcatcatcgccgtgttctacttcctgctggccagagccatcagcgccagcagcgaccaggagaagcacagcagcagaaagatcatcttcagctacgtggtggtgttcctggtgtgctggctgccctaccacgtggccgtgctgctggacatcttcagcatcctgcactacatccccttcacctgcagactggagcacgccctgttcaccgccctgcacgtgacccagtgcctgagcctggtgcactgctgcgtgaaccccgtgctgtacagcttcatcaacagaaactacagatacgagctgatgaaggccttcatcttcaagtacagcgccaagaccggcctgaccaagctgatcgacgccagcagagtgagcgagaccgagtacagcgccctggagcagagcaccaagtag

SEQ ID NO: 266962 - DNA, 636 bp, Artificial Sequence
  derived and/or modified sequence
atggacctgcacctgttcgactacagcgagcccggcaacttcagcgacatcagctggccctgcaacagcagcgactgcatcgtggtggacaccgtgatgtgccccaacatgcccaacaagagcgtgctgctgtacaccctgagcttcatctacatcttcatcttcgtgatcggcatgatcgccaacagcgtggtggtgtgggtgaacatccaggccaagaccaccggctacgacacccactgctacatcctgaacctggccatcgccgacctgtgggtggtgctgaccatccccgtgtgggtggtgagcctggtgcagcacaaccagtggcccatgggcgagctgacctgcaaggtgacccacctgatcttcagcatcaacctgttcggcagcatcttcttcctgacctgcatgagcgtggacagatacctgagcatcacctacttcaccaacacccccagcagcagaaagaagatggtgagaagagtggtgtgcatcctggtgtggctgctggccttctgcgtgagcctgcccgacacctactacctgaagaccgtgaccagcgccagcaacaacgagacctactgcagaagcttctaccccgagcacagcatcaaggagtggctgatcggctag

SEQ ID NO: 266963 - protein, 429 aa, Artificial Sequence
  derived and/or modified sequence
MASLWESPQQCIILSPLSGWWFSIGISILTSSALVLKPQMLKGELQTRPSQRPSRKAFRRNNFEYTLEASKSLRQKPGDSTMTYLNKGQFYPITLKEVSSSEGIHHPISKVRSVIMVVFAEDKSREDQLRHWKYWHSRQHTAKQRCIDIADYKESFNTISNIEEIAYNAISFTWDINDEAKVFISVNCLSTDFSSQKGVKGLPLNIQVDTYSYNNRSNKPVHRAYCQIKVFCDKGAERKIRDEERKQSKRKVSDVKVPLLPSHKRMDITVFKPFIDLDTQPVLFIPDVHFANLQRGTHVLPIASEELEGEGSVLKRGPYGTEDDFAVPPSTKLARIEEPKRVLLYVRKESEEVFDALMLKTPSLKGLMEAISDKYDVPHDKIGKIFKKCKKGILVNMDDNIVKHYSNEDTFQLQIEEAGGSYKLTLTEI

SEQ ID NO: 266964 - DNA, 204 bp, Artificial Sequence
  derived and/or modified sequence
atgagaaagccccaggccggcaccggcgaagcggctcgcgatccttcactgagacccgctagaacggtgctcgttggagatcaggacgagtacactgcagccgaaaataaatcacctcgtggcacattatgccccaccggcgagcagagaattcacgcccgcgaagatgcttgcatattttcccgtctcttcagtgaaaaatag

SEQ ID NO: 266965 - DNA, 204 bp, Artificial Sequence
  derived and/or modified sequence
atgcggaagccccaggccggaacgggcgaagcagcccgagatccttccttaaggcccgcacggacagttttggtgggggatcaggacgagtacaccgcggctgaaaataagagtcctcgaggaaccttgtgccctaccggtgagcagaggattcatgcccgagaagatgcatgtatcttcagtaggctgttctccgagaagtag

SEQ ID NO: 266966 - DNA, 204 bp, Artificial Sequence
  derived and/or modified sequence
atgcggaaaccccaggctgggacaggagaagccgcgagggatccctctctcaggcccgcaaggacggtcctggtcggtgaccaggacgagtataccgccgctgagaataagagcccgcgcgggactttgtgtccaactggcgagcagagaattcacgcacgagaggatgcatgcatcttttcacgcctgttctcagaaaagtag

SEQ ID NO: 266967 - DNA, 204 bp, Artificial Sequence
  derived and/or modified sequence
atgcggaagccccaggccggcaccggcgaggccgcccgggacccctcgctgaggcccgcacggaccgtcctcgtgggcgaccaggacgagtatacggcggccgaaaacaagagccctagggggacattgtgccccaccggagagcagcgcattcacgccagagaagatgcctgtattttttctaggctgttctctgagaagtag

SEQ ID NO: 266968 - DNA, 204 bp, Artificial Sequence
  derived and/or modified sequence
atgagaaagccccaggccggaacgggagaagccgctagggatccaagcctgagacccgcaagaaccgtcttggtgggcgaccaggatgagtacacagctgctgagaataagagccccagaggcactctgtgtcctaccggggagcagaggatacacgctcgagaggacgcatgtatatttagcaggctctttagcgagaaatag

SEQ ID NO: 266969 - DNA, 204 bp, Artificial Sequence
  derived and/or modified sequence
atgcgtaaaccacaagccggaaccggtgaagcagctcgggacccatccctgaggcctgctcggaccgtgctagtcggagatcaggacgagtatacagccgcagagaacaaatcgccacgtggcacactgtgtcccacaggtgagcaacgcatccacgccagagaagatgcctgcatcttctcccgactgttttccgagaagtag

SEQ ID NO: 266970 - DNA, 1290 bp, Artificial Sequence
  derived and/or modified sequence
atggctagcctctgggaatccccccaacagtgtatcatcctcagccccctgtcaggatggtggttttccattgggatcagtattctgacaagcagcgccctggtactgaaaccccaaatgctgaaaggagaactccagaccagacccagccagcgcccctccagaaaggcctttagacgtaataactttgagtatacactcgaggctagcaagtcactgcgccagaagccaggagactctaccatgacatacctgaacaagggccagttctatcccattaccctaaaagaagtatcctcatctgaaggtattcaccacccaatttcaaaagtgagaagtgttattatggtcgtgttcgctgaagataagtcaagggaagaccaactgcgccactggaaatattggcatagtcggcagcacactgcgaagcagagatgtatcgacatcgcagattacaaagagagcttcaacaccattagtaacattgaggagatcgcctataacgccatctcatttacttgggatatcaatgacgaggcaaaggtctttattagcgtgaattgcctgtcaaccgactttagctcccaaaaaggagtgaaagggttgcctctgaacatacaggtggacacatacagctacaataaccgcagcaataagcctgtgcacagggcttactgccagattaaggttttttgcgataaaggcgccgagcgaaagattagggatgaggagcgcaagcaatccaagcgcaaggtctcagacgttaaggtgcccttgcttccctcgcataaaaggatggacatcacggtgttcaagccattcatcgacctcgacacccagcctgtgctgttcattcccgatgttcacttcgccaacctccagaggggaacacacgtgctaccaatagcctctgaggaactggagggcgagggatccgttctgaaacgaggaccctatggtacggaagatgactttgcggtgccccctagcactaagcttgccaggatcgaggaaccgaagagggtcctgttgtacgtcaggaaagaaagcgaagaagtctttgatgcccttatgttgaagacgccttctctgaaaggactgatggaagctatcagtgacaagtacgatgtgcctcatgataagattggaaagatcttcaagaagtgtaaaaagggtatactcgtcaacatggacgacaacatagtcaaacattactcaaacgaggataccttccagttacaaattgaggaggccggcggttcctataaactcactctgaccgaaatctag

SEQ ID NO: 266971 - DNA, 1290 bp, Artificial Sequence
  derived and/or modified sequence
atggccagcctgtgggagagcccccagcagtgcatcatcctgagccccctgagcggctggtggttcagcatcggcatcagcatcctgaccagcagcgccctggtgctgaagccccagatgctgaagggggagctgcagacccggcccagccagaggcccagcaggaaggccttcagaagaaacaactttgagtacaccctggaggccagcaagagcctgcggcagaagccaggggacagcaccatgacctacctgaacaagggccagttctaccccatcaccctgaaggaggtgagcagcagcgagggcatccaccaccccatcagcaaggtgcgcagcgtcatcatggtggtgtttgctgaggacaagagccgggaggaccagctgcggcactggaagtactggcacagccggcagcacacagccaagcagcgctgcattgatattgctgactacaaggagagcttcaacaccatcagcaacatcgaggagatcgcctacaatgccatctccttcacctgggacatcaatgatgaggccaaggtgttcatctctgtgaactgcctgagcacagacttcagcagccagaagggcgtgaagggcctgcccctgaacatccaggtggacacctacagctacaacaacagaagcaacaagcctgtgcaccgggcctactgccagatcaaggtgttctgtgacaagggagctgagaggaagatcagagatgaggagaggaagcagagcaagaggaaggtgtctgatgtgaaggtgcccctgctgcccagccacaagaggatggacatcaccgtcttcaagcccttcatcgacctggacacccagcctgtgctcttcatcccagatgtgcactttgccaacctgcagaggggcacccacgtgctgcccatcgccagcgaggagctggagggggagggctctgtgctgaagaggggcccctatggaacagaagatgactttgctgtgccccccagcaccaagctggcccgcatcgaggagcccaagagggtgctgctgtatgtgaggaaggagagcgaggaggtgtttgatgccctgatgctgaagacccccagcctgaagggcctgatggaggccatcagtgacaagtatgatgtgccccatgacaagattggcaagatcttcaagaagtgcaagaagggcatcctggtgaacatggatgacaacatcgtgaagcactacagcaatgaagacaccttccagctgcagatcgaggaggccggcggcagctacaagctgaccctgacagagatctag

SEQ ID NO: 266972 - DNA, 1290 bp, Artificial Sequence
  derived and/or modified sequence
atggccagcctgtgggagagcccccagcagtgcatcatcctgagcccactgtccggatggtggttcagtataggaatctccatcctcacgtcttccgccctagtcctcaagcctcagatgctgaaaggcgagttgcagactaggccttcgcaacgtccgtcccgcaaggcgtttagacgtaacaattttgagtacactctggaggcgtccaagtctcttcgtcaaaagcctggggattctactatgacgtacctgaataaaggacaattttatccaatcactctcaaggaagtgtccagcagcgaaggaattcaccacccaatcagcaaagtaaggagtgtgatcatggtggtgtttgcggaggacaaaagccgtgaagaccagcttagacattggaaatactggcactcccggcaacataccgcaaaacagagatgtattgacattgccgactacaaagagagtttcaacaccatctcaaacattgaggaaatagcctacaacgctatctccttcacttgggacatcaacgacgaagcgaaggtattcatatccgtcaattgcttatccactgatttcagttcccagaagggtgttaaggggctccccttgaatatccaagtcgatacctatagctacaataaccggtccaataaacccgtacatcgagcctactgtcagattaaggtcttttgcgataaaggcgcagaacggaaaatcagggacgaagagcgcaaacagtccaagagaaaagtgagtgacgtcaaggttcctctcctccctagccacaaacggatggatattaccgtcttcaaaccttttatcgacctcgacacccagccagtgctctttatccccgatgtgcattttgccaatcttcagcgcggtactcacgtcctccccatcgctagcgaggagttggagggcgaaggtagcgtactgaaaagaggaccttatggcacagaggatgattttgccgtgccaccttccaccaaactggcacgcatcgaagagccgaagagggtgttgctctatgttagaaaggagagtgaggaggtgttcgacgctttgatgttaaaaaccccatcactgaagggccttatggaagctattagtgataaatacgatgtgccacatgataagatcggaaagatcttcaagaaatgtaagaaaggaattctggtaaacatggatgataacatcgtgaaacactacagcaacgaagacacgttccagcttcagattgaggaggcgggcggcagctacaagttgacactcaccgaaatatag

SEQ ID NO: 266973 - DNA, 1290 bp, Artificial Sequence
  derived and/or modified sequence
atggcaagcctctgggagagccctcagcagtgcatcatcctgtcccctctttcaggttggtggttttcaatcggaattagcatcttaacatcatccgcccttgtactgaaacctcaaatgctcaagggggagctgcagacgcgtccatcacagcggccatcgcggaaggcttttaggcggaataatttcgagtatactcttgaagccagtaaatccctgcgacagaagccaggggactcaaccatgacatacctcaataaaggccagttttatccaattactctaaaggaagtttcttcttctgaaggtatccaccatccaattagcaaggtgcgctctgtgatcatggtggtttttgccgaggacaaatcacgagaggatcaactgcgccactggaagtattggcactcccggcaacacactgcaaaacagcgctgcatcgatatcgccgactacaaggagtcctttaacaccatctcaaatatcgaggaaatcgcctacaacgctatttcttttacttgggacataaatgacgaggcaaaagtgttcatttctgttaactgtctcagcactgatttttcatcccagaagggtgtgaagggccttcccctgaatattcaggttgatacctattcctacaacaaccgatctaataagcctgtgcatagggcatactgccagatcaaggtgttctgcgacaagggagccgaacgtaagatccgggatgaggagcgaaagcagagtaagcgcaaggtgtccgatgtgaaggtgcctctgcttccgtctcacaagcggatggatattacggtctttaagccatttatcgatctggatacccagccagtgctgttcatacccgatgtgcattttgcaaaccttcaaagaggcactcatgtgctgcctattgccagcgaggagcttgagggtgagggcagcgtcctgaagagaggaccatatggcactgaggacgatttcgccgttccaccatccactaagttggcaaggattgaagagcccaagcgggtgctcctgtacgtgagaaaagagagcgaagaggtgtttgatgcacttatgcttaaaaccccctctctcaaggggctcatggaggccatttcagataaatatgacgtgccgcatgataagatcgggaaaatctttaaaaagtgtaagaaaggaattctcgtgaatatggacgacaatatcgtaaaacattattctaatgaggataccttccagttgcagatcgaggaggccggtggatcatataagcttacattgaccgaaatctag

SEQ ID NO: 266974 - DNA, 1290 bp, Artificial Sequence
  derived and/or modified sequence
atggccagcctgtgggagagcccccagcagtgcatcatcctgagccccctgagcggctggtggttcagcatcggcatcagcatcctgaccagcagcgccctggtgctgaagccccagatgctgaagggcgagctgcagaccagacccagccagagacccagcagaaaggccttcagaagaaacaacttcgagtacaccctggaggccagcaagagcctgagacagaagcccggcgacagcaccatgacctacctgaacaagggccagttctaccccatcaccctgaaggaggtgagcagcagcgagggcatccaccaccccatcagcaaggtgagaagcgtgatcatggtggtgttcgccgaggacaagagcagagaggaccagctgagacactggaagtactggcacagcagacagcacaccgccaagcagagatgcatcgacatcgccgactacaaggagagcttcaacaccatcagcaacatcgaggagatcgcctacaacgccatcagcttcacctgggacatcaacgacgaggccaaggtgttcatcagcgtgaactgcctgagcaccgacttcagcagccagaagggcgtgaagggcctgcccctgaacatccaggtggacacctacagctacaacaacagaagcaacaagcccgtgcacagagcctactgccagatcaaggtgttctgcgacaagggcgccgagagaaagatcagagacgaggagagaaagcagagcaagagaaaggtgagcgacgtgaaggtgcccctgctgcccagccacaagagaatggacatcaccgtgttcaagcccttcatcgacctggacacccagcccgtgctgttcatccccgacgtgcacttcgccaacctgcagagaggcacccacgtgctgcccatcgccagcgaggagctggagggcgagggcagcgtgctgaagagaggcccctacggcaccgaggacgacttcgccgtgccccccagcaccaagctggccagaatcgaggagcccaagagagtgctgctgtacgtgagaaaggagagcgaggaggtgttcgacgccctgatgctgaagacccccagcctgaagggcctgatggaggccatcagcgacaagtacgacgtgccccacgacaagatcggcaagatcttcaagaagtgcaagaagggcatcctggtgaacatggacgacaacatcgtgaagcactacagcaacgaggacaccttccagctgcagatcgaggaggccggcggcagctacaagctgaccctgaccgagatctag

SEQ ID NO: 266975 - DNA, 1488 bp, Artificial Sequence
  derived and/or modified sequence
atggatatttgtgagagcatcttggagcgtaaacgtcacgacagtgaacggtctacatgttctatattggaacagaccgacatggaggctgttgaagctttggtgtgcatgagctcttggggtcagaggagccaaaagggcgacctccttcggatccgtccgctcacgcccgtttctgattctggcgatgtcacaactactgtgcacatggacgctgcgaccccggaattgcccaaagatttccatagcctcagtacactttgcatcacacccccccaatcccctgatctggtcgagccatccactcgcacccctgtgagcccacaggttactgattctaaggcctgcactgctacggacgtgctccaaagttctgctgttgtggcacgagcgctttcaggcggcgccgaacggggattactgggactggagccagtgccctcttccccatgccgtgccaagggaaccagtgtgatcaggcatactggcgagagccctgctgcttgttttcctacaattcagacacccgactgtaggctgtccgactctcgcgagggcgaggagcagcttctagggcactttgagaccttgcaggatacgcacctgacagactcactattgagtacgaatctcgtatcctgccagccatgccttcacaaaagtgggggtctcctgctgaccgacaagggacaacaagccgggtggccgggggcagtacaaacatgttccccaaagaactatgagaacgacttgcctcggaaaacaacacccttaatttcagtatccgtgcctgccccacctgtgctgtgtcagatgattcctgtaacaggtcaatctagtatgctgccagccttcttaaaacctcctccacagctgtcagtcggtacagtccgacccattctcgcacaggcagcccccgccccgcaacctgtgtttgtcggaccagcggtaccccagggtgccgtcatgttagtacttcctcagggagccctgccaccccctgctccatgcgcggcaaatgtgatggctgccgggaacacaaagctcctgccactagcgcccgctccagttttcattacatcctctcagaactgtgtcccgcaggtggacttctcccggagacgcaattatgtctgcagctttcccggctgtcgcaagacgtattttaaatctagccacctgaaagcacacctgaggacccatacaggcgaaaagccctttaactgctcatgggacgggtgcgacaagaagtttgctcggtcagacgagctcagcagacaccgcaggacacacaccggggagaaaaaattcgtgtgccccgtttgtgaccgccgattcatgagaagcgaccacctcacaaagcacgctcggaggcacatgacgacaaaaaaaatccccggctggcaagctgaggttggaaagctgaatcgaatcgccagcgccgagtcacccggatcccctctcgtgagcatgcccgccagtgcctag

SEQ ID NO: 266976 - DNA, 1488 bp, Artificial Sequence
  derived and/or modified sequence
atggatatttgtgaatcaatcctggaaagaaagcggcatgattctgaacgatcaacatgtagcattcttgagcagacagatatggaagccgtggaggccctggtgtgcatgagttcttgggggcagagatcacagaagggtgacctgctccgcattcggccccttacgcctgttagcgacagtggggacgtcacaactaccgtccacatggatgccgcaactccagaattgccaaaggattttcatagcctctccacactgtgtatcacgccgccccagagtccagacctagtggaaccctccacacgcacacctgtgtccccccaggttaccgacagcaaggcttgcacagctactgatgtcctgcagtcttccgccgtggttgccagagctcttagcggcggcgccgagagaggcctgttgggcctcgagcctgtgcccagttcaccttgccgtgctaaaggaacctcggtcattcgccatactggcgaaagccctgcggcatgttttcccacaattcagacccctgactgtagattatcagactcccgcgaaggagaagagcagctcctgggccattttgaaacccttcaggacacgcaccttactgactcactcctctcaaccaacctggtctcttgccagccctgcctgcacaagtcaggcggcttgctcctcaccgacaaggggcagcaagcgggatggcctggtgccgtgcagacctgctcccccaagaattacgagaacgacctaccgaggaaaactaccccgctgataagtgtcagcgttcccgccccccctgtgctctgtcagatgatccctgtgacaggccaatccagtatgctccccgcctttctgaaacctcctcctcaactatcggtgggcactgtacgaccaatacttgcacaggccgctcccgccccacaacctgtgtttgttggccctgcggtaccacagggagccgtaatgctcgtcctcccccaaggggccttaccaccccccgctccatgtgctgctaacgtcatggccgctggaaacaccaaactcctaccgttagcccctgctcctgtttttataaccagttctcagaactgtgtccctcaggtcgacttttctcgtaggagaaactatgtgtgttcattcccaggctgcagaaagacctattttaaatctagtcacctgaaagcccacctgcgcactcataccggcgagaaaccattcaattgctcctgggacggttgcgataagaagttcgcaagatccgacgagctgagccggcatcggagaactcacaccggggaaaagaaatttgtctgtccagtgtgcgatcggcgatttatgcgttcagaccatctgactaaacatgcacgtaggcatatgacaaccaagaagatccccggctggcaggccgaggttgggaagttgaacaggatcgcctcagccgaatcacctggatctcctttagtgtcaatgccggcctcagcgtag

SEQ ID NO: 266977 - DNA, 1488 bp, Artificial Sequence
  derived and/or modified sequence
atggacatctgtgagagcatcctggagaggaagagacatgattctgagaggagcacctgcagcatcctggagcagacagacatggaggccgtggaggccctggtgtgcatgagctcctggggccagaggagccagaagggggacctgctgcgcatccggcccctgacccctgtgtctgattctggagatgtgaccaccaccgtgcacatggatgctgccaccccagagctgcccaaggacttccacagcctgagcaccctgtgcatcaccccaccccagagcccagacctggtggagcccagcaccaggacccctgtgagcccccaggtgacagacagcaaggcctgcacagccacagatgtgctgcagagcagcgctgtggtggcccgggccctgtctggaggagctgagcggggcctgctgggcctggagcctgtgcccagcagcccctgccgggccaagggcaccagcgtcatccgccacactggagagagccctgctgcctgcttccccaccatccagaccccagactgccgcctgagtgacagccgggagggggaggagcagctgctgggccactttgagaccctgcaggacacccacctgacagacagcctgctgagcaccaacctggtgtcctgccagccctgcctgcacaagagcggcggcctgctgctgacagacaagggccagcaggccggctggccaggagctgtgcagacctgcagccccaagaactatgaaaatgacctgcccaggaagaccacccccctcatctctgtgtctgtgcctgcccctcctgtgctgtgccagatgatccctgtgacaggccagagctccatgctgcctgccttcctgaagcccccaccccagctgtctgtgggcaccgtgcggcccatcctggcccaggccgccccagccccccagcctgtgtttgtgggccctgctgtgccccagggcgctgtgatgctggtgctgccccagggcgccctgcccccaccagccccctgtgccgccaacgtgatggccgccggcaacaccaagctgctgcccctggccccagcccctgtgttcatcaccagcagccagaactgtgtgccccaggtggacttcagcagaagaagaaattatgtgtgcagcttccctggctgcaggaagacctacttcaagagcagccacctgaaggcccacctgcggacccacactggagagaagcccttcaactgctcctgggatggctgtgacaagaagtttgcccggagtgatgagctgagccgccacaggaggacccacactggagagaagaagtttgtgtgccctgtgtgtgaccggcgcttcatgagaagtgaccacctgaccaagcacgcccggcggcacatgaccaccaagaagatccctggctggcaggccgaggtgggcaagctgaaccgcatcgccagcgctgagagccctggcagccccctggtgtccatgcctgccagcgcctag

SEQ ID NO: 266978 - DNA, 1488 bp, Artificial Sequence
  derived and/or modified sequence
atggacatctgcgagagcatcctggagcggaagcggcacgacagcgagcgtagcacttgtagtattttggaacagactgacatggaagccgttgaggctttagtctgcatgagttcatgggggcagcgcagccagaagggcgacctactgaggattagacctcttacaccggttagcgactcgggggatgtgacaacaaccgtacacatggacgctgccacccccgagctgcccaaagattttcacagtctcagcacactgtgtatcactcctccacagagccccgacctggtggaaccgtccacccggacaccggtgtcccctcaggtgaccgacagtaaagcctgcaccgccactgatgtgcttcagtccagtgccgtggtcgcacgggcattgagtggaggggccgaacgcgggctccttggcctggaacccgttccctcaagcccatgtagggctaagggcacgagcgtcattaggcacaccggcgaatctccagctgcttgttttcctaccatccagaccccagactgccggttgtcagactcgagagaaggtgaagagcagttgctagggcactttgaaactctgcaggacacccacttaacagactccctgctgtccaccaacttggtctcttgccagccatgtctgcataagtccgggggcctgctcctgacggataaagggcagcaggcgggttggcccggagccgttcagacatgttctccgaagaactatgagaacgatcttccacgcaagacaacacccctgatatcagtctccgttcctgctcctcccgttctatgtcaaatgatccctgtgaccgggcagtcctcaatgcttcccgccttcctcaagccccccccccagctctctgtgggcactgtaaggccaatcctcgcccaagccgcacccgcccctcagcctgtctttgtgggtcccgccgtgcctcaaggtgcggtcatgctggttcttcctcagggtgcgttgcccccccctgccccatgtgctgccaacgtcatggccgcagggaacacaaagctccttccccttgcaccggctcccgtgtttattactagttcccagaactgcgtgccccaggtcgacttctcccggaggcgcaattacgtctgcagtttcccggggtgtaggaagacgtattttaaaagcagtcatttaaaggcacacttaaggacacacacaggagagaagcctttcaactgctcctgggatggttgcgataagaagttcgcccggagcgacgaactgagccgacacaggcggactcatacaggtgaaaagaagttcgtgtgtcctgtttgcgacaggcggtttatgagatcagatcacctcacaaagcacgcacgacgacacatgaccacaaagaaaatacctggatggcaggcagaagtggggaaactgaatcgaatcgcctctgctgagagcccaggaagtccactcgtgtctatgccagcctcagcctag

SEQ ID NO: 266979 - DNA, 1488 bp, Artificial Sequence
  derived and/or modified sequence
atggacatctgcgagagcatcctggagcggaagcggcacgacagcgagaggtccacgtgctccatcttagaacagaccgatatggaggcagtggaggcgcttgtttgcatgtcatcctggggccagcggtcacaaaaaggcgatctgttaagaattagacccctgacacccgtgtctgacagcggagacgtcacaactactgtacatatggacgccgctacccccgagcttcctaaggatttccatagtctcagtacattgtgtatcacacctccacagtcacctgatttagtggaaccatccactaggaccccagtgtcccctcaagtaacggacagtaaagcttgcaccgccacagacgtcctccagtcgagcgcagttgtggcccgcgccttgagcggaggcgccgagcgcggtttgctgggcctagagcctgtcccatcgagcccctgcagagccaagggcacatccgttattcgccacacaggtgaatcgcccgccgcgtgcttcccgactattcagaccccagattgtaggctaagcgacagtagagaaggggaagaacagctgctggggcatttcgagactctgcaggatacccatctcactgactccctcctctcaacaaaccttgttagctgtcaaccttgcctccacaagagtggcggactgttacttaccgacaaaggtcagcaagccggttggccaggagcagtgcagacttgctctcctaagaactacgaaaatgaccttccacggaaaactaccccactgatctcggtgtccgtacccgctcctccggtcctctgtcaaatgatcccagtgaccggccagagctccatgctcccagccttccttaaacctcctccgcagctcagcgtgggcactgttcgcccaattctcgcccaggcagcccctgcaccacagcccgtatttgtgggccccgctgtccctcaaggcgcggtgatgctcgtactgccacagggggccctcccgccaccagctccttgtgctgccaacgtgatggcagccggtaatacaaagttgttaccccttgctcctgcacccgtgtttatcacgagctcccaaaattgcgtgccccaagtcgatttctcccgcaggcgtaactacgtgtgtagcttccccggctgcaggaaaacctatttcaagtccagtcacctgaaagctcatctcagaacccacaccggggagaaacctttcaattgctcttgggacggctgcgataaaaagttcgcaaggtctgatgagctctctagacaccgccgaactcacactggggaaaaaaagttcgtgtgcccagtgtgtgataggcgttttatgcgctctgatcacctaaccaagcacgctaggcgccatatgaccaccaaaaagatccccggatggcaggcagaggtgggcaagctcaataggatcgcctcggcagaatccccgggcagtccattagtgagtatgcccgcgtccgcctag

SEQ ID NO: 266980 - DNA, 1488 bp, Artificial Sequence
  derived and/or modified sequence
atggacatctgcgaaagcatacttgagagaaaaagacatgattccgaaaggtctacttgctccatcctggaacagactgacatggaagcggtggaggcactggtttgcatgagctcatggggccagagatctcagaaaggtgacttgctgcggatcaggcccttgaccccggtttccgactccggagacgtcactaccactgtgcatatggacgcagctacacctgaactgcccaaggacttccatagccttagtactctatgtatcacgccccctcagtcccctgatttagtggagccatcaacaaggacaccagtgtcccctcaggtgaccgattccaaagcatgcaccgctacagacgtgttgcaaagctccgccgtagtagctcgggctctgagcggtggagcagaacgtggtctcctaggattggagcctgttcccagcagcccttgccgggcaaagggcacatcggtaataaggcacactggcgagtccccggctgcctgttttcctaccattcaaactcccgactgtcgccttagtgattctagagaaggtgaggaacagcttctagggcacttcgagaccctgcaggatactcacctgactgatagtctgctcagtaccaacctcgtgtcatgtcagccatgcttacacaagagtggcggactactgttaacagacaagggccagcaggcgggttggccaggagccgtgcagacctgcagccctaaaaactacgagaacgacctgcccagaaaaacaacaccacttatctccgtgtctgtgcctgcgccacccgtactgtgtcagatgattccagtgaccgggcaaagtagcatgctgccggctttcctcaagcccccacctcagttgagcgtgggtaccgtgcgacccatactggcccaggcagcacctgccccacagccagtcttcgtgggcccagccgtgccacagggagccgtgatgctggttctcccacagggcgcacttccaccacctgcaccctgcgccgctaatgttatggctgcagggaatacaaaactcctgcctctggcgcctgcgcctgtgtttatcacctcttctcaaaattgtgtccctcaggtggatttcagtcgacggaggaattacgtctgctccttcccagggtgccgcaagacctatttcaagagctcccacttgaaggcacatctgagaacacacactggagagaagccatttaattgttcttgggatggctgcgacaagaagttcgctagaagtgacgagttgtcccgccacagacgaactcacaccggggagaaaaagttcgtgtgccctgtatgcgatagaaggtttatgaggtctgatcatctaacaaaacacgcgagaaggcacatgaccacaaaaaaaatacctggctggcaggcggaagtaggtaaactgaatcgtatcgctagcgctgagagtccaggctcccccctcgtatccatgcccgctagcgcttag

SEQ ID NO: 266981 - DNA, 1488 bp, Artificial Sequence
  derived and/or modified sequence
atggacatttgtgaaagcatcttggagcgcaaaaggcacgactctgagagatcgacttgtagcattctggaacagaccgacatggaggccgtggaagcacttgtgtgcatgagctcctggggccagcggtcacagaagggagatttattaagaattcgacctctgacccccgtcagtgactcaggcgatgttaccacaacagtacacatggatgccgcaacaccggagcttcccaaggattttcattctttatccaccctgtgtattaccccacctcagagtcctgatctggtggagcctagcactcggactcctgtgtctccgcaggtcacggactcaaaagcctgcacagcaacagatgtactgcagtcctccgccgttgtggctcgggcactttccggcggagcggagagaggcctcttgggattggaacctgtcccatcaagcccttgtagggccaaggggaccagcgttattagacacacaggcgagagtccggctgcctgcttccccacgatacaaacccccgactgcaggctgtccgattcccgggagggggaggagcagctgctgggacacttcgaaacccttcaagatacacatcttaccgattccctgttgtccacaaacctagtaagttgccaaccctgtcttcataaaagtggtggactcctcctaaccgataaggggcagcaggcgggatggccgggagctgttcagacatgcagtcctaagaattacgaaaatgatttgcctcgtaagaccactcccctcatttcagtgtccgtacctgcacctcccgtgctatgtcaaatgattccagtgacagggcaatccagtatgctcccggcattcctgaagccaccgccacagctgtcagtggggaccgtgcgtcccatcctggcacaggctgcacccgcaccccagcctgtatttgtcggcccagcagtgccgcagggggcagtaatgctggtcctacctcagggggcactgccccctccagctccttgtgctgccaacgtaatggctgctggcaacactaagctgctgccattagcccctgcgcctgtgtttataacaagctctcaaaattgtgtaccacaagtggattttagtcgcaggagaaattacgtgtgtagctttcctggctgccggaagacctactttaaaagtagtcacctgaaggcccatctccgcacccataccggcgaaaaaccgtttaattgtagctgggacggctgcgacaaaaaattcgccaggtcagatgagctatctaggcatcgacgtacacacactggcgagaagaaatttgtgtgccccgtgtgtgacaggcgcttcatgcgtagcgaccacctgacaaagcacgctcgcaggcacatgacaacaaaaaagattcctgggtggcaggcagaagtgggtaagctaaaccgcatcgcttcagccgagtcacctggctcgcctctagtgagtatgcctgcctctgcttag

SEQ ID NO: 266982 - DNA, 1488 bp, Artificial Sequence
  derived and/or modified sequence
atggacatctgcgagagcatcctggagagaaagagacacgacagcgagagaagcacctgcagcatcctggagcagaccgacatggaggccgtggaggccctggtgtgcatgagcagctggggccagagaagccagaagggcgacctgctgagaatcagacccctgacccccgtgagcgacagcggcgacgtgaccaccaccgtgcacatggacgccgccacccccgagctgcccaaggacttccacagcctgagcaccctgtgcatcacccccccccagagccccgacctggtggagcccagcaccagaacccccgtgagcccccaggtgaccgacagcaaggcctgcaccgccaccgacgtgctgcagagcagcgccgtggtggccagagccctgagcggcggcgccgagagaggcctgctgggcctggagcccgtgcccagcagcccctgcagagccaagggcaccagcgtgatcagacacaccggcgagagccccgccgcctgcttccccaccatccagacccccgactgcagactgagcgacagcagagagggcgaggagcagctgctgggccacttcgagaccctgcaggacacccacctgaccgacagcctgctgagcaccaacctggtgagctgccagccctgcctgcacaagagcggcggcctgctgctgaccgacaagggccagcaggccggctggcccggcgccgtgcagacctgcagccccaagaactacgagaacgacctgcccagaaagaccacccccctgatcagcgtgagcgtgcccgccccccccgtgctgtgccagatgatccccgtgaccggccagagcagcatgctgcccgccttcctgaagccccccccccagctgagcgtgggcaccgtgagacccatcctggcccaggccgcccccgccccccagcccgtgttcgtgggccccgccgtgccccagggcgccgtgatgctggtgctgccccagggcgccctgcccccccccgccccctgcgccgccaacgtgatggccgccggcaacaccaagctgctgcccctggcccccgcccccgtgttcatcaccagcagccagaactgcgtgccccaggtggacttcagcagaagaagaaactacgtgtgcagcttccccggctgcagaaagacctacttcaagagcagccacctgaaggcccacctgagaacccacaccggcgagaagcccttcaactgcagctgggacggctgcgacaagaagttcgccagaagcgacgagctgagcagacacagaagaacccacaccggcgagaagaagttcgtgtgccccgtgtgcgacagaagattcatgagaagcgaccacctgaccaagcacgccagaagacacatgaccaccaagaagatccccggctggcaggccgaggtgggcaagctgaacagaatcgccagcgccgagagccccggcagccccctggtgagcatgcccgccagcgcctag

SEQ ID NO: 266983 - protein, 1949 aa, Artificial Sequence
  derived and/or modified sequence
MGNSYAGQLKTTRFEEVLHNSIEASLRSNNLVPRPIFSQLYLEAEQQLAALEGGSRVDNEEEEEEGEGGLETNGPPNPFQLHPLPEGCCTTDGFCQAGKDLRLVSISNEPMDVPAGFLLVGVKSPSLPDHLLVCAVDKRFLPDDNGHNALLGFSGNCVGCGKKGFCYFTEFSNHINLKLTTQPKKQKHLKYYLVRNAQGTLTKGPLICWKGSEFRSRQIPASTCSSSLFPALESTAAFPSEPVPGTNPSILMGAQQAGPASDHPSLNAAMGPAVFNGKDSPKCQQLAKNNLLALPRPSALGILSNSGPPKKRHKGWSPESPSAPDGGCPQGGGNRAKYESAGMSCVPQVGLVGPASVTFPVVASGEPVSVPDNLLKICKAKPVIFKGHGNFPYLCGNLNDVVVSPLLYTCYQNSQSVSRAYEQYGASAIQPISEEMQLLLTVYYLVQLAADQVPLMEDLEQIFLRSWRESHLTEIRQYQQAPPQPFPPAPSAAAPVTSAQLPWLASLAASSCNDSVHVIECAYSLAEGLSEMFRLLVEGKLAKTNYVVIICACRSAAIDSCIAVTGKYQARILSESLLTPAEYQKEVNYELVTGKVDSLGAFFSTLCPEGDIDILLDKFHQENQGHISSSLAASSVTKAASLDVSGTPVCTSYNLEPHSIRPFQLAVAQKLLSHVCSIADSSTQNLDLGSFEKVDFLICIPPSEVTYQQTLLHVWHSGVLLELGLKKEHMTKQRVEQYVLKLDTEAQTKFKAFLQNSFQNPHTLFVLIHDHAHWDLVSSTVHNLYSQSDPSVGLVDRLLNCREVKEAPNIVTLHVTSFPYALQTQHTLISPYNEIHWPASCSNGVDLYHENKKYFGLSEFIESTLSGHSLPLLRYDSSFEAMVTALGKRFPRLHSAVIRTFVLVQHYAAALMAVSGLPQMKNYTSVETLEITQNLLNSPKQCPCGHGLMVLLRVPCSPLAVVAYERLAHVRARLALEEHFEIILGSPSSGVTVGKHFVKQLRMWQKIEDVEWRPQTYLELEGLPCILIFSGMDPHGESLPRSLRYCDLRLINSSCLVRTALEQELGLAAYFVSNEVPLEKGARNEALESDAEKLSSTDNEDEELGTEGSTSEKRSPMKRERSRSHDSASSSLSSKASGSALGGESSAQPTALPQGEHARSPQPRGPAEEGRAPGEKQRPRASQGPPSAISRHSPGPTPQPDCSLRTGQRSVQVSVTSSCSQLSSSSGSSSSSVAPAAGTWVLQASQCSLTKACRQPPIVFLPKLVYDMVVSTDSSGLPKAASLLPSPSVMWASSFRPLLSKTMTSTEQSLYYRQWTVPRPSHMDYGNRAEGRVDGFHPRRLLLSGPPQIGKTGAYLQFLSVLSRMLVRLTEVDVYDEEEININLREESDWHYLQLSDPWPDLELFKKLPFDYIIHDPKYEDASLICSHYQGIKSEDRGMSRKPEDLYVRRQTARMRLSKYAAYNTYHHCEQCHQYMGFHPRYQLYESTLHAFAFSYSMLGEEIQLHFIIPKSKEHHFVFSQPGGQLESMRLPLVTDKSHEYIKSPTFTPTTGRHEHGLFNLYHAMDGASHLHVLVVKEYEMAIYKKYWPNHIMLVLPSIFNSAGVGAAHFLIKELSYHNLELERNRQEELGIKPQDIWPFIVISDDSCVMWNVVDVNSAGERSREFSWSERNVSLKHIMQHIEAAPDIMHYALLGLRKWSSKTRASEVQEPFSRCHVHNFIILNVDLTQNVQYNQNRFLCDDVDFNLRVHSAGLLLCRFNRFSVMKKQIVVGGHRSFHITSKVSDNSAAVVPAQYICAPDSKHTFLAAPAQLLLEKFLQHHSHLFFPLSLKNHDHPVLSVDCYLNLGSQISVCYVSSRPHSLNISCSDLLFSGLLLYLCDSFVGASFLKKFHFLKGATLCVICQDRSSLRQTVVRLELEDEWQFRLRDEFQTANAREDRPLFFLTGRHI

SEQ ID NO: 266984 - DNA, 8482 bp, Artificial Sequence
  derived and/or modified sequence
aaataaagttttttcaatggaaggcttgcagctcttgaggacctgccaaatggaagaaggacagagacctggagccctatggaaagttctgacaccatgtgtggaaggacatggcttttaacacgtgtggtgactggagtagctgcagctgaggacagccaccctttcttcgtctctgctgagcgaaggctacacggcccttcctccttgcagctgtttcaccttctaccttgcgtggagccaggcttttgcaccgaatctgagatgccattttaaacagaagactccatcctcttgaagatgggaaattcttacgctggacagctgaagacgacacgctttgaagaggtcttgcacaattccatcgaggcatccctgcggtccaacaacctggtgcccaggcccatcttttcccagctgtacctggaagctgagcagcagcttgccgctctagaaggtggtagccgagtggacaatgaggaagaggaagaagagggagaaggagggctggaaacaaatggccccccaaaccctttccagctgcaccctctgcctgaaggatgctgtaccacagacgggttttgccaggccgggaaggacctgcgccttgtctccatttccaacgagcccatggatgtccctgcgggctttctcctcgtgggggtcaagtcccccagcctgccggaccatctcctggtgtgcgccgttgacaagaggttcttgccagatgacaatggccacaatgctcttcttggtttctctgggaattgtgttggctgtggaaagaaaggcttctgttacttcacggaattctccaatcatataaatctgaaactgaccactcaacccaagaagcagaaacacttgaagtattacctggtccgtaatgcacaagggactctaaccaaaggacctttaatctgttggaaaggctcagagtttagaagccggcagatccccgccagtacttgttccagttccctcttcccagccctggagagcacggctgccttccccagcgagcccgttcctgggacgaaccccagcatcctgatgggagctcagcaggcaggaccagcttctgatcacccctcactaaacgcagcaatgggtccggctgttttcaacggcaaagattccccgaagtgccaacaactggcaaagaataacctgttggccctgccgcgaccatcggctttaggtatcttgtcaaactccgggccccccaaaaaacgccacaaagggtggtctccagaatctccatcagctccagatggtggctgcccccaaggtggtgggaacagagctaagtatgagagcgcaggcatgtcctgcgtgccgcaggttggcttggtgggaccagcttcagtcacctttccagtggtggcctctggagaaccagtgtctgttcctgacaacttgctgaaaatatgcaaggccaagccagtgatatttaaaggccatgggaacttcccttacctctgtgggaacctgaatgacgtcgtggtcagccccctcttgtacacgtgctaccagaattcccagtctgtctcacgggcatacgagcagtacggcgcctctgccatccagcccatctccgaggagatgcagctcctgcttaccgtctactacctggtccagctggccgcggaccaggtgcccttgatggaggacctggagcagatcttcctgcgctcttggcgcgagtcgcacctgaccgagatccggcagtaccagcaggcgccgccgcagcccttcccgcccgcgcccagcgccgcggcacccgtgacctccgcgcagctgccctggctggccagcctggccgccagctcctgcaacgacagcgtgcacgtcatcgagtgtgcttactccctggccgagggcctctccgagatgttccggctgttggtcgagggcaagcttgccaagaccaactacgtggtcatcatctgcgcctgccgcagcgcggccatcgactcctgcatcgccgtcaccggaaaataccaagcccggattctttccgagagccttctcactcctgcggagtaccagaaggaagtcaattacgagctggttacggggaaggtagactcgctgggggccttctttagcaccctctgtccagagggtgacattgacattttgctggacaaatttcaccaggaaaatcaaggccatatttcttcctcactcgctgcctcttctgtcactaaagcagcatccctggatgtcagtgggacaccggtgtgcacaagttacaatctggagccacacagcatccggcccttccagctggcagtagcgcagaagctcctctcccatgtgtgttccattgcggattccagcacccaaaatctggacctgggatcctttgagaaggtggactttctcatttgcattcccccctcagaagtgacctaccagcagactctgctccatgtgtggcattcaggggttttgctggagcttggtctgaagaaagagcacatgacgaagcagagggtggaacagtatgttctgaagctagacacggaggcacagacaaaatttaaggcttttctgcaaaactccttccagaacccgcatacactttttgtcctaatccatgaccatgcgcactgggatcttgtgagtagcactgttcataacctctattctcaaagtgacccgtcggtgggattggtggaccgattgctcaactgcagggaggtgaaggaggcccccaacattgtgacacttcacgtgacctccttcccgtatgcactgcagacacagcacaccctcatcagcccctacaacgagatccactggcctgcctcctgcagtaatggagtggacttatatcatgaaaataagaagtacttcgggctgtcggagtttattgaatccaccctttcaggacacagcctccccttgctcagatacgatagctcctttgaggccatggtcactgcattaggaaaaaggttcccccgcctgcacagcgcggtgatcaggacctttgttctcgtgcagcactacgcggccgccctgatggccgtaagcggcctcccgcagatgaagaactacacgtcggtggagacgctggagatcacgcagaacctcctcaactccccgaagcagtgcccctgcggccacgggctcatggtcctgctgcgggtgccctgttcgcccctggcggtggtggcctatgagcggctggcccacgtgcgggcccggctggcgctggaggagcactttgagatcatcctgggcagtcccagctcaggcgtcaccgtggggaagcacttcgtaaagcagctcaggatgtggcagaaaattgaggatgtggagtggagaccccagacttacttggagctggagggtctgccttgcatcctgatcttcagtgggatggacccgcatggggagtccttgccgaggtctttgaggtactgtgacctgcgattgataaactcctcctgcttggtgagaacagccttggagcaggagctgggcctggctgcctactttgtgagcaacgaggttcccttggagaagggggctaggaacgaggccttggagagtgatgctgagaagctgagcagcacagacaacgaggatgaggagctggggacagaaggctctacctcggagaagagaagccccatgaaaagggagaggtcccgctcccacgactcagcatcctcatccctctcctccaaggcttccggttcagcgctcggtggcgagtcctcggctcagcccacagcactcccccagggagagcatgccaggtcgccccagccccgtggccccgcagaggagggcagagcccctggtgagaaacagaggccccgggcaagtcaggggccaccctcggccatcagcaggcacagtcccgggccgacgccccagcccgactgtagcctcaggaccggccagaggagcgtccaggtgtcggtcacctcgtcgtgctcccagctgtcctcctcctcgggctcatcctcctcatccgtggcgcccgctgccggcacgtgggtcctgcaggcctcccagtgctccttgaccaaggcctgccgccagccacccattgtcttcttgcccaagctcgtgtacgacatggttgtgtccactgacagcagtggcctgcccaaggccgcctccctcctgccctccccctcggtcatgtgggccagctctttccgccccctgctcagcaagaccatgacatccaccgagcagtccctctactaccggcagtggacggtgccccggcccagccacatggactacggcaaccgggccgagggccgcgtggacggcttccacccccgcaggctgctgctcagcggcccccctcagatcgggaagacaggtgcctacctgcagttcctcagtgtcctgtccaggatgcttgttcggctcacagaagtggatgtctatgacgaggaggagatcaatatcaacctcagagaagaatctgactggcattatctccagcttagcgacccctggccagacctggagctgttcaagaagttgccctttgactacatcattcacgacccgaagtatgaagatgccagcctgatttgttcgcactatcagggtataaagagtgaagacagagggatgtcccggaagccggaggacctttatgtgcggcgtcagacggcacggatgagactgtccaagtacgcagcgtacaacacttaccaccactgtgagcagtgccaccagtacatgggcttccacccccgctaccagctgtatgagtccaccctgcacgcctttgccttctcttactccatgctaggagaggagatccagctgcacttcatcatccccaagtccaaggagcaccactttgtcttcagccaacctggaggccagctggagagcatgcgactacccctcgtgacagacaagagccatgaatatataaaaagtccgacattcactccaaccaccggccgtcacgaacatgggctctttaatctgtaccacgcaatggacggtgccagccatttgcacgtgctggttgtcaaggaatacgagatggcaatttataagaaatattggcccaaccacatcatgctggtgctccccagtatcttcaacagtgctggagttggtgctgctcatttcctcatcaaggagctgtcctaccataacctggagctcgagcggaaccggcaggaggagctgggaatcaagccgcaggacatctggcctttcattgtgatctctgatgactcctgcgtgatgtggaacgtggtggatgtcaactctgctggggagagaagcagggagttctcctggtcggaaaggaacgtgtctttgaagcacatcatgcagcacatcgaggcggcccccgacatcatgcactacgccctgctgggcctgcggaagtggtccagcaagacccgggccagcgaggtgcaagagcccttctcccgctgccacgtgcacaacttcatcatcctgaacgtggacctgacccagaacgtgcagtacaaccagaaccggttcctgtgtgacgatgtagacttcaacctgcgggtgcacagcgccggcctcctgctctgccggttcaaccgcttcagcgtgatgaagaagcagatcgtggtgggcggccacaggtccttccacatcacatccaaggtgtctgataactctgccgcggtcgtgccggcccagtacatctgtgccccggacagcaagcacacgttcctcgcagcgcccgcccagctcctgctggagaagttcctgcagcaccacagccacctcttcttcccgctgtccctgaagaaccatgaccacccagtgctgtctgtcgactgttacctgaacctgggatctcagatttctgtttgctatgtgagctccaggccccactctttaaacatcagctgctcggacttgctgttcagtgggctgctgctgtacctctgtgactcttttgtgggagctagctttttgaaaaagtttcattttctgaaaggtgcgacgttgtgtgtcatctgtcaggaccggagctcactgcgccagacggtcgtccgcctggagctcgaggacgagtggcagttccggctgcgcgatgagttccagaccgccaatgccagggaagaccggccgctcttttttctgacgggacgacacatctgaggaagacagcggcgagttttctgaagagatgagtgctcagagccctcatgctgttgaggctaaagggaggcctggaacggtggggcgtttgactggaatggaccccagggactgtccaggtgcagcccctcctagtacacatgggcccccgaggccgtggtcctgggagccaggaagactccgcagtgggtgagaatgaaaacttgagactcccaagttctgggccagcccattgctctgggctgttttaaagcccatttcacgaggaacaaagatttacttcctgtcctgccattcgtgtgcttccatggacaaacctgatttttttctcttagttctaaagaatcttgggttattttgtagcggtgccagtatttcagtagatgggatttcagccaagtaggttcccctgtaacctcctacaaagcaatattccaaaggaacattttaactgtaaaggctggagacaagaaaaaataagtagatcgttttaataacaattatttaattgcctataagtttgctgtttcagaggctagcccaaaggcatcaaatttaataaagttaaacaaattgatttacttcagagcaaatatgatcctattaaaataatatagggtaaataccctacctcttagaaagggcaaaaatgcaaagaagctttctttaaaactaaaagggttttttggggggggagttggcggggaggaaataaggctaacagaggttgacctaaaattagccttacaaaggagaaaggaccacattgcttacttgaaacagacaatgaaaacaaccaaagtgatatataaaatagttgatgagaactagacttatgactgtagtttactagagtttagttttcagttgctgaagtagctcattttctcttactaatgtttggttcctcagggaagaatctcacttgactagagaggaggtgggaacagaagagagaaggaggcagggagatgtatttcttagggctcaccccttcacagactgacagaatggttttgttttgttttgttttgttttgttttgtttttgagatggactctagctctgtcacccaggctggagtgcagtggtgcgatctcggctcactgcaagctccgcctcccgggttctcaccattctcctgcctcagcctcccgagtagctgggactacaggcgcccaccaccacgcccggctaattttttgtattttttagtagagacggggtttcaccatgttagccaggatggtctcgatctcctgacctcgtgatccgcccgcctcggcctcccaaagtgctgggattacaggcgtgagccaccgtgcctgccccagaatggtttttaaagccacagttgagaggccacccattgcccggcgcctggacagtgatcatcttgttcatcttgttcagtcctttcttgtgtgattggaattattcatcccctttgaaagatgagaaggttgagatgcaaagagtctacctttccaagttctcactgctggaaagagctagaagcacagttcaaagttctggcttctggactctgcagtccaggtctcccttctcccacttgcctaccctcaatgccacactgtttttgaagtggcccataacttgaaggaaaagtttaaagacagttcaatttaatcatcagaatgcattcttttttttttcggagacggagtttcactcttgctgcccaggctggagtgcaatggtgcaatgacctcggctcactgcaacctctgcctcctgggttcaagtgattctccagcctcagcctcccgagtagctgggattatgggcgcccaccaccatgcccagctaatttttgtattttttttttttagtagagatggggtttcgccaggttggccaggctggtcttgtgaactcctggcctcaggtgatctgcccacctcatcctccaaaagtgctgggattacaggcatgagccactgcgcctggcctcagaatgcattcttacacatctatcctagacatttataagcactctaatggataacaatccaagaataaatgattgtaaaagatgatgccgaagagttgatgtcaatctttttttcctaagaaaaaaagtccgcgagtattaaatatttagatcaatgtttataaaatgattactttgtatatctcattattcctattttggaataaaaactgaccttctttaatcatatacttgtcttttgtaaatagcagcttttgtgtcattctccccactttattagttaatttaaattggaaaaaaccctcaaactaatattcttgtctgttccagtcttataaataaaacttataatgcatg

SEQ ID NO: 266985 - DNA, 5850 bp, Artificial Sequence
  derived and/or modified sequence
atgggcaacagctacgccggccagctgaagaccaccagattcgaggaggtgctgcacaacagcatcgaggccagcctgagaagcaacaacctggtgcccagacccatcttcagccagctgtacctggaggccgagcagcagctggccgccctggagggcggcagcagagtggacaacgaggaggaggaggaggagggcgagggcggcctggagaccaacggcccccccaaccccttccagctgcaccccctgcccgagggctgctgcaccaccgacggcttctgccaggccggcaaggacctgagactggtgagcatcagcaacgagcccatggacgtgcccgccggcttcctgctggtgggcgtgaagagccccagcctgcccgaccacctgctggtgtgcgccgtggacaagagattcctgcccgacgacaacggccacaacgccctgctgggcttcagcggcaactgcgtgggctgcggcaagaagggcttctgctacttcaccgagttcagcaaccacatcaacctgaagctgaccacccagcccaagaagcagaagcacctgaagtactacctggtgagaaacgcccagggcaccctgaccaagggccccctgatctgctggaagggcagcgagttcagaagcagacagatccccgccagcacctgcagcagcagcctgttccccgccctggagagcaccgccgccttccccagcgagcccgtgcccggcaccaaccccagcatcctgatgggcgcccagcaggccggccccgccagcgaccaccccagcctgaacgccgccatgggccccgccgtgttcaacggcaaggacagccccaagtgccagcagctggccaagaacaacctgctggccctgcccagacccagcgccctgggcatcctgagcaacagcggcccccccaagaagagacacaagggctggagccccgagagccccagcgcccccgacggcggctgcccccagggcggcggcaacagagccaagtacgagagcgccggcatgagctgcgtgccccaggtgggcctggtgggccccgccagcgtgaccttccccgtggtggccagcggcgagcccgtgagcgtgcccgacaacctgctgaagatctgcaaggccaagcccgtgatcttcaagggccacggcaacttcccctacctgtgcggcaacctgaacgacgtggtggtgagccccctgctgtacacctgctaccagaacagccagagcgtgagcagagcctacgagcagtacggcgccagcgccatccagcccatcagcgaggagatgcagctgctgctgaccgtgtactacctggtgcagctggccgccgaccaggtgcccctgatggaggacctggagcagatcttcctgagaagctggagagagagccacctgaccgagatcagacagtaccagcaggcccccccccagcccttcccccccgcccccagcgccgccgcccccgtgaccagcgcccagctgccctggctggccagcctggccgccagcagctgcaacgacagcgtgcacgtgatcgagtgcgcctacagcctggccgagggcctgagcgagatgttcagactgctggtggagggcaagctggccaagaccaactacgtggtgatcatctgcgcctgcagaagcgccgccatcgacagctgcatcgccgtgaccggcaagtaccaggccagaatcctgagcgagagcctgctgacccccgccgagtaccagaaggaggtgaactacgagctggtgaccggcaaggtggacagcctgggcgccttcttcagcaccctgtgccccgagggcgacatcgacatcctgctggacaagttccaccaggagaaccagggccacatcagcagcagcctggccgccagcagcgtgaccaaggccgccagcctggacgtgagcggcacccccgtgtgcaccagctacaacctggagccccacagcatcagacccttccagctggccgtggcccagaagctgctgagccacgtgtgcagcatcgccgacagcagcacccagaacctggacctgggcagcttcgagaaggtggacttcctgatctgcatcccccccagcgaggtgacctaccagcagaccctgctgcacgtgtggcacagcggcgtgctgctggagctgggcctgaagaaggagcacatgaccaagcagagagtggagcagtacgtgctgaagctggacaccgaggcccagaccaagttcaaggccttcctgcagaacagcttccagaacccccacaccctgttcgtgctgatccacgaccacgcccactgggacctggtgagcagcaccgtgcacaacctgtacagccagagcgaccccagcgtgggcctggtggacagactgctgaactgcagagaggtgaaggaggcccccaacatcgtgaccctgcacgtgaccagcttcccctacgccctgcagacccagcacaccctgatcagcccctacaacgagatccactggcccgccagctgcagcaacggcgtggacctgtaccacgagaacaagaagtacttcggcctgagcgagttcatcgagagcaccctgagcggccacagcctgcccctgctgagatacgacagcagcttcgaggccatggtgaccgccctgggcaagagattccccagactgcacagcgccgtgatcagaaccttcgtgctggtgcagcactacgccgccgccctgatggccgtgagcggcctgccccagatgaagaactacaccagcgtggagaccctggagatcacccagaacctgctgaacagccccaagcagtgcccctgcggccacggcctgatggtgctgctgagagtgccctgcagccccctggccgtggtggcctacgagagactggcccacgtgagagccagactggccctggaggagcacttcgagatcatcctgggcagccccagcagcggcgtgaccgtgggcaagcacttcgtgaagcagctgagaatgtggcagaagatcgaggacgtggagtggagaccccagacctacctggagctggagggcctgccctgcatcctgatcttcagcggcatggacccccacggcgagagcctgcccagaagcctgagatactgcgacctgagactgatcaacagcagctgcctggtgagaaccgccctggagcaggagctgggcctggccgcctacttcgtgagcaacgaggtgcccctggagaagggcgccagaaacgaggccctggagagcgacgccgagaagctgagcagcaccgacaacgaggacgaggagctgggcaccgagggcagcaccagcgagaagagaagccccatgaagagagagagaagcagaagccacgacagcgccagcagcagcctgagcagcaaggccagcggcagcgccctgggcggcgagagcagcgcccagcccaccgccctgccccagggcgagcacgccagaagcccccagcccagaggccccgccgaggagggcagagcccccggcgagaagcagagacccagagccagccagggcccccccagcgccatcagcagacacagccccggccccaccccccagcccgactgcagcctgagaaccggccagagaagcgtgcaggtgagcgtgaccagcagctgcagccagctgagcagcagcagcggcagcagcagcagcagcgtggcccccgccgccggcacctgggtgctgcaggccagccagtgcagcctgaccaaggcctgcagacagccccccatcgtgttcctgcccaagctggtgtacgacatggtggtgagcaccgacagcagcggcctgcccaaggccgccagcctgctgcccagccccagcgtgatgtgggccagcagcttcagacccctgctgagcaagaccatgaccagcaccgagcagagcctgtactacagacagtggaccgtgcccagacccagccacatggactacggcaacagagccgagggcagagtggacggcttccaccccagaagactgctgctgagcggccccccccagatcggcaagaccggcgcctacctgcagttcctgagcgtgctgagcagaatgctggtgagactgaccgaggtggacgtgtacgacgaggaggagatcaacatcaacctgagagaggagagcgactggcactacctgcagctgagcgacccctggcccgacctggagctgttcaagaagctgcccttcgactacatcatccacgaccccaagtacgaggacgccagcctgatctgcagccactaccagggcatcaagagcgaggacagaggcatgagcagaaagcccgaggacctgtacgtgagaagacagaccgccagaatgagactgagcaagtacgccgcctacaacacctaccaccactgcgagcagtgccaccagtacatgggcttccaccccagataccagctgtacgagagcaccctgcacgccttcgccttcagctacagcatgctgggcgaggagatccagctgcacttcatcatccccaagagcaaggagcaccacttcgtgttcagccagcccggcggccagctggagagcatgagactgcccctggtgaccgacaagagccacgagtacatcaagagccccaccttcacccccaccaccggcagacacgagcacggcctgttcaacctgtaccacgccatggacggcgccagccacctgcacgtgctggtggtgaaggagtacgagatggccatctacaagaagtactggcccaaccacatcatgctggtgctgcccagcatcttcaacagcgccggcgtgggcgccgcccacttcctgatcaaggagctgagctaccacaacctggagctggagagaaacagacaggaggagctgggcatcaagccccaggacatctggcccttcatcgtgatcagcgacgacagctgcgtgatgtggaacgtggtggacgtgaacagcgccggcgagagaagcagagagttcagctggagcgagagaaacgtgagcctgaagcacatcatgcagcacatcgaggccgcccccgacatcatgcactacgccctgctgggcctgagaaagtggagcagcaagaccagagccagcgaggtgcaggagcccttcagcagatgccacgtgcacaacttcatcatcctgaacgtggacctgacccagaacgtgcagtacaaccagaacagattcctgtgcgacgacgtggacttcaacctgagagtgcacagcgccggcctgctgctgtgcagattcaacagattcagcgtgatgaagaagcagatcgtggtgggcggccacagaagcttccacatcaccagcaaggtgagcgacaacagcgccgccgtggtgcccgcccagtacatctgcgcccccgacagcaagcacaccttcctggccgcccccgcccagctgctgctggagaagttcctgcagcaccacagccacctgttcttccccctgagcctgaagaaccacgaccaccccgtgctgagcgtggactgctacctgaacctgggcagccagatcagcgtgtgctacgtgagcagcagaccccacagcctgaacatcagctgcagcgacctgctgttcagcggcctgctgctgtacctgtgcgacagcttcgtgggcgccagcttcctgaagaagttccacttcctgaagggcgccaccctgtgcgtgatctgccaggacagaagcagcctgagacagaccgtggtgagactggagctggaggacgagtggcagttcagactgagagacgagttccagaccgccaacgccagagaggacagacccctgttcttcctgaccggcagacacatctag

SEQ ID NO: 266986 - DNA, 5850 bp, Artificial Sequence
  derived and/or modified sequence
atgggaaactcttacgccggacagcttaagaccacaagattcgaagaagtgctacacaattccatagaggcatctcttcgcagcaataacctggtccctaggcctatcttctctcagctctacctggaggccgagcagcaattggctgctcttgagggcgggtctagagtcgacaacgaagaggaagaagaagagggcgagggtggccttgaaaccaatgggcctcctaatccgtttcagctccatccactgcctgagggctgttgtactaccgacggcttctgtcaggccggtaaggacttgcggctggtaagcatatccaatgagccaatggatgtccccgccggatttctactcgtaggcgtgaaatctccctctttgccggaccacctgttggtgtgtgccgtggacaagcgatttctgccagatgataacgggcacaacgcgctgctgggattctcaggaaactgcgtaggatgcggaaagaaagggttttgctactttaccgagttctctaatcatatcaatctcaagctgaccacccagcctaaaaagcagaagcatctgaaatactatctggtcaggaacgcacaaggaacattgacgaagggcccactcatatgctggaaagggtctgaattccgatctcggcagatccccgccagtacctgttcgtccagcttattcccagcactggaatccactgctgcatttccaagcgagcctgtgcccggaaccaatcccagtattctcatgggagcccagcaagccggcccagctagtgatcaccccagcctgaatgctgccatgggtccggccgtgttcaacggcaaagacagtcctaagtgtcagcaattggccaagaacaatctccttgcccttcctagacctagcgcgctaggcattctatccaactccggaccaccaaagaagcggcacaaggggtggtcgcctgagagcccttccgctccagacggcgggtgtccccaaggtggcggaaacagagccaaatacgagtcggcaggcatgtcctgcgtccctcaggtgggcttggtgggccccgcttcggtcacctttcctgtggttgcatctggcgagcctgtgagcgtgcccgataatcttctgaaaatatgtaaggctaagcccgtaatcttcaaaggccatggtaactttccatatctctgtgggaatctgaacgatgtggtcgtgagccctctgctgtacacatgttaccagaatagccaatcagtatctcgcgcatacgaacagtatggggcctcagccatccagcctatcagcgaggaaatgcagctgttgctgaccgtatactatctcgtgcagttggccgcagatcaggtgcccctcatggaggacctcgagcaaattttcctccgctcctggagggagtctcatttgaccgagataagacagtaccagcaggccccaccccagccttttccccctgccccctccgcagctgctcccgtcacttcggcccagttaccatggctggcgagcctcgcagcatccagctgcaatgatagcgtgcacgtgattgaatgcgcctatagtcttgcagaggggctctctgagatgtttcgactcttggttgagggaaagcttgccaaaactaattacgtcgttatcatatgcgcctgcagatcagccgccatagacagttgcattgctgttacgggcaagtaccaggcgagaattttgagcgagtctcttttaacgcccgccgagtatcagaaagaggtgaattacgagctcgtgacaggcaaggtcgacagcttgggagcctttttctccacactgtgtcctgaaggagacattgatatccttctcgacaagtttcatcaggagaatcaaggccatatcagctcctcacttgcagcgtcttctgtcaccaaggccgccagccttgatgtctctggaactccggtgtgcacatcgtataatctggaaccccatagcattcgcccattccagctggccgttgctcagaaattattgagccatgtgtgcagcattgcggattcctccacgcagaatctcgaccttggcagcttcgagaaggttgattttttaatatgcatcccacccagcgaggtaacataccagcagactttgctgcatgtgtggcactccggcgtactgctagaattgggactgaaaaaggagcacatgactaaacaaagggtggagcagtatgttctcaagttagacacagaagcgcagacgaagttcaaagcttttcttcaaaattccttccagaacccgcatacactgtttgtgctaatccacgaccacgcccattgggacctggtatctagtaccgtccataacttgtattctcagagtgatccatcagtgggtttggtggaccggctgctaaattgccgcgaagtgaaagaggcacccaacatagtaactctgcacgtaaccagcttcccttatgcacttcagacacagcacaccctgatctccccctacaatgagatacactggcccgccagttgtagcaacggagtggacctataccacgaaaataagaaatacttcggcctgtcagagtttatcgaaagcaccctgtctggccattccttaccactcctccgatatgactcttcctttgaagctatggtcactgccctgggcaagaggttcccccgacttcacagtgctgttatccggacatttgtcctggtgcagcattacgctgctgcactgatggcagtctcgggactgccccaaatgaagaactacacctccgtggaaaccctcgagattacacaaaatctgctcaactcccccaaacagtgcccatgtggccacggcctcatggttttgcttcgcgtcccgtgcagtcccctcgctgtggtcgcatatgagaggttggcccatgtgcgcgctcgactggcactggaggagcacttcgagattattttgggttctccttcctccggcgtaactgtcggtaagcacttcgtgaagcagctgcggatgtggcagaagatcgaggacgtggagtggagaccacagacctatctggagctggaggggcttccatgcatattaattttctctggcatggatccacacggtgagagcctgccgcgttccttgcgttactgtgacctgcgattaataaattcgagttgtctggtgcgaaccgctctggaacaagagctcggactggccgcttattttgtctccaatgaagtccccctggaaaagggtgccaggaacgaagcattggaaagtgatgccgaaaagctgtcttcaaccgacaacgaagacgaggaactgggtacggaaggaagcactagcgaaaagaggtcgcccatgaaaagggaaagaagccggtctcatgacagtgcttctagcagtctgtctagtaaggcgtctgggtctgcactgggcggcgagtctagcgcacagcccaccgccttgccccagggcgagcacgctcggtctccccagcccaggggccccgctgaagaaggccgcgcacccggcgaaaaacagcgccctcgcgcctcgcaagggcctccaagcgccataagccgtcacagcccaggccccacaccgcaaccagattgctctcttcgcactggtcagcgctccgtccaggtgtccgtgacatcttcgtgcagccaactgagttcaagctccggaagttcgtctagtagtgtggcgccagctgcagggacttgggtcctgcaagcttcccagtgctccttgactaaggcctgtcgccaaccacctattgtctttctgccaaaattggtctacgacatggtggtcagcactgattcctctggacttccaaaggcagccagccttctcccaagtccatccgtgatgtgggctagctctttccgccccctcttgtctaagacaatgacttctacggaacaatccctttattacagacagtggacggtgccccgtccaagtcatatggattacgggaacagggctgagggacgcgtggatggcttccacccacggcgcctgctgctgagcgggccacctcagattggtaagaccggcgcataccttcaatttctctccgttcttagtcgcatgcttgtgcgccttactgaggtggacgtgtatgatgaggaggagataaacatcaaccttagggaagagtctgattggcactatctccaactgtccgacccttggccagacctcgagctatttaagaagctgccctttgactatatcatccatgatccgaaatacgaagacgcgagtctaatttgctctcattaccagggaatcaagtcggaggacaggggcatgtctaggaagccagaggacctttacgttaggagacagaccgcccggatgcggctcagcaagtatgccgcttacaatacctaccaccactgcgagcaatgccaccagtacatggggtttcacccgcggtatcagctgtacgaaagtaccttgcatgcatttgctttctcctactccatgctcggggaggagatccaactacactttattatccctaaatcgaaagaacaccactttgtcttctctcagccaggaggtcagctagaatccatgcggctgcccctggttactgacaagagtcatgagtatatcaagtcacccacattcactcctacaacagggcggcatgagcatggtttgttcaacttgtatcatgcaatggatggagcctcacatctgcatgtgctggttgtcaaggagtacgagatggcaatttacaagaagtattggcctaaccacatcatgctggtgctgccgtccattttcaactctgccggagtaggggcagcccacttcctgataaaggaacttagctaccacaacctagaactggaacgcaaccggcaggaggaacttggtatcaaaccccaggacatctggccctttatcgtgataagcgacgattcctgcgtaatgtggaacgtagttgatgtcaactccgctggggaaagaagccgagaattctcatggtccgagagaaacgtgtccttgaagcacatcatgcagcacatagaagctgccccagacattatgcactacgcactattgggtcttcggaaatggtcttccaagactagggcaagtgaagttcaagaaccgttctcacggtgccatgtgcacaacttcatcatactgaatgtcgatctgacacagaatgtgcagtataaccaaaatcgatttctgtgtgatgatgtagattttaacctgcgcgttcactccgcagggctcctgctctgccgcttcaatcgcttctccgttatgaagaaacagatagtggtggggggccataggagcttccatatcacatctaaggtgtcagacaacagtgctgctgtggtgccagcccagtatatctgtgcgccagactcaaagcacacatttctcgcagcgcccgcccagctgctcctagagaaatttttgcagcatcatagccatctgttttttcctctctccttgaaaaaccacgatcacccagttttgtcggtggactgttacttaaatttgggatctcagataagcgtctgctatgtttcatcacgaccccattccctcaatataagttgtagcgacctgctgttcagcgggctcctgctctacttgtgtgactcatttgtgggtgcgtcttttctgaagaagttccacttcctgaagggcgccactctttgtgtgatatgtcaagatcgtagctcgttgcgacaaacagtggtccgcctggagttggaggacgagtggcagtttagactcagagacgagtttcaaacagccaacgcacgggaggaccgtcccttgttttttctgacggggcgacatatttag

SEQ ID NO: 266987 - DNA, 5850 bp, Artificial Sequence
  derived and/or modified sequence
atgggcaacagctatgccggccagctgaagaccaccaggtttgaggaggtgctgcacaacagcattgaggccagcctgcggagcaacaacctggtgccccggcccatcttcagccagctgtacctggaggccgagcagcagctggccgccctggagggcggcagccgggtggacaatgaggaggaggaggaggagggggagggcggcctggagaccaatggaccacccaaccccttccagctgcaccccctgcctgagggctgctgcaccacagatggcttctgccaggccggcaaggacctgcggctggtgtccatcagcaatgagcccatggatgtgcctgctggcttcctgctggtgggcgtgaagagccccagcctgcctgaccacctgctggtgtgtgctgtggacaagcgcttcctgcctgatgacaatggccacaatgccctgctgggcttcagcggcaactgtgtgggctgtgggaagaagggcttctgctacttcacagagttcagcaaccacatcaacctgaagctgaccacccagcccaagaagcagaagcacctgaagtactacctggtgagaaatgcccagggcaccctgaccaagggccccctcatctgctggaagggcagcgagttccgcagccggcagatcccagccagcacctgcagcagcagcctcttccctgccctggagagcacagctgccttccccagcgagcctgtgcccggcaccaaccccagcatcctgatgggcgcccagcaggccggccctgccagtgaccaccccagcctgaatgctgccatgggccctgctgtgttcaacgggaaggacagccccaagtgccagcagctggccaagaacaacctgctggccctgccccggcccagcgccctgggcatcctgagcaacagcggcccccccaagaagaggcacaagggctggagccctgagagccccagcgccccagatggcggctgcccccagggcggcggcaacagagccaagtatgagagcgctggcatgagctgtgtgccccaggtgggcctggtgggccctgcctctgtgaccttccctgtggtggccagcggggagcctgtgtctgtgcctgacaacctgctgaagatctgcaaggccaagcctgtgatcttcaagggccacggcaacttcccctacctgtgtggcaacctgaatgatgtggtggtgagccccctgctgtacacctgctaccagaacagccagagcgtgtcccgggcctatgagcagtacggggccagcgccatccagcccatcagcgaggagatgcagctgctgctgactgtgtactacctggtgcagctggccgctgaccaggtgcccctgatggaggacctggagcagatcttcctgcgctcctggagggagagccacctgacagagatccggcagtaccagcaggccccaccccagcccttccccccagcccccagcgctgctgcccctgtgaccagcgcccagctgccctggctggccagcctggccgccagcagctgcaatgattctgtgcacgtgattgaatgtgcctacagcctggccgagggcctgtctgagatgttccggctgctggtggagggcaagctggccaagaccaactacgtggtgatcatctgtgcctgccgctctgctgccatcgacagctgcatcgctgtgacaggcaagtaccaggcccgcatcctgtctgagagcctgctgaccccagctgagtaccagaaggaggtgaactatgagctggtgacaggcaaggtggacagcctgggcgccttcttcagcaccctgtgcccagagggggacatcgacatcctgctggacaagttccaccaggagaaccagggccacatcagcagcagcctggccgccagctctgtgaccaaggccgccagcctggatgtgtctggcacccctgtgtgcaccagctacaacctggagccccacagcatccggcccttccagctggccgtggcccagaagctgctgagccacgtgtgcagcattgctgacagcagcacccagaacctggacctgggcagctttgagaaggtggacttcctgatctgcatccccccatctgaggtgacctaccagcagaccctgctgcacgtgtggcacagcggcgtgctgctggagctgggcctgaagaaggagcacatgaccaagcagagggtggagcagtatgtgctgaagctggacacagaggcccagaccaagttcaaggccttcctgcagaacagcttccagaacccccacaccctgtttgtgctgattcatgaccacgcccactgggacctggtgagcagcacagtgcacaacctgtacagccagagcgaccccagcgtgggcctggtggaccggctgctgaactgccgggaggtgaaggaggcccccaacatcgtgaccctgcacgtgaccagcttcccctatgccctgcagacccagcacaccctcatcagcccctacaatgagatccactggccagccagctgcagcaatggagtggacctgtaccacgagaacaagaagtacttcggcctgtctgagttcatcgagagcaccctgagcggccacagcctgcccctgctgcgctatgacagcagctttgaggccatggtgacagccctgggcaagcgcttcccccggctgcacagcgctgtgatccgcacctttgtgctggtgcagcactacgccgccgccctgatggctgtgtctggcctgccccagatgaagaactacacctctgtggagaccctggagatcacccagaacctgctgaacagccccaagcagtgcccctgtggccacggcctgatggtgctgctgcgggtgccctgcagccccctggccgtggtggcctatgaaaggctggcccacgtgcgggcccggctggccctggaggagcactttgagatcatcctgggcagccccagcagtggagtgacagtgggcaagcactttgtgaagcagctgaggatgtggcagaagattgaagatgtggagtggaggccccagacctacctggagctggagggcctgccctgcatcctgatcttcagcggcatggacccccatggagagagcctgcccaggagcctgcgctactgtgacctgcggctcatcaacagcagctgcctggtgaggacagccctggagcaggagctgggcctggccgcctactttgtgtccaatgaggtgcccctggagaagggggccagaaatgaggccctggagagtgatgctgagaagctgagcagcacagacaatgaagatgaggagctgggcacagagggcagcaccagcgagaagaggagccccatgaagcgggagaggagccgcagccatgattctgccagcagcagcctgagcagcaaggccagcggcagcgccctgggcggggagagcagcgcccagcccacagccctgccccagggcgagcacgcccggagcccccagccccggggccctgctgaggagggccgggcccctggagagaagcagaggccccgggccagccagggccccccatctgccatcagccgccacagccctggccccaccccccagcctgactgcagcctgaggacaggccagaggtctgtgcaggtgtctgtgaccagcagctgcagccagctgagcagcagcagcggcagcagcagcagctctgtggccccagctgctggcacctgggtgctgcaggccagccagtgcagcctgaccaaggcctgccggcagccccccatcgtgttcctgcccaagctggtgtatgacatggtggtgtccacagacagcagcggcctgcccaaggccgccagcctgctgcccagccccagcgtgatgtgggccagcagcttccggcccctgctgagcaagaccatgaccagcacagagcagagcctgtactaccggcagtggacagtgccccggcccagccacatggactatggcaacagagctgagggccgggtggatggcttccacccccggcggctgctgctgagcggccccccccagatcggcaagacaggagcctacctgcagttcctgtctgtgctgagcaggatgctggtgcggctgacagaggtggatgtgtatgatgaggaggagatcaacatcaacctgcgggaggagagtgactggcactacctgcagctgagtgacccctggccagacctggagctgttcaagaagctgccctttgactacatcatccatgaccccaagtatgaagatgccagcctcatctgcagccactaccagggcatcaagtcagaagatcggggcatgagcaggaagccagaggacctgtatgtgcggcggcagacagccaggatgaggctgagcaaatatgctgcctacaacacctaccaccactgtgagcagtgccaccagtacatgggcttccacccccgctaccagctgtatgagagcaccctgcacgcctttgccttctcctacagcatgctgggggaggagatccagctgcacttcatcatccccaagagcaaggagcaccactttgtgttcagccagcccggcggccagctggagagcatgaggctgcccctggtgacagacaagagccatgagtacatcaagagccccaccttcacccccaccaccggcagacatgagcacggcctcttcaacctgtaccacgccatggatggagccagccacctgcacgtgctggtggtgaaggagtatgagatggccatctacaagaagtactggcccaaccacatcatgctggtgctgcccagcatcttcaacagcgctggggtgggcgccgcccacttcctgatcaaggagctgagctaccacaacctggagctggagaggaaccggcaggaggagctgggcatcaagccccaggacatctggcccttcatcgtcatcagtgatgacagctgtgtgatgtggaatgtggtggatgtgaacagcgctggggagaggagccgggagttctcctggagcgagagaaatgtgtccctgaagcacatcatgcagcacatcgaggccgccccagacatcatgcactacgccctgctgggcctgaggaagtggagcagcaagacccgggccagcgaggtgcaggagcccttcagccgctgccacgtgcacaacttcatcatcctgaatgtggacctgacccagaatgtgcagtacaaccagaaccgcttcctgtgtgatgatgtggacttcaacctgcgggtgcacagcgctggcctgctgctgtgccgcttcaaccgcttctctgtgatgaagaagcagatcgtggtgggcggccacaggagcttccacatcaccagcaaggtgtctgacaacagcgctgctgtggtgcctgcccagtacatctgtgccccagacagcaagcacaccttcctggccgccccagcccagctgctgctggagaagttcctgcagcaccacagccacctgttcttccccctgagcctgaagaaccacgaccaccctgtgctgtctgtggactgctacctgaacctgggcagccagatctctgtgtgctacgtgagcagccggccccacagcctgaacatcagctgcagcgacctgctcttcagcggcctgctgctgtacctgtgtgacagctttgtgggcgccagcttcctgaagaagttccacttcctgaagggggccaccctgtgtgtgatctgccaggacaggagcagcctgcggcagacagtggtgcggctggagctggaggatgagtggcagttccggctgagagatgagttccagacagccaatgccagagaagatcggcccctcttcttcctgaccggccgccacatctag

SEQ ID NO: 266988 - DNA, 5850 bp, Artificial Sequence
  derived and/or modified sequence
atgggcaacagctacgccggccagctgaagaccacccggttcgaggaagtgctgcataattccatcgaggcctccctgaggtccaacaatctggtgcccagaccaatcttctcccagctataccttgaagctgaacagcagctggccgcactcgaaggcggatcacgggtcgacaacgaggaggaagaagaggagggcgagggggggctggaaaccaacgggccgcctaacccatttcagctccatcctctgccggagggctgttgtaccaccgatggcttctgtcaggctgggaaggatcttagacttgtctctatcagcaacgagccaatggatgtacctgccggattccttttggttggggttaaatctccttcactgcctgaccacctgttggtctgtgccgttgacaagcggttcctgccagatgacaatggtcacaatgccctcttgggcttttcagggaactgtgtgggttgtggcaagaaaggattttgctactttactgagttttcaaaccacataaatcttaagctcactacccaaccaaagaaacagaagcacctgaaatattacctcgtaaggaacgcacagggcaccttaactaagggacctctcatttgctggaaaggctcggaatttaggtcccgccagattcctgcgagtacatgctcaagctctctctttcccgcactggagagtaccgccgccttcccatccgagcctgtcccagggactaacccaagtatcctgatgggggcccagcaggccggacccgcgtctgaccatccttccctgaatgcggcgatgggacccgcggtgttcaacgggaaggacagtcccaaatgtcagcagctggctaagaataacctgctcgccctgcccagaccaagtgcgctcgggatcctgtctaacagcggacccccaaagaaacgccacaaaggatggtcgccggagagtccatccgcccccgatggcggttgtccccaggggggtgggaaccgagcaaagtatgagtcagctggaatgtcatgcgtgccacaggttggcttggttggcccagcatccgttacattccccgtggttgcaagcggtgaacccgttagtgtccccgataacctcctaaagatatgtaaggccaaacccgtgatattcaagggccacggaaattttccttacctgtgcggaaatcttaatgacgtcgtagtcagcccacttctgtacacctgctatcagaattcgcagtctgttagcagagcctatgaacaatatggggctagtgccatacagccgatatccgaagaaatgcagttgctcttgaccgtttattacctggtgcagctcgctgctgatcaagtgcccttgatggaggacctagagcagatcttcctccgcagttggagggagagtcacttgacagagattagacagtaccagcaggctccccctcagccattcccccccgctccgtctgcagcggccccagtcacctctgctcaactcccatggctggcgagcttagcagccagctcttgcaatgattcggtgcatgtgatcgaatgcgcctattcactggctgaagggctgtcggagatgttcaggttgttagtcgagggtaagctggcaaagacaaactatgttgtcattatctgcgcatgtaggtcagctgctatcgatagttgcattgctgtgactggcaaatatcaagcccggatcttgtccgaatctctcttgacgcctgctgaatatcagaaagaggtcaactatgagctggtgaccggcaaggtggacagccttggagccttttttagcactctgtgccctgagggggacatcgacattctcctggacaagttccatcaggagaaccaggggcacatctcatcctctctggcagcatcaagtgtgaccaaggccgctagtctggacgtgtcaggtacacctgtatgtacaagttacaacctggagccacactccattcgaccgttccaattagccgtcgctcaaaagcttctatctcatgtctgctctattgctgattcaagcacgcaaaatctggacctggggagttttgaaaaggtggactttcttatttgcattccgccttcagaggtcacatatcagcagacgcttctgcacgtgtggcacagtggtgtcctgctggaacttggcctgaaaaaagagcatatgacaaaacaacgggttgagcagtacgtgttaaagctggataccgaggcccaaacgaagttcaaggcctttctgcaaaatagctttcagaatccccatactctgttcgtgttgattcatgatcacgcccactgggacctcgtgtccagtacagttcataatctgtattctcagtccgaccctagcgtcggactggtggacaggctgctcaattgccgggaagttaaggaggcaccgaacattgttacgttacatgtgacctcattcccttatgctctccagacccagcatactctgatcagcccatacaatgaaatacattggcccgctagctgtagtaatggcgtagacctgtaccatgagaataagaagtatttcggcctgagcgaattcattgagtcgactctttctggacactcactgcctctcctgcgatacgatagcagctttgaagctatggtgacggccctgggcaagcggtttccccggttgcatagtgctgtcatccgaacgttcgtcttagtccagcactatgcggcggcactgatggcggtctctgggctgccacagatgaagaactatacatcagtggaaacacttgagatcacccagaacctattgaatagcccaaaacaatgcccttgtggacatgggctgatggttctactcagagtcccctgtagtcccctggctgtcgtcgcttatgagcggctagctcatgtgagggcgaggctggctttggaagagcactttgaaattattctcggctccccgtcttccggggtgacagtgggaaaacatttcgttaagcagctgcggatgtggcaaaaaatcgaggatgttgagtggcggccgcaaacctatcttgagctcgaggggctcccttgtattctcattttctcaggcatggatccgcacggcgagtcactaccaagatcactccggtattgtgacctgcgcctcatcaactcttcctgccttgtgaggacggcgctcgagcaggagttggggctggctgcctacttcgtttcgaatgaagttcccctggagaaaggagcccgtaatgaggcactggaatccgatgctgaaaagctttcttcaacagacaacgaggacgaggagttggggacagagggatccacctctgagaaacggtcacctatgaaacgggaacgtagccggtcccacgattcagcatcctcttctctgtctagcaaggcttccgggagcgctctggggggcgagagttccgcccagccaacagcacttccacagggagagcatgctagatctccacagcctagaggtccagcagaagaggggcgagcccccggagagaaacagaggccccgcgcatcccaggggccacctagtgctatctcaaggcactcaccaggtccaacgcctcagccggattgtagcttaaggacgggacagaggtccgtgcaggtgagcgtgaccagttcctgttcccagctgtcgtccagctcgggctcctcatcctcaagcgtggcacccgccgctggcacgtgggtgttgcaggcaagccagtgcagcttgacaaaagcttgccgtcagcctccaattgtgtttcttcccaagctcgtgtatgatatggtggtgtctacagactctagtgggcttcccaaggcggcatccttgctgccttctcccagcgtgatgtgggcatcgtcatttcggcctctactatccaagacaatgacctccactgagcaaagtctctattaccgccaatggaccgttccccgcccttcccatatggattacggcaatcgcgccgagggcagagtcgacgggttccatcccaggcggctcctcctgtcggggccaccacaaattggtaaaaccggagcctacttgcagtttcttagcgttctgtctcggatgctggttcgcctgacagaggtagacgtttacgacgaggaggagatcaatattaacctaagggaggaaagtgactggcactatctacagcttagcgatccgtggcccgaccttgagctgttcaagaagctccctttcgactacattatccacgacccaaagtacgaagacgccagtctaatctgctcccattaccaggggattaagtccgaggacagggggatgtctaggaagccagaggatctttatgtgcgccggcagaccgctcgcatgaggctttctaagtatgccgcctacaatacctatcaccattgtgagcaatgtcatcagtatatgggcttccaccccagataccagctctatgaatccaccttgcatgctttcgccttctcttatagcatgctaggagaggagatccaattgcatttcataattcccaagagcaaagagcaccacttcgtcttcagccagcccggaggccaacttgagtcgatgagactgcctttggtcaccgacaagagtcatgagtacattaaatcacctactttcacaccaactactggccgccacgagcacggtctgtttaacctgtaccacgctatggacggtgcgtcccacttacatgtcctggtagtgaaagagtacgaaatggctatctataagaagtactggccaaaccatataatgctggtgctcccgtccatcttcaatagtgcaggagtaggggcagcacactttttaattaaggaactttcgtatcataacctcgaacttgagcgcaacagacaagaagaattgggcatcaagcctcaggatatctggcctttcatagtgataagtgatgatagctgcgttatgtggaatgtagttgacgtgaattcagccggcgaacggagccgagagttcagttggtcagagaggaatgtgtccctgaaacatattatgcagcacattgaggccgcccccgatataatgcactatgcccttctgggtctgcgtaaatggtcctcaaaaaccagggccagcgaggtgcaagaacccttctccagatgccacgtgcacaatttcattattttgaacgtggacctgacacagaatgtgcagtacaaccagaacaggtttctatgcgacgacgtcgatttcaacttgcgggtgcactctgccggcctgttgctttgcagattcaatcggtttagcgtgatgaagaagcaaattgttgttgggggccaccggtcttttcacataacgtccaaagttagcgacaattctgccgcggtcgtgcccgcccagtatatctgcgcccccgactcaaaacacacattcctggccgctccagctcagctgctcctggagaaatttctgcaacaccactctcacttgttttttccgctcagcctcaaaaaccacgatcatccagtgctgtccgtcgattgttacctgaacctaggcagtcaaattagcgtgtgctatgtgtcatccaggccccactcactgaatattagctgctccgatctgctgttcagcggactcttactttatctctgtgactcttttgtgggcgcctcattccttaaaaagttccactttctgaaaggagccacgctgtgtgtaatctgccaggatcgcagttccctgagacagacagttgttagactcgaactggaggacgaatggcaattccgcctgagggatgagttccagaccgccaacgctcgcgaggatcggccactcttcttcctgaccggtcggcacatctag

SEQ ID NO: 266989 - DNA, 5849 bp, Artificial Sequence
  derived and/or modified sequence
atgggcaattcctatgctgggcagctgaagacaaccagatttgaggaggttctccataactccattgaggcctcattgcggtcaaacaatctcgtgcctcgtccaatcttctcccagctgtaccttgaggccgaacagcaattggcagctctcgaggggggaagccgcgtcgacaatgaggaggaagaagaggaaggggagggtggactggagaccaacggtccgcctaatcccttccagcttcatcctcttccggaaggttgctgcacgacagacgggttctgtcaggctggaaaggatctgcgtctcgtgtctatttccaacgaacctatggacgtacccgcaggattcctgctggtcggagtgaagtccccgtcgctccccgatcacctgcttgtatgtgcagttgataagcggttcctgcccgatgacaatggacataatgctttgctgggtttctccggaaactgtgtggggtgcggtaagaagggattctgctacttcacggagttttccaaccacattaacctgaaacttactacacaaccaaaaaagcagaaacatctcaagtattatttagtgcggaatgcccagggcacattaacgaaaggtccattgatttgttggaaagggtccgagtttagatcaagacaaataccagctagcacgtgctcttcaagcctgttcccagctctagaaagtacagcagccttcccgtccgagcctgtgcccggaactaatccaagtattcttatgggagcacagcaggccggtcctgcctcggatcacccctcattaaatgcagccatgggccctgcagtgtttaacggaaaggactcaccaaaatgccaacagctggccaagaataacctgctagctctgcctcgccctagcgccctgggtatacttagcaatagtggaccaccaaagaagagacataaaggctggtcacccgagtcaccaagtgctcctgacggcggttgtccccagggcggtggaaatagggccaagtatgaatctgctggcatgagctgtgttccccaggttggactggtggggccagcatcggtgacatttcccgttgtcgcctccggcgagcccgttagtgtccccgacaatctgctgaagatatgcaaggctaaaccagtgatctttaagggccacggcaatttcccctacctgtgtggcaatctgaacgacgtagtcgtatctcctctactgtacacctgttaccaaaacagtcagagcgtgtcgagagcatacgagcagtacggtgcttctgcaatccagcctatttcagaagaaatgcaacttctcctaaccgtatattatcttgttcagctcgccgcagaccaagtgccactgatggaagacttggagcagattttccttcgatcctggcgggaatcacacctcactgaaatccggcaatatcaacaggcccctccccagcctttcccccctgctccatcagcggctgcccctgtcacaagcgcacagttgccctggttagcctccctggcagcttcaagctgcaatgactctgtccacgtgatagagtgtgcttacagtctcgcagagggcctgagcgaaatgtttagactactggtcgaagggaagctggcgaaaactaattacgttgtcattatctgtgcctgtcggagcgccgctatagacagctgcatcgcagtgactggaaagtaccaggcgcgaattctgagcgaaagcctcttgacgccggctgagtatcagaaggaggtcaactacgagctggtgaccggtaaggtcgactctcttggggcttttttcagcaccctgtgcccagaaggcgatatagacattctcctggacaagttccaccaggagaatcagggccacattagttccagcctggctgcctcctcggtcaccaaagccgcttccctggatgtgtcaggcaccccagtctgcacaagctataatctggaaccacactctatacgccctttccagctggcagtggctcagaagctactgtcacacgtgtgttctattgctgacagttctacccagaacttagatttagggtcgtttgagaaggtagatttcctgatctgtattccaccgagcgaggtaacctatcagcagactctgctacatgtgtggcatagcggtgtgctgctggagctgggccttaagaaggaacacatgacaaagcaaagggtggagcaatatgtgttaaagcttgataccgaggcccagacgaaatttaaggccttcctgcagaactcattccagaaccctcatactctgtttgtactcatccacgaccatgctcattgggacctggtgtcttctacggtacacaacctctatagccagtctgacccaagtgtaggcctcgtcgatcgtctcctgaactgccgcgaagtcaaagaggcgcctaatattgtaacactccacgtaacaagttttccttacgccttgcaaacccaacacaccctgattagcccatacaatgagattcactggccggcatcctgctccaacggagtagatctgtatcacgaaaacaaaaaatacttcggactctcagagtttattgaatcaacactgtccggccactcactaccactgctcagatacgacagctcttttgaagcgatggtgaccgccctggggaaacgatttcccaggttacactccgcagtaatacgcacgtttgtgctggtacagcattatgccgcagctcttatggccgtgagcggacttccacagatgaaaaactacacctctgtggaaacccttgagattacacagaaccttctgaacagccccaagcagtgcccctgcgggcacgggctgatggtgctcctgcgggtgccttgttcccctctcgcagtcgtggcctatgagcgattggcccatgtccgcgcacgactggctctggaggagcatttcgagataattctggggtcaccatcttccggtgtgaccgttgggaagcattttgttaagcaacttcggatgtggcaaaagattgaggacgttgagtggaggccccagacctacctagagctggaaggactgccgtgtatcctgatttttagcggcatggacccacatggggaatcactccctcgcagtctgcgatattgcgacctgaggcttattaattcttcttgcctcgtgaggacagccctcgagcaagagctgggactcgctgcctactttgtgtcaaatgaggtgcctctcgaaaaaggagcgaggaatgaagctctcgaatccgacgccgagaaactaagttccactgacaacgaggacgaagaactcggtactgaggggtccacatcagagaaaagatcgccgatgaagcgcgaacgctcccggtctcacgatagtgcgtcttcgagcctgtcctctaaggcttcgggaagcgctttagggggtgaatcctccgcacagccgacggctctgccccagggcgagcacgccagaagcccccagcccagaggacccgctgaagaggggagggcacctggcgaaaagcagcgccctcgagcttctcagggccctccgtccgctatctccaggcacagtccaggaccaacgccgcaacccgactgctccctgcgaaccggccagaggagtgtgcaggtgagcgttactagttcttgctctcaactgtcctccagcagtggctctagctcctcatctgtggcacccgctgccggtacctgggtgctccaggcttcacagtgttccttgaccaaggcctgtcgacagcctcccatcgtctttctgcccaaactggtctatgatatggtcgtgtctaccgatagctccggcctaccaaaagcggcatcattgctgccgagccctagtgttatgtgggcgtcctcctttcggcctctattgagtaaaactatgacttctacagaacagtctctgtactatagacagtggacagtcccacgcccatcccatatggactacggcaaccgcgctgagggcagggtcgacgggttccatcccaggcgtctcttgttgagcgggccaccacagattgggaaaacaggcgcttacttgcaattcctgagcgtgctgtcacggatgctcgttaggctgaccgaggttgacgtgtacgatgaagaggagattaatattaatctgagggaagaaagtgactggcactatctccagttgtcagacccttggccagacctggagctatttaaaaaacttccttttgattatattatacatgatccaaagtatgaagacgcctctctaatatgctctcactaccaaggaatcaagagcgaggacaggggcatgtctcgtaagccagaggatctttatgtgcgtaggcagacagccaggatgcggttgtctaagtacgccgcatacaatacataccatcactgtgaacagtgccatcaatacatgggtttccaccctcgataccaactgtatgaatctacactgcatgcctttgcgtttagctactctatgttgggtgaagaaatccaactgcactttatcatccctaaaagcaaggaacaccactttgtctttagccaaccaggcggtcagctggagtctatgagactacctctagttaccgacaaatcccatgaatatattaagagtcccactttcactcccaccactgggaggcacgagcatggacttttcaatctgtatcacgccatggacggagccagtcacctgcacgtactggtcgtgaaggaatatgagatggctatttacaagaagtactggcctaatcacattatgttggtcctgccatccatattcaattcagcaggtgttggcgcagctcactttctcataaaggaactgtcctatcacaatttagaactggaacggaatcggcaggaggaactcggaattaaaccccaagatatctggcccttcatcgtcataagtgacgacagctgtgttatgtggaatgtggtagacgtaaacagcgccggagagagatccagggaattttcctggtccgagcggaatgttagccttaaacacatcatgcaacacatcgaagcagcacccgatatcatgcattatgctttgctgggtctgcggaaatggtcatccaagacccgagcctccgaggtgcaggaacctttttcccggtgtcatgtccacaatttcattatcttgaacgtggacctcacacagaatgtgcagtacaaccagaatcggtttctatgcgacgatgtggatttcaaccttcgggtgcacagcgcaggtttgctactctgtcggttcaaccgatttagcgtgatgaagaagcaaattgtggtcggcggtcaccgatcattccacattacctcaaaagtctccgacaattccgcagccgttgtgcccgctcaatatatctgtgcaccagatagcaaacacacattcctggcagcaccagcccagcttttgctagagaagttcctgcagcaccattcacaccttttcttcccattatctttaaaaaaccatgatcatcccgtattgtctgtggattgttatctgaatcttggctctcagatctccgtgtgctacgtgagctcccgtccacactcactgaacatttcctgttctgacctgttgttctcaggactgctcctgtatctctgcgattctttcgtcggcgcaagtttcctgaaaaagttccatttcttgaaaggggcaaccttgtgtgttatttgccaggaccgctcttcattacgccagacagtagttaggcttgaacttgaagacgaatggcagttcaggcttcgggatgagttccaaaccgccaacgctagagaggataggcccctcttcttcctgacagggaggcacattta

SEQ ID NO: 266990 - DNA, 1582 bp, Artificial Sequence
  derived and/or modified sequence
gacaataggatcatggccttacccttgaagcattaccgagaaggagaacagagatgggcttgaagagccacgtgctgccggctccaaattcccaaggacaaggatccctctgcatttttgtctatgtaacctcttatatggactacattcagctgcaaggaaaggaaaaccttgattgcagtggtttaaacaaacagaagattgtttttccacatagcatggattctggagatgggtggctaatggtattggttcaacaactccacgaaggtaggggtcacgtcttggatccttttgccttaatctcagtgctcgttacttcatggtcccaagatggctgctgtatccccaagaatcatgtctgcgttcaaggaaggaggggtggaggaagaggaagggccaaactagctggacccgtcaccttctatcagaaagtaaaacctcgtcagaagtctgtttcctgctctctccctctgcatatcttcacttagatgcccttggcccgagccagctaaggtcagctgttacctcagctgggcctggatggtctaggatagccttactcacttgcctggcaggtgacaggctgttggctggaattgcttggttctcctccatgtggcctctccagcaggctagctcaggcttattcacatgatggcttcaggattccaaagagagtgagagtagaagctgaaagacttcttgagttcttggcctggaactgggactaggacagtgtcacttctgctaagttcttttggtcagagcaaatcacaaggctttacccagattcaagggatgagaaacagactacatgtcttgatgaggggaaccacaaagagcttgtggccatttttcacctatcacaaataattttggatgggtatttatttggataaaggtatttccctcttccccctttctctctgtctcatggggcctcactctgccaagttggaaggcactaagacattgtcctggccctcagggtctaggggaagaggtgttggggcaggaagtgagtctctccatgggctggacccactgtagtaggagtgcctccttgtctgcactgctggtatggggttaggccaggtaggacattccagaggggcttctgaaaaccaagagtccctggggaaagggaacagagtaaggcaggccttgttctcactgccctctaagggaacttggtcactcggcacttttaagcctcagtttctccagttcaataataaggacaagagcttttcccatgcattctctttccccgggaaagttgactgaggtgaccagtaatagaattgaaaagggagagtgtcttcagtgcaatgtggcatcctggattgggtcttggaacaaaaacaggacattagtgggaaaattggaaatctgaaaaaagtctgaattttagttaatataccaatttcagtctcttggttttgacagatgtaccatggtgatgtaagatgttgaccttggggtaggctgggtgaagggtatacaggaactctttgtactatctctgcaacttctctgtaaatctagtatcattccaaaataaaagtttatttaattt

SEQ ID NO: 266991 - DNA, 5850 bp, Artificial Sequence
  derived and/or modified sequence
atgggcaattcttacgctggccaactaaagactactaggttcgaggaggtgctccacaatagcatcgaggctagtctgaggagtaataacctggtgcctagacctatcttttcacagctgtacctcgaggccgaacagcaactggcagctctcgaggggggctccagggtcgacaacgaggaggaggaggaggagggcgaaggaggactggagaccaacgggcctcccaatccgttccagcttcaccccctgccagaagggtgttgcacaaccgacggattttgccaggccggaaaggatctccggctggtgtccatctccaacgagcccatggatgtgcccgctggcttcctgctggtaggagtcaagtctccaagcctccctgatcacctcctcgtatgcgcagtggacaagcgcttcctcccggacgataatggacacaacgccctactgggtttttcagggaattgcgtgggttgcggaaagaagggcttttgctactttaccgaatttagcaatcatatcaaccttaaactcacaactcagcccaaaaagcagaagcacctgaagtattacctggtgcgaaacgcgcaaggaacattaacgaagggacccttgatctgttggaagggatctgagttccgatctaggcagatccccgccagcacctgctcatctagtctgtttcccgcccttgaatccaccgccgcctttcctagcgagccagtacctggcacgaatcctagtattctcatgggcgcacagcaagcagggcctgcctcggaccacccttcactcaacgctgccatgggaccggcagtgttcaatggtaaggacagcccaaagtgccaacagcttgcgaaaaacaatttgcttgcgctgcctcggccttctgcgctgggaatactgagcaactcaggtcctcccaagaaacggcataagggctggagtcccgaatcccctagtgcccccgatggggggtgcccgcagggcggcggaaaccgggcgaagtacgagtcagccggaatgtcttgcgtgccgcaggtaggcctggtggggccggctagtgtcacgttccccgtcgtagcctccggggagcctgtctcagtcccagacaatctgctgaaaatctgtaaagctaagcccgtcatctttaagggtcacgggaactttccctatctgtgcgggaatcttaacgacgtggtagtctcaccattactgtatacatgctatcaaaacagccaatctgtgagccgcgcctacgagcagtacggcgcatctgcaattcagccaatatctgaagagatgcagctacttctaactgtctactatcttgttcagctggccgctgatcaggtgccactgatggaggaccttgagcagatatttctgcggagctggagagaaagccatctaactgaaataaggcagtatcaacaagcccctcctcagccttttccccccgccccttcagccgctgctccagtgacatccgctcagttaccttggctggccagccttgccgcatcatcttgcaacgattccgtccacgtgatagagtgtgcctacagcctcgccgagggcctctctgaaatgttccgcctgctggtcgagggaaagctggccaaaacaaactacgtggtaattatatgtgcatgtcgctccgcggcaatcgatagctgcatcgctgtcacaggtaagtaccaggctaggatcttatctgaatcactgctcacaccagcggagtaccagaaggaagtcaattacgaactggtcactggaaaagtcgactcactgggtgcattcttctctacactgtgcccagagggtgatattgacatcctgctcgacaaatttcatcaagaaaatcagggacatatcagctctagtttggcagccagttcagtaaccaaagctgcctctctcgatgtgtctggcactcccgtgtgtacgtcatataacctcgaaccgcacagtattcgacctttccagcttgccgtcgcccagaaactgctaagccacgtgtgttcaattgccgatagcagcacccagaacctggatttaggaagtttcgaaaaagtggactttttgatctgcatccccccatccgaagtcacttaccaacaaactctgcttcatgtgtggcactctggggtgctgctggaactggggctgaagaaagaacacatgaccaagcaaagagtggaacagtacgttctgaaactggacactgaagcccagactaagttcaaggcgtttctgcagaacagtttccaaaatcctcatacactcttcgtgctgattcacgaccacgcccattgggatctggtgtcatctaccgttcacaacctgtactcacagagtgaccctagtgtgggactcgtggacaggttgctgaattgccgagaggtgaaagaggcacccaatattgtcacgctccatgtgacctcatttccatatgccttgcagactcagcatactctcattagtccttataatgaaatacactggcctgcctcatgttcaaatggtgtcgatctgtaccatgagaacaaaaagtatttcggtctgagcgaatttattgaatccactttgtctggccactctctgcccttgttgcgctatgattcttcgttcgaagctatggtgacggcactgggaaagcgatttccaaggttgcactccgctgtcatcaggacctttgtactcgtgcagcactatgccgctgctctaatggcagtaagcggcctgcctcagatgaaaaattacactagcgtagaaacgctggagatcacgcagaatctcttaaatagccccaaacagtgtccatgcggccatggacttatggttttgctccgggtcccatgctctccgctcgcagtcgtggcatatgagcgccttgcccacgtgagagccagactagctctggaagaacatttcgagattatcctgggctctcccagtagtggagtaactgtgggaaaacactttgtgaaacagctgagaatgtggcagaaaatagaggacgtggagtggaggcctcaaacttacttggagctggaggggctgccttgtattctgatttttagcggcatggaccctcatggagaatccctaccgaggagtctgagatactgcgatctgcgactcattaatagcagctgccttgtcaggacggcgttggaacaggagctgggtttggcggcttactttgtctctaacgaggtgccactcgagaaaggtgcccgtaatgaagccctggaaagtgatgcagagaagctgtcttctaccgacaacgaggatgaggagcttggaaccgaagggtccacctctgaaaaacgtagcccgatgaaacgcgagcgctcccgcagccacgactcagcaagctcgtccttgagctccaaggcctccggctccgccctgggaggcgagtcttcagctcagcccaccgcccttccacagggagagcatgcacggtcccctcagccccgggggcccgccgaagagggccgcgccccaggggagaaacagaggcctagagcgtctcagggtcccccaagcgctatctcacgccattctccgggaccgaccccccagcccgattgcagcctgaggactggtcagaggtccgtccaggtctctgtgacctcatcttgcagtcaattaagttcaagcagcggctcttcgagctcctcagtagccccggcagcgggcacttgggttttgcaggcatctcaatgttctctgaccaaggcttgtcgacaacctcccatagttttcttgcctaaactggtgtacgacatggtggtgagcactgatagttcagggctcccaaaggcagcatcgttactcccaagtccctctgttatgtgggctagctccttcaggcctctgctatccaagacaatgacttctacagagcagtcgctttattacaggcaatggacagttcccaggccctctcatatggactatggaaacagagcagagggcagagtcgacgggttccacccgaggcggttgctgctaagtggtcccccccagatcggtaaaacaggggcctatctccagtttctctccgtcctgtcaaggatgctcgtccgactcacggaagtcgatgtttacgacgaggaagagattaatatcaacttacgggaagagagcgactggcattatctccagctgtcagatccttggcctgacctagaactgtttaagaagctgccttttgactatattatacacgatccaaaatacgaggacgcttctctgatttgtagccattaccagggaataaaaagtgaagacagagggatgtccaggaaaccggaggacttgtatgtcaggcgacaaactgctcgcatgaggcttagcaagtacgcagcctataatacctaccaccactgcgagcagtgccaccaatacatgggatttcatccgcgctaccagctttatgagagcaccctgcacgcgttcgcttttagctatagtatgctcggagaggagatacaactgcatttcattatcccaaagagcaaggagcaccatttcgtgttctcacagcccggcggccagttggaatccatgagactgccccttgtaaccgataaatcccacgagtacatcaaaagcccaaccttcacgcctacaactggacgtcatgagcacgggctgtttaatctctaccacgcaatggatggggcctcccatctgcacgtgcttgtcgtgaaagagtacgaaatggcaatctacaagaagtattggccgaaccatatcatgttggtcctgccgtctatcttcaattcagccggcgtgggagcggcccactttctcattaaagagctctcttaccacaacctagagctcgagaggaacaggcaggaggaactcggtatcaagcctcaagacatatggccgtttatcgtgatcagcgacgactcctgcgtgatgtggaacgtagttgacgtgaactcagccggcgagcgctcacgggaattctcctggagcgagaggaacgtcagtctgaaacatataatgcagcacattgaggcagcccctgacatcatgcactacgcactcttgggtcttcggaagtggtcttccaaaacccgggcctcagaggttcaggagcctttttcgcgctgccacgtgcataacttcatcattcttaacgtggacctcacccagaacgtccagtacaatcagaataggttcttgtgcgacgacgttgacttcaaccttagggtccattctgcgggcctgttgctgtgcaggtttaatcgattctcagtgatgaagaagcagatcgtggtcggcggacataggagcttccatattacgtcaaaggtttctgacaactcggctgccgtcgtccccgcgcagtacatttgcgctcccgacagcaaacatacattcctcgccgcacctgcgcagctcctgctggagaagttcctgcagcaccacagtcacctgtttttccccttatcattgaagaaccatgatcatcccgtgctgagtgtcgattgttaccttaacctgggatcacaaatttccgtttgctatgtttcatcccggccacatagtctcaacatctcatgtagcgatctcctgttctctgggctcctgctttatttgtgtgacagttttgtgggggctagttttttaaagaaattccattttttgaagggcgcaaccctgtgcgtaatatgccaggaccgcagttcactgcgacagacggtcgtgagactggagctggaagacgagtggcagtttcggctgcgggacgagtttcaaaccgccaacgccagagaagatcggccactattctttcttaccgggcgccatatttag

SEQ ID NO: 266992 - DNA, 8444 bp, Artificial Sequence
  derived and/or modified sequence
gaggcagctcctagtgaaacagtctaagaggtgtcaggctctgctgagtgctaaattagagaaagctgttacttatataacttcctgtaattgcccggcagtagctgcagctgaggacagccaccctttcttcgtctctgctgagcgaaggctacacggcccttcctccttgcagctgtttcaccttctaccttgcgtggagccaggcttttgcaccgaatctgagatgccattttaaacagaagactccatcctcttgaagatgggaaattcttacgctggacagctgaagacgacacgctttgaagaggtcttgcacaattccatcgaggcatccctgcggtccaacaacctggtgcccaggcccatcttttcccagctgtacctggaagctgagcagcagcttgccgctctagaaggtggtagccgagtggacaatgaggaagaggaagaagagggagaaggagggctggaaacaaatggccccccaaaccctttccagctgcaccctctgcctgaaggatgctgtaccacagacgggttttgccaggccgggaaggacctgcgccttgtctccatttccaacgagcccatggatgtccctgcgggctttctcctcgtgggggtcaagtcccccagcctgccggaccatctcctggtgtgcgccgttgacaagaggttcttgccagatgacaatggccacaatgctcttcttggtttctctgggaattgtgttggctgtggaaagaaaggcttctgttacttcacggaattctccaatcatataaatctgaaactgaccactcaacccaagaagcagaaacacttgaagtattacctggtccgtaatgcacaagggactctaaccaaaggacctttaatctgttggaaaggctcagagtttagaagccggcagatccccgccagtacttgttccagttccctcttcccagccctggagagcacggctgccttccccagcgagcccgttcctgggacgaaccccagcatcctgatgggagctcagcaggcaggaccagcttctgatcacccctcactaaacgcagcaatgggtccggctgttttcaacggcaaagattccccgaagtgccaacaactggcaaagaataacctgttggccctgccgcgaccatcggctttaggtatcttgtcaaactccgggccccccaaaaaacgccacaaagggtggtctccagaatctccatcagctccagatggtggctgcccccaaggtggtgggaacagagctaagtatgagagcgcaggcatgtcctgcgtgccgcaggttggcttggtgggaccagcttcagtcacctttccagtggtggcctctggagaaccagtgtctgttcctgacaacttgctgaaaatatgcaaggccaagccagtgatatttaaaggccatgggaacttcccttacctctgtgggaacctgaatgacgtcgtggtcagccccctcttgtacacgtgctaccagaattcccagtctgtctcacgggcatacgagcagtacggcgcctctgccatccagcccatctccgaggagatgcagctcctgcttaccgtctactacctggtccagctggccgcggaccaggtgcccttgatggaggacctggagcagatcttcctgcgctcttggcgcgagtcgcacctgaccgagatccggcagtaccagcaggcgccgccgcagcccttcccgcccgcgcccagcgccgcggcacccgtgacctccgcgcagctgccctggctggccagcctggccgccagctcctgcaacgacagcgtgcacgtcatcgagtgtgcttactccctggccgagggcctctccgagatgttccggctgttggtcgagggcaagcttgccaagaccaactacgtggtcatcatctgcgcctgccgcagcgcggccatcgactcctgcatcgccgtcaccggaaaataccaagcccggattctttccgagagccttctcactcctgcggagtaccagaaggaagtcaattacgagctggttacggggaaggtagactcgctgggggccttctttagcaccctctgtccagagggtgacattgacattttgctggacaaatttcaccaggaaaatcaaggccatatttcttcctcactcgctgcctcttctgtcactaaagcagcatccctggatgtcagtgggacaccggtgtgcacaagttacaatctggagccacacagcatccggcccttccagctggcagtagcgcagaagctcctctcccatgtgtgttccattgcggattccagcacccaaaatctggacctgggatcctttgagaaggtggactttctcatttgcattcccccctcagaagtgacctaccagcagactctgctccatgtgtggcattcaggggttttgctggagcttggtctgaagaaagagcacatgacgaagcagagggtggaacagtatgttctgaagctagacacggaggcacagacaaaatttaaggcttttctgcaaaactccttccagaacccgcatacactttttgtcctaatccatgaccatgcgcactgggatcttgtgagtagcactgttcataacctctattctcaaagtgacccgtcggtgggattggtggaccgattgctcaactgcagggaggtgaaggaggcccccaacattgtgacacttcacgtgacctccttcccgtatgcactgcagacacagcacaccctcatcagcccctacaacgagatccactggcctgcctcctgcagtaatggagtggacttatatcatgaaaataagaagtacttcgggctgtcggagtttattgaatccaccctttcaggacacagcctccccttgctcagatacgatagctcctttgaggccatggtcactgcattaggaaaaaggttcccccgcctgcacagcgcggtgatcaggacctttgttctcgtgcagcactacgcggccgccctgatggccgtaagcggcctcccgcagatgaagaactacacgtcggtggagacgctggagatcacgcagaacctcctcaactccccgaagcagtgcccctgcggccacgggctcatggtcctgctgcgggtgccctgttcgcccctggcggtggtggcctatgagcggctggcccacgtgcgggcccggctggcgctggaggagcactttgagatcatcctgggcagtcccagctcaggcgtcaccgtggggaagcacttcgtaaagcagctcaggatgtggcagaaaattgaggatgtggagtggagaccccagacttacttggagctggagggtctgccttgcatcctgatcttcagtgggatggacccgcatggggagtccttgccgaggtctttgaggtactgtgacctgcgattgataaactcctcctgcttggtgagaacagccttggagcaggagctgggcctggctgcctactttgtgagcaacgaggttcccttggagaagggggctaggaacgaggccttggagagtgatgctgagaagctgagcagcacagacaacgaggatgaggagctggggacagaaggctctacctcggagaagagaagccccatgaaaagggagaggtcccgctcccacgactcagcatcctcatccctctcctccaaggcttccggttcagcgctcggtggcgagtcctcggctcagcccacagcactcccccagggagagcatgccaggtcgccccagccccgtggccccgcagaggagggcagagcccctggtgagaaacagaggccccgggcaagtcaggggccaccctcggccatcagcaggcacagtcccgggccgacgccccagcccgactgtagcctcaggaccggccagaggagcgtccaggtgtcggtcacctcgtcgtgctcccagctgtcctcctcctcgggctcatcctcctcatccgtggcgcccgctgccggcacgtgggtcctgcaggcctcccagtgctccttgaccaaggcctgccgccagccacccattgtcttcttgcccaagctcgtgtacgacatggttgtgtccactgacagcagtggcctgcccaaggccgcctccctcctgccctccccctcggtcatgtgggccagctctttccgccccctgctcagcaagaccatgacatccaccgagcagtccctctactaccggcagtggacggtgccccggcccagccacatggactacggcaaccgggccgagggccgcgtggacggcttccacccccgcaggctgctgctcagcggcccccctcagatcgggaagacaggtgcctacctgcagttcctcagtgtcctgtccaggatgcttgttcggctcacagaagtggatgtctatgacgaggaggagatcaatatcaacctcagagaagaatctgactggcattatctccagcttagcgacccctggccagacctggagctgttcaagaagttgccctttgactacatcattcacgacccgaagtatgaagatgccagcctgatttgttcgcactatcagggtataaagagtgaagacagagggatgtcccggaagccggaggacctttatgtgcggcgtcagacggcacggatgagactgtccaagtacgcagcgtacaacacttaccaccactgtgagcagtgccaccagtacatgggcttccacccccgctaccagctgtatgagtccaccctgcacgcctttgccttctcttactccatgctaggagaggagatccagctgcacttcatcatccccaagtccaaggagcaccactttgtcttcagccaacctggaggccagctggagagcatgcgactacccctcgtgacagacaagagccatgaatatataaaaagtccgacattcactccaaccaccggccgtcacgaacatgggctctttaatctgtaccacgcaatggacggtgccagccatttgcacgtgctggttgtcaaggaatacgagatggcaatttataagaaatattggcccaaccacatcatgctggtgctccccagtatcttcaacagtgctggagttggtgctgctcatttcctcatcaaggagctgtcctaccataacctggagctcgagcggaaccggcaggaggagctgggaatcaagccgcaggacatctggcctttcattgtgatctctgatgactcctgcgtgatgtggaacgtggtggatgtcaactctgctggggagagaagcagggagttctcctggtcggaaaggaacgtgtctttgaagcacatcatgcagcacatcgaggcggcccccgacatcatgcactacgccctgctgggcctgcggaagtggtccagcaagacccgggccagcgaggtgcaagagcccttctcccgctgccacgtgcacaacttcatcatcctgaacgtggacctgacccagaacgtgcagtacaaccagaaccggttcctgtgtgacgatgtagacttcaacctgcgggtgcacagcgccggcctcctgctctgccggttcaaccgcttcagcgtgatgaagaagcagatcgtggtgggcggccacaggtccttccacatcacatccaaggtgtctgataactctgccgcggtcgtgccggcccagtacatctgtgccccggacagcaagcacacgttcctcgcagcgcccgcccagctcctgctggagaagttcctgcagcaccacagccacctcttcttcccgctgtccctgaagaaccatgaccacccagtgctgtctgtcgactgttacctgaacctgggatctcagatttctgtttgctatgtgagctccaggccccactctttaaacatcagctgctcggacttgctgttcagtgggctgctgctgtacctctgtgactcttttgtgggagctagctttttgaaaaagtttcattttctgaaaggtgcgacgttgtgtgtcatctgtcaggaccggagctcactgcgccagacggtcgtccgcctggagctcgaggacgagtggcagttccggctgcgcgatgagttccagaccgccaatgccagggaagaccggccgctcttttttctgacgggacgacacatctgaggaagacagcggcgagttttctgaagagatgagtgctcagagccctcatgctgttgaggctaaagggaggcctggaacggtggggcgtttgactggaatggaccccagggactgtccaggtgcagcccctcctagtacacatgggcccccgaggccgtggtcctgggagccaggaagactccgcagtgggtgagaatgaaaacttgagactcccaagttctgggccagcccattgctctgggctgttttaaagcccatttcacgaggaacaaagatttacttcctgtcctgccattcgtgtgcttccatggacaaacctgatttttttctcttagttctaaagaatcttgggttattttgtagcggtgccagtatttcagtagatgggatttcagccaagtaggttcccctgtaacctcctacaaagcaatattccaaaggaacattttaactgtaaaggctggagacaagaaaaaataagtagatcgttttaataacaattatttaattgcctataagtttgctgtttcagaggctagcccaaaggcatcaaatttaataaagttaaacaaattgatttacttcagagcaaatatgatcctattaaaataatatagggtaaataccctacctcttagaaagggcaaaaatgcaaagaagctttctttaaaactaaaagggttttttggggggggagttggcggggaggaaataaggctaacagaggttgacctaaaattagccttacaaaggagaaaggaccacattgcttacttgaaacagacaatgaaaacaaccaaagtgatatataaaatagttgatgagaactagacttatgactgtagtttactagagtttagttttcagttgctgaagtagctcattttctcttactaatgtttggttcctcagggaagaatctcacttgactagagaggaggtgggaacagaagagagaaggaggcagggagatgtatttcttagggctcaccccttcacagactgacagaatggttttgttttgttttgttttgttttgttttgtttttgagatggactctagctctgtcacccaggctggagtgcagtggtgcgatctcggctcactgcaagctccgcctcccgggttctcaccattctcctgcctcagcctcccgagtagctgggactacaggcgcccaccaccacgcccggctaattttttgtattttttagtagagacggggtttcaccatgttagccaggatggtctcgatctcctgacctcgtgatccgcccgcctcggcctcccaaagtgctgggattacaggcgtgagccaccgtgcctgccccagaatggtttttaaagccacagttgagaggccacccattgcccggcgcctggacagtgatcatcttgttcatcttgttcagtcctttcttgtgtgattggaattattcatcccctttgaaagatgagaaggttgagatgcaaagagtctacctttccaagttctcactgctggaaagagctagaagcacagttcaaagttctggcttctggactctgcagtccaggtctcccttctcccacttgcctaccctcaatgccacactgtttttgaagtggcccataacttgaaggaaaagtttaaagacagttcaatttaatcatcagaatgcattcttttttttttcggagacggagtttcactcttgctgcccaggctggagtgcaatggtgcaatgacctcggctcactgcaacctctgcctcctgggttcaagtgattctccagcctcagcctcccgagtagctgggattatgggcgcccaccaccatgcccagctaatttttgtattttttttttttagtagagatggggtttcgccaggttggccaggctggtcttgtgaactcctggcctcaggtgatctgcccacctcatcctccaaaagtgctgggattacaggcatgagccactgcgcctggcctcagaatgcattcttacacatctatcctagacatttataagcactctaatggataacaatccaagaataaatgattgtaaaagatgatgccgaagagttgatgtcaatctttttttcctaagaaaaaaagtccgcgagtattaaatatttagatcaatgtttataaaatgattactttgtatatctcattattcctattttggaataaaaactgaccttctttaatcatatacttgtcttttgtaaatagcagcttttgtgtcattctccccactttattagttaatttaaattggaaaaaaccctcaaactaatattcttgtctgttccagtcttataaataaaacttataatgcatg

SEQ ID NO: 266993 - DNA, 8484 bp, Artificial Sequence
  derived and/or modified sequence
aaataaagttttttcaatggaaggcttgcagctcttgaggacctgccaaatggaagaaggacagagacctggagccctatggaaagttctgacaccatgtgtggaaggacatggcttttaacacgtgtggtgactggagtagctgcagctgaggacagccaccctttcttcgtctctgctgagcgaaggctacacggcccttcctccttgcagctgtttcaccttctaccttgcgtggagccaggcttttgcaccgaatctgagatgccattttaaacagaagactccatcctcttgaagatgggaaattcttacgctggacagctgaagacgacacgctttgaagaggtcttgcacaattccatcgaggcatccctgcggtccaacaacctggtgcccaggcccatcttttcccagctgtacctggaagctgagcagcagcttgccgctctagaaggtggtagccgagtggacaatgaggaagaggaagaagagggagaaggagggctggaaacaaatggccccccaaaccctttccagctgcaccctctgcctgaaggatgctgtaccacagacgggttttgccaggccgggaaggacctgcgccttgtctccatttccaacgagcccatggatgtccctgcgggctttctcctcgtgggggtcaagtcccccagcctgccggaccatctcctggtgtgcgccgttgacaagaggttcttgccagatgacaatggccacaatgctcttcttggtttctctgggaattgtgttggctgtggaaagaaaggcttctgttacttcacggaattctccaatcatataaatctgaaactgaccactcaacccaagaagcagaaacacttgaagtattacctggtccgtaatgcacaagggactctaaccaaaggacctttaatctgttggaaaggctcagagtttagaagccggcagatccccgccagtacttgttccagttccctcttcccagccctggagagcacggctgccttccccagcgagcccgttcctgggacgaaccccagcatcctgatgggagctcagcaggcaggaccagcttctgatcacccctcactaaacgcagcaatgggtccggctgttttcaacggcaaagattccccgaagtgccaacaactggcaaagaataacctgttggccctgccgcgaccatcggctttaggtatcttgtcaaactccgggccccccaaaaaacgccacaaagggtggtctccagaatctccatcagctccagatggtggctgcccccaaggtggtgggaacagagctaagtatgagagcgcaggcatgtcctgcgtgccgcaggttggcttggtgggaccagcttcagtcacctttccagtggtggcctctggagaaccagtgtctgttcctgacaacttgctgaaaatatgcaaggccaagccagtgatatttaaaggccatgggaacttcccttacctctgtgggaacctgaatgacgtcgtggtcagccccctcttgtacacgtgctaccagaattcccagtctgtctcacgggcatacgagcagtacggcgcctctgccatccagcccatctccgaggagatgcagctcctgcttaccgtctactacctggtccagctggccgcggaccaggtgcccttgatggaggacctggagcagatcttcctgcgctcttggcgcgagtcgcacctgaccgagatccggcagtaccagcaggcgccgccgcagcccttcccgcccgcgcccagcgccgcggcacccgtgacctccgcgcagctgccctggctggccagcctggccgccagctcctgcaacgacagcgtgcacgtcatcgagtgtgcttactccctggccgagggcctctccgagatgttccggctgttggtcgagggcaagcttgccaagaccaactacgtggtcatcatctgcgcctgccgcagcgcggccatcgactcctgcatcgccgtcaccggaaaataccaagcccggattctttccgagagccttctcactcctgcggagtaccagaaggaagtcaattacgagctggttacggggaaggtagactcgctgggggccttctttagcaccctctgtccagagggtgacattgacattttgctggacaaatttcaccaggaaaatcaaggccatatttcttcctcactcgctgcctcttctgtcactaaagcagcatccctggatgtcagtgggacaccggtgtgcacaagttacaatctggagccacacagcatccggcccttccagctggcagtagcgcagaagctcctctcccatgtgtgttccattgcggattccagcacccaaaatctggacctgggatcctttgagaaggtggactttctcatttgcattcccccctcagaagtgacctaccagcagactctgctccatgtgtggcattcaggggttttgctggagcttggtctgaagaaagagcacatgacgaagcagagggtggaacagtatgttctgaagctagacacggaggcacagacaaaatttaaggcttttctgcaaaactccttccagaacccgcatacactttttgtcctaatccatgaccatgcgcactgggatcttgtgagtagcactgttcataacctctattctcaaagtgacccgtcggtgggattggtggaccgattgctcaactgcagggaggtgaaggaggcccccaacattgtgacacttcacgtgacctccttcccgtatgcactgcagacacagcacaccctcatcagcccctacaacgagatccactggcctgcctcctgcagtaatggagtggacttatatcatgaaaataagaagtacttcgggctgtcggagtttattgaatccaccctttcaggacacagcctccccttgctcagatacgatagctcctttgaggccatggtcactgcattaggaaaaaggttcccccgcctgcacagcgcggtgatcaggacctttgttctcgtgcagcactacgcggccgccctgatggccgtaagcggcctcccgcagatgaagaactacacgtcggtggagacgctggagatcacgcagaacctcctcaactccccgaagcagtgcccctgcggccacgggctcatggtcctgctgcgggtgccctgttcgcccctggcggtggtggcctatgagcggctggcccacgtgcgggcccggctggcgctggaggagcactttgagatcatcctgggcagtcccagctcaggcgtcaccgtggggaagcacttcgtaaagcagctcaggatgtggcagaaaattgaggatgtggagtggagaccccagacttacttggagctggagggtctgccttgcatcctgatcttcagtgggatggacccgcatggggagtccttgccgaggtctttgaggtactgtgacctgcgattgataaactcctcctgcttggtgagaacagccttggagcaggagctgggcctggctgcctactttgtgagcaacgaggttcccttggagaagggggctaggaacgaggccttggagagtgatgctgagaagctgagcagcacagacaacgaggatgaggagctggggacagaaggctctacctcggagaagagaagccccatgaaaagggagaggtcccgctcccacgactcagcatcctcatccctctcctccaaggcttccggttcagcgctcggtggcgagtcctcggctcagcccacagcactcccccagggagagcatgccaggtcgccccagccccgtggccccgcagaggagggcagagcccctggtgagaaacagaggccccgggcaagtcaggggccaccctcggccatcagcaggcacagtcccgggccgacgccccagcccgactgtagcctcaggaccggccagaggagcgtccaggtgtcggtcacctcgtcgtgctcccagctgtcctcctcctcgggctcatcctcctcatccgtggcgcccgctgccggcacgtgggtcctgcaggcctcccagtgctccttgaccaaggcctgccgccagccacccattgtcttcttgcccaagctcgtgtacgacatggttgtgtccactgacagcagtggcctgcccaaggccgcctccctcctgccctccccctcggtcatgtgggccagctctttccgccccctgctcagcaagaccatgacatccaccgagcagtccctctactaccggcagtggacggtgccccggcccagccacatggactacggcaaccgggccgagggccgcgtggacggcttccacccccgcaggctgctgctcagcggcccccctcagatcgggaagacaggtgcctacctgcagttcctcagtgtcctgtccaggatgcttgttcggctcacagaagtggatgtctatgacgaggaggagatcaatatcaacctcagagaagaatctgactggcattatctccagcttagcgacccctggccagacctggagctgttcaagaagttgccctttgactacatcattcacgacccgaagtatgaagatgccagcctgatttgttcgcactatcagggtataaagagtgaagacagagggatgtcccggaagccggaggacctttatgtgcggcgtcagacggcacggatgagactgtccaagtacgcagcgtacaacacttaccaccactgtgagcagtgccaccagtacatgggcttccacccccgctaccagctgtatgagtccaccctgcacgcctttgccttctcttactccatgctaggagaggagatccagctgcacttcatcatccccaagtccaaggagcaccactttgtcttcagccaacctggaggccagctggagagcatgcgactacccctcgtgacagacaagagccatgaatatataaaaagtccgacattcactccaaccaccggccgtcacgaacatgggctctttaatctgtaccacgcaatggacggtgccagccatttgcacgtgctggttgtcaaggaatacgagatggcaatttataagaaatattggcccaaccacatcatgctggtgctccccagtatcttcaacagtgctggagttggtgctgctcatttcctcatcaaggagctgtcctaccataacctggagctcgagcggaaccggcaggaggagctgggaatcaagccgcaggacatctggcctttcattgtgatctctgatgactcctgcgtgatgtggaacgtggtggatgtcaactctgctggggagagaagcagggagttctcctggtcggaaaggaacgtgtctttgaagcacatcatgcagcacatcgaggcggcccccgacatcatgcactacgccctgctgggcctgcggaagtggtccagcaagacccgggccagcgaggtgcaagagcccttctcccgctgccacgtgcacaacttcatcatcctgaacgtggacctgacccagaacgtgcagtacaaccagaaccggttcctgtgtgacgatgtagacttcaacctgcgggtgcacagcgccggcctcctgctctgccggttcaaccgcttcagcgtgatgaagaagcagatcgtggtgggcggccacaggtccttccacatcacatccaaggtgtctgataactctgccgcggtcgtgccggcccagtacatctgtgccccggacagcaagcacacgttcctcgcagcgcccgcccagctcctgctggagaagttcctgcagcaccacagccacctcttcttcccgctgtccctgaagaaccatgaccacccagtgctgtctgtcgactgttacctgaacctgggatctcagatttctgtttgctatgtgagctccaggccccactctttaaacatcagctgctcggacttgctgttcagtgggctgctgctgtacctctgtgactcttttgtgggagctagctttttgaaaaagtttcattttctgaaaggtgcgacgttgtgtgtcatctgtcaggaccggagctcactgcgccagacggtcgtccgcctggagctcgaggacgagtggcagttccggctgcgcgatgagttccagaccgccaatgccagggaagaccggccgctcttttttctgacgggacgacacatctgaggaagacagcggcgagttttctgaagagatgagtgctcagagccctcatgctgttgaggctaaagggaggcctggaacggtggggcgtttgactggaatggaccccagggactgtccaggtgcagcccctcctagtacacatgggcccccgaggccgtggtcctgggagccaggaagactccgcagtgggtgagaatgaaaacttgagactcccaagttctgggccagcccattgctctgggctgttttaaagcccatttcacgaggaacaaagatttacttcctgtcctgccattcgtgtgcttccatggacaaacctgatttttttctcttagttctaaagaatcttgggttattttgtagcggtgccagtatttcagtagatgggatttcagccaagtaggttcccctgtaacctcctacaaagcaatattccaaaggaacattttaactgtaaaggctggagacaagaaaaaataagtagatcgttttaataacaattatttaattgcctataagtttgctgtttcagaggctagcccaaaggcatcaaatttaataaagttaaacaaattgatttacttcagagcaaatatgatcctattaaaataatatagggtaaataccctacctcttagaaagggcaaaaatgcaaagaagctttctttaaaactaaaagggttttttggggggggagttggcggggaggaaataaggctaacagaggttgacctaaaattagccttacaaaggagaaaggaccacattgcttacttgaaacagacaatgaaaacaaccaaagtgatatataaaatagttgatgagaactagacttatgactgtagtttactagagtttagttttcagttgctgaagtagctcattttctcttactaatgtttggttcctcagggaagaatctcacttgactagagaggaggtgggaacagaagagagaaggaggcagggagatgtatttcttagggctcaccccttcacagactgacagaatggttttgttttgttttgttttgttttgttttgtttttgagatggactctagctctgtcacccaggctggagtgcagtggtgcgatctcggctcactgcaagctccgcctcccgggttctcaccattctcctgcctcagcctcccgagtagctgggactacaggcgcccaccaccacgcccggctaattttttgtattttttagtagagacggggtttcaccatgttagccaggatggtctcgatctcctgacctcgtgatccgcccgcctcggcctcccaaagtgctgggattacaggcgtgagccaccgtgcctgccccagaatggtttttaaagccacagttgagaggccacccattgcccggcgcctggacagtgatcatcttgttcatcttgttcagtcctttcttgtgtgattggaattattcatcccctttgaaagatgagaaggttgagatgcaaagagtctacctttccaagttctcactgctggaaagagctagaagcacagttcaaagttctggcttctggactctgcagtccaggtctcccttctcccacttgcctaccctcaatgccacactgtttttgaagtggcccataacttgaaggaaaagtttaaagacagttcaatttaatcatcagaatgcattcttttttttttcggagacggagtttcactcttgctgcccaggctggagtgcaatggtgcaatgacctcggctcactgcaacctctgcctcctgggttcaagtgattctccagcctcagcctcccgagtagctgggattatgggcgcccaccaccatgcccagctaatttttgtattttttttttttagtagagatggggtttcgccaggttggccaggctggtcttgtgaactcctggcctcaggtgatctgcccacctcatcctccaaaagtgctgggattacaggcatgagccactgcgcctggcctcagaatgcattcttacacatctatcctagacatttataagcactctaatggataacaatccaagaataaatgattgtaaaagatgatgccgaagagttgatgtcaatctttttttcctaagaaaaaaagtccgcgagtattaaatatttagatcaatgtttataaaatgattactttgtatatctcattattcctattttggaataaaaactgaccttctttaatcatatacttgtcttttgtaaatagcagcttttgtgtcattctccccactttattagttaatttaaattggaaaaaaccctcaaactaatattcttgtctgttccagtcttataaataaaacttataatgcatgta

SEQ ID NO: 266994 - DNA, 5850 bp, Artificial Sequence
  derived and/or modified sequence
atgggcaacagctacgccggccagctgaagaccacccggttcgaggaggtgctgcacaactcaattgaagccagcctacggagcaacaatctcgtaccccgacccattttctcccaactttaccttgaagcagagcagcagctcgccgccctagagggcggcagtcgagttgataacgaagaagaggaggaggagggcgagggcgggctggagacgaacggacctccaaatccttttcaactccaccctctgccagaagggtgttgtacgaccgatggcttctgtcaggccggaaaagacctcagactggtcagtattagcaacgagccaatggatgtgccagccggtttcctgcttgtgggtgtgaaatcccctagtctgcccgatcatctcctcgtgtgcgccgtggacaaaagatttctccctgacgacaatggtcacaacgccttgcttggtttctctgggaactgtgtcggctgtggaaaaaaagggttctgttacttcacagagttttcaaatcatatcaacttaaaactaacgacacagcctaagaagcaaaagcacctcaagtactatttggtgagaaacgctcagggcaccttgacaaaaggacctctgatctgttggaagggtagtgagtttcgttccaggcagatccctgcatcaacttgctcttcttccctgttccctgcgctcgaatcaaccgccgcatttccatccgagccggtccccggaacaaaccccagcattctgatgggcgcacagcaggccggccctgccagtgaccatccaagtctgaacgccgcaatggggcctgcagtgttcaacggtaaggattcaccaaaatgccagcaactggctaaaaacaatctgctggccctgccaagaccctctgccctgggcattctatccaacagtggaccccctaagaagagacacaagggttggtcgccggagagccccagcgcccccgatggtgggtgtccgcaaggcggcggcaatcgggcaaagtacgagtctgcaggaatgagttgtgtcccacaggtggggctcgtcggccctgcaagcgtaacctttcccgtggtggcttcaggtgagccagttagcgtcccggacaacctgctgaagatttgcaaagccaagcctgtaatttttaagggacacgggaactttccctatttgtgtgggaatcttaatgacgtcgttgtgtctcctttactgtacacttgctatcaaaatagccagagtgtctccagggcttatgagcaatacggggcaagcgcgatccagcccatttctgaggaaatgcagctcttgctcaccgtttactacctggtccagctggctgcagatcaggttcctctcatggaggacctggaacagatcttcctcagatcctggagagaaagccatctgactgaaataaggcagtaccagcaggcaccacctcaaccatttccacctgccccttccgccgcagctcccgtcacatcggctcagctcccctggctggccagcctcgccgcttcttcatgcaacgactctgttcacgtaatcgaatgcgcttattctctcgccgagggcctatctgagatgtttcgcctgctggttgagggaaagctggcaaagacgaattacgtagtcatcatttgtgcctgccggtccgctgcaattgatagttgcattgccgtgaccggaaaataccaggccaggatcctcagcgagagccttttaacacctgcagagtatcaaaaagaggtgaactatgagctcgtcaccggtaaggtggattctctcggcgctttcttcagcaccctgtgcccagaaggcgatattgacatcctgctcgataaatttcaccaggagaaccaggggcacatcagtagcagcctagccgcaagcagtgtgacgaaagccgcctctctggatgtgtccggtacccctgtgtgcacttcttacaacctggagccacatagtatccgccctttccaactggctgtggcgcagaagctgctctcccatgtctgttcgatagctgactcaagcacccaaaacctagaccttggttccttcgagaaagttgattttctcatatgcatccctccgagtgaggtgacataccagcagactctcctgcacgtgtggcatagcggcgtgctgctggagctcgggctgaagaaggaacacatgactaagcagcgcgttgagcagtatgtcttgaagctcgataccgaggcacagaccaagttcaaggcatttttgcagaatagctttcagaaccctcacaccttattcgtcttgattcacgatcatgctcattgggatctcgtctctagcactgtgcacaacctgtactcacagagcgatccctcagtcgggctggtagaccggctcctgaactgtcgcgaagttaaagaggcccctaatattgtgaccttgcacgttacgagttttccgtacgccttgcaaacacagcacacactgatttccccttataatgaaattcactggcctgcctcctgtagtaatggtgtggatttgtatcacgagaataaaaagtatttcggcttaagcgagttcattgaatccactctctccggacattcactgcccctgctcaggtacgactcatccttcgaagcaatggtcaccgccttggggaagcgcttcccgcgtctgcactctgccgtgattcgtacctttgtgttggtgcaacattatgccgctgccctcatggcagtctcaggcctcccccagatgaagaattacacgtcagttgagaccctggagatcacccagaatctgctcaactcccctaagcagtgcccctgtggccacggacttatggtattgcttagagtcccctgctcccctttggcagttgtggcatacgagcggctggcccacgttcgcgcgaggttggccctggaggagcatttcgagatcatattgggaagtccctcatctggcgtcaccgtgggtaaacacttcgtgaaacaactcaggatgtggcagaagatagaggatgtggagtggagaccccagacttatcttgaactcgaaggactgccttgcatcctgattttctccggaatggatccacacggcgagtccctgcctcgttcactcaggtattgtgatcttcggctgatcaattcatcttgtttagtgaggaccgctctggagcaagagctcggcctcgcggcgtactttgtgtccaatgaagtgccgctagagaagggggcccgaaatgaagcgctggaaagcgacgccgagaagctgagcagcacggataatgaagatgaagagctgggcaccgaaggcagcactagcgagaaacgttctcccatgaaacgggaacgaagccgcagccatgactctgccagttccagcttgtcatcaaaagcttccggaagtgccttgggcggagagtcctccgcacagcccactgccctgccacagggcgaacacgcccggtctcctcagccacgcgggcctgccgaggaaggcagggccccgggcgagaagcaaagaccacgagcctcccagggccccccttcagcaatcagcagacacagtcctgggcccacgccccaacccgattgctcactgagaaccggccaaagatctgtgcaagtctcagtcaccagctcctgttcacagctcagcagcagctcaggctcttcatctagttctgttgcacccgctgcgggaacctgggtcctgcaggccagtcaatgttcccttacgaaggcctgtcggcaaccaccaattgtgttcctcccaaaattggtgtacgatatggtagtctcaactgacagtagcggcctccccaaggctgcatcactgctccctagtccctccgttatgtgggcctcctccttcaggcccctcctatccaaaaccatgacgtccactgaacagagcctgtattatcggcagtggactgtgccccgccccagccacatggattatggtaaccgtgccgagggccgcgtcgatgggttccacccacggcggctgctactcagtggtcctccacagatcggaaaaacaggggcctacctgcagttcctgagcgtactcagtcggatgctggtgagactaacagaagtcgatgtgtacgatgaagaagagattaacatcaatcttagggaggaatcagattggcactacctccaactctctgacccgtggccagacttggaactttttaaaaaattaccttttgactatatcatccatgaccctaaatatgaggacgcctcgctcatctgttcccattatcagggcattaagtcagaggaccgcggaatgtcgaggaagcctgaagacttgtatgtgcggcgccagaccgctcgaatgagattatccaagtacgctgcgtataacacctaccaccactgtgaacaatgtcaccagtacatgggctttcatccgaggtaccagctgtatgagtccacactgcacgctttcgccttctcttatagcatgctcggggaggagattcagctccatttcattattcccaaatccaaggagcaccatttcgtgttctcacagcctggaggtcagctggagagcatgcggctgccactggtaaccgacaaaagccatgaatatattaaaagccccacattcacgccaaccacaggacgccacgaacatggcttgtttaacttgtatcacgcaatggacggggcctctcacttgcatgtgctagtcgttaaagaatacgaaatggccatctataagaagtactggccaaatcacattatgcttgtcctgccttccatcttcaattcagccggagtgggggctgctcactttctcatcaaagaactatcataccacaacctggagctggagagaaacagacaggaggagctcggaattaaaccacaagatatctggcctttcatcgtaatctctgacgattcctgtgtgatgtggaatgtggtcgatgttaacagtgccggtgagcgctcccgtgagttttcttggagcgaacggaatgtttccctcaaacacattatgcagcacattgaggcagcccccgatattatgcactacgccctcctgggtttacgcaagtggagcagcaagactagggctagtgaagtgcaggagccattcagtaggtgccacgtgcataacttcattattctgaacgtcgaccttacccagaacgtccagtacaaccagaatagattcttgtgtgacgacgtggattttaatctcagagttcactctgccggacttttgctgtgtcggttcaatagattctccgttatgaagaagcagattgtggtgggcggacaccgctcattccacatcaccagtaaggtctctgacaatagcgctgccgtggttcccgcccagtacatctgtgctcctgatagcaaacatacattcctggccgctcctgcccagctgctgctcgaaaaattcttacaacatcattctcacctgtttttccccctgtctttgaaaaaccatgatcaccccgtgctcagcgtggactgctacctgaatctcgggtcacagatctcagtttgctatgtgtcgtctcggccacacagtctgaatatctcttgttccgatttgttgttttcaggtctgctcctgtacttatgcgactcattcgttggcgctagctttctgaagaagttccatttcttaaaaggggccacactgtgtgtaatctgtcaggaccgctccagcctgagacagaccgtggtgaggctggagctcgaggatgaatggcagttccgcttgcgggacgaatttcagaccgcaaacgccagggaggatcggcctctattcttcctgaccggccgccatatctag

SEQ ID NO: 266995 - DNA, 5849 bp, Artificial Sequence
  derived and/or modified sequence
atgggtaattcatacgcaggtcagctgaagacgacgagattcgaagaggtgttgcataactcaattgaggcctcactcagatctaacaatttggtgcctagaccaattttctcacagctgtacctggaggccgagcagcagctagctgcactggagggcggttctcgagtggataacgaggaagaggaagaggagggagaaggtggattggaaactaacggtccacctaatcctttccagctccatccattacccgaggggtgttgtacgacggatgggttctgccaagccggtaaagatcttcgactggtgtccatatctaatgagccgatggatgtacctgcaggcttcctccttgtcggcgtaaagagcccctcactcccagatcaccttctggtgtgcgcagtcgacaaacgattcctccccgatgataacggccacaatgctttgctcggtttttctggcaactgcgtgggctgtggtaaaaaaggattttgctactttaccgaattctccaaccacatcaacctgaaactgactacacagcctaaaaaacagaagcacctgaaatactaccttgtgaggaatgcacaagggactctgacaaaaggaccactgatttgctggaaggggtcagagttccgaagtcgccagatccccgcttcgacttgctcatcttccttgttccctgcactggaatccacagccgctttcccaagcgagccagtgcctggaacaaatccttcaatcctgatgggggctcagcaggccggaccggcatcagatcacccttcactgaatgccgctatggggccagccgtgtttaatggcaaagattcaccaaagtgccagcaattggcaaagaataacctccttgcactgccgcgaccctctgccctaggcatcctgtctaacagtggtccacccaagaagcgtcataagggatggtcgcccgagagcccatctgcaccagacggaggctgtccccagggtggaggcaacagggcaaaatacgaatccgccggaatgtcgtgtgtgccacaagtgggccttgtgggaccagctagtgtcacatttccggtggtcgcctcaggagaaccagtcagcgttcccgacaatctgctcaaaatctgcaaggcaaaaccagttatctttaaagggcacggcaacttcccatacttatgcgggaatcttaatgatgtggtcgtctcccccctgttatatacctgctaccagaactcacaatccgtgtctcgcgcttacgagcaatatggagccagtgcgattcaacccataagcgaggaaatgcagctcctcctgaccgtatattatcttgtgcagttggctgctgatcaggtaccactgatggaagatcttgagcaaattttcttgcggtcatggcgtgaatcccatctgaccgagatccggcagtatcagcaggctccaccccaaccctttcctcccgctcctagcgcagccgcaccagtgacatccgcccaacttccctggctggctagtctggccgcttctagctgtaacgactcggtccacgtaatagaatgtgcctactctcttgccgaaggcctcagtgagatgttccgacttctggtggaaggcaaactcgcgaaaactaactatgtcgtgatcatctgtgcatgccggagcgcggcaattgatagctgtatagcagttaccggcaaatatcaggccagaattctatctgagtccctcttaactcctgcagagtaccagaaggaagtgaattatgaactcgtgactggcaaggtggattcactgggtgctttcttttctacgctctgtccagagggggacattgatattctcctggacaaatttcatcaggagaaccagggccacatctcctcgtcccttgcagcatctagcgtgacaaaggctgctagcctggacgtgagcgggacccccgtctgtactagttataatttggaaccacatagcatccggccatttcagctggccgtcgctcagaaactcttgtcccatgtgtgtagcatagcagattcatctacacagaacctcgatttgggctcttttgaaaaagtggacttcttgatctgcatcccaccttcagaggtgacataccaacagactctcttgcacgtgtggcacagtggggtgttactggaattagggctcaagaaggagcacatgaccaagcagagagtggaacagtatgtgttgaagctagataccgaggcccaaactaaattcaaagctttcctgcaaaacagctttcagaatccacatacacttttcgtgctgatccacgaccacgcccattgggatctggtgagttccaccgtccataatctgtattcccagtctgatccttctgttgggttggtcgatcggcttctgaattgcagggaggtgaaggaagctccaaacattgtgaccctccacgttacaagctttccctatgctttacagactcagcacaccctgatctctccgtataatgagatccattggccagcctcttgctctaacggagtcgatctataccatgagaacaagaaatattttggcctgtctgagttcattgagtcaacgttgtccggtcacagcctcccgcttttacgatatgatagctctttcgaagctatggtgaccgccctcgggaaaaggttccctagacttcattccgccgtcatacggacattcgtgctcgtacaacactatgcggctgccctgatggctgtatcaggactgccccaaatgaaaaattacaccagcgtggagacactggaaatcacacaaaatctgctgaattcccctaagcaatgcccatgtggacacggactgatggtgctgctcagggtgccatgtagccctctggctgtagtggcgtacgagcggctcgcccacgtgagagccaggttagcactggaagagcactttgagattatcctaggctcaccttcctccggggtgacagtgggaaagcactttgtgaagcagctccggatgtggcagaagatcgaagacgtggaatggcgaccacaaacctatctggaactggagggcttgccgtgcattctcatcttctccgggatggacccacatggcgaatcattgcccaggagcctgaggtactgtgacttgcggctgatcaactccagctgcctggtgagaacagccttagagcaggaactgggtctcgctgcatacttcgtaagcaatgaggtgcctttagagaagggagctcgcaatgaggccctggagtcggatgccgagaaactatcatctaccgataatgaagacgaggagctcggtactgagggatctacttctgagaagcgctctcctatgaagagggaacgatcaagatcccatgactccgcctcttcgagcttgtcaagcaaagccagcggctctgctctcggaggcgagtcgagtgcgcagccgacagcactgcctcaaggagagcacgcaaggagcccacagcctagagggccagcggaggagggccgagctcccggagaaaagcagaggcctagagcttctcagggacctccctctgcaattagccggcatagtcccggaccgaccccccaacccgactgtagtctgagaacagggcagagaagtgtgcaggtgtctgtgactagctcttgtagtcagttgagttctagtagcggctctagcagctcctcagttgctccagcagctgggacttgggtgctgcaagcaagccagtgttcactgacaaaagcgtgtcgccagccccctatcgtgttccttccgaagcttgtgtacgacatggtcgtcagcacagatagcagtggccttccgaaagccgcaagtcttttgccttctccatcggtgatgtgggcctccagttttcggcctctactatctaagaccatgacctccactgagcaatccctttattatagacaatggactgtcccacgcccatctcatatggactatggtaatcgggcagagggccgagttgacggatttcacccaagacggctcctgctctcaggaccccctcagataggcaagaccggcgcttacttgcaatttttaagcgtactgtccaggatgcttgtgcgattgacagaggtggatgtttacgatgaggaagaaatcaacataaacttaagggaagaaagcgattggcactatttgcagctctcagatccgtggcctgacctggagcttttcaaaaagctacccttcgattacattattcacgatcccaaatatgaggacgcttctttgatttgttctcattatcaggggatcaagtctgaggatcggggtatgtcccgaaagcctgaagatctgtatgttaggcggcagacggctaggatgaggttgtcaaagtatgccgcatacaatacataccaccactgcgaacagtgtcaccaatacatgggtttccatccacgttatcagctgtatgagagtacattgcacgcctttgccttctcgtacagcatgcttggcgaagaaattcagctgcacttcatcatccccaaatccaaggaacaccactttgtattctcacagcccggtggacagctggagagcatgagattgcctctggtgactgataagtcacatgagtacataaagtcacccacgttcacaccaactactggcaggcacgagcacggactgtttaacctatatcacgccatggacggggcatctcacttacacgtattagtagttaaagaatacgagatggcaatctacaagaagtactggcccaatcacatcatgctggtgctaccttccatttttaacagcgccggtgtgggggcagcccatttccttattaaagaactctcctaccacaatctggaactcgaacgaaacagacaggaggagctcggcattaaacctcaggacatttggcccttcatcgtaattagtgacgatagttgcgtgatgtggaacgtggtcgatgtgaattcagccggagaaaggagtcgggagttctcctggagtgaacgtaacgtgtcactcaagcatatcatgcagcatatagaagcggctcccgatatcatgcattacgcccttctgggactgcgaaaatggtcatcaaagacaagggcgagtgaggtacaggagccttttagccggtgtcatgttcacaacttcattatactcaacgtggacctgacgcaaaacgtgcaatataaccagaacaggtttctgtgtgatgacgttgactttaatcttcgcgttcactcggccggtctgctgttgtgtcggttcaacaggtttagcgtgatgaagaagcaaattgttgtaggagggcacagatcctttcatattacctccaaggtgagcgacaatagcgccgctgtagtccctgcacagtacatttgcgcccctgactcaaaacatacatttcttgctgcacccgctcagttgctgcttgagaagtttctgcagcaccatagtcatctgttctttccgttgagcctgaaaaaccatgatcatcctgttttgtcggtcgactgttaccttaacttaggctctcaaatctcagtatgctatgtgtcctcccgccctcacagtctgaatatatcatgttccgatcttctgttcagcggtctcttgctctatctctgcgactccttcgtgggcgcttccttcctgaagaagttccacttcctaaagggcgcaaccttgtgtgtgatttgtcaggaccgttcctccctccggcaaactgtggtgaggctcgaactggaggatgaatggcaatttcgtcttcgtgatgagtttcagacagctaacgcacgagaagataggcccctttttttcctgaccggcaggcacatcta

SEQ ID NO: 266996 - DNA, 879 bp, Artificial Sequence
  derived and/or modified sequence
atgaccaccaccagatacagacccacctgggacctggccctggaccccctggtgagctgcaagctgtgcctgggcgagtaccccgtggagcagatgaccaccatcgcccagtgccagtgcatcttctgcaccctgtgcctgaagcagtacgtggagctgctgatcaaggagggcctggagaccgccatcagctgccccgacgccgcctgccccaagcagggccacctgcaggagaacgagatcgagtgcatggtggccgccgagatcatgcagagatacaagaagctgcagttcgagagagaggtgctgttcgacccctgcagaacctggtgccccgccagcacctgccaggccgtgtgccagctgcaggacgtgggcctgcagaccccccagcccgtgcagtgcaaggcctgcagaatggagttctgcagcacctgcaaggccagctggcaccccggccagggctgccccgagaccatgcccatcaccttcctgcccggcgagaccagcgccgccttcaagatggaggaggacgacgcccccatcaagagatgccccaagtgcaaggtgtacatcgagagagacgagggctgcgcccagatgatgtgcaagaactgcaagcacgccttctgctggtactgcctggagagcctggacgacgacttcctgctgatccactacgacaagggcccctgcagaaacaagctgggccacagcagagccagcgtgatctggcacagaacccaggtggtgggcatcttcgccggcttcggcctgctgctgctggtggccagccccttcctgctgctggccacccccttcgtgctgtgctgcaagtgcaagtgcagcaagggcgacgacgaccccctgcccacctag

SEQ ID NO: 266997 - DNA, 879 bp, Artificial Sequence
  derived and/or modified sequence
atgaccaccacacgctaccggcccacttgggacttggcgcttgaccctcttgtttcttgcaagctatgtttaggggagtacccagttgagcaaatgaccaccatagctcagtgtcagtgtattttttgcacattgtgcctaaagcagtacgtggaattgctgattaaggaaggcctggaaacagccattagctgtcccgacgctgcatgccccaagcaggggcacttacaggagaacgagatcgagtgtatggtggccgcggaaattatgcaaagatataaaaagcttcagtttgagcgcgaagtgctgttcgacccatgccgtacctggtgtccagcatctacctgccaggccgtttgtcagctccaggatgtgggcctgcagaccccacagccagtccagtgtaaggcatgcagaatggagttctgctctacttgcaaagcctcatggcaccctggccaaggctgtcccgagaccatgccaattacgttcctccccggcgagacatctgccgcctttaagatggaagaggatgacgcacccatcaaacgctgcccaaaatgtaaagtctatatcgaacgggacgaagggtgcgcgcaaatgatgtgcaagaactgcaaacacgccttctgctggtactgtctcgaatcgttagacgacgattttctcttgatccactatgacaagggcccctgtcggaacaagcttggccactcacgcgctagtgtcatatggcacagaacccaagtggttgggatttttgcgggattcggcctgctgctgctggtagctagtccttttctgcttctggctacaccctttgtactatgttgtaaatgcaaatgttctaaaggggacgacgatcccctgccaacctag

SEQ ID NO: 266998 - DNA, 879 bp, Artificial Sequence
  derived and/or modified sequence
atgaccaccacccgctaccggcccacctgggacctggccctggaccccctggtgtcctgcaagctgtgcctgggggagtaccctgtggagcagatgaccaccatcgcccagtgccagtgcatcttctgcaccctgtgcctgaagcagtatgtggagctgctgatcaaggagggcctggagacagccatcagctgcccagatgctgcctgccccaagcagggccacctgcaggagaatgaaattgagtgcatggtggccgctgagatcatgcagcgctacaagaagctgcagtttgagcgggaggtgctgtttgacccctgcaggacctggtgcccagccagcacctgccaggccgtgtgccagctgcaggatgtgggcctgcagaccccccagcctgtgcagtgcaaggcctgcaggatggagttctgcagcacctgcaaggcctcctggcaccctggccagggctgcccagagaccatgcccatcaccttcctgcccggggagaccagcgctgccttcaagatggaggaggatgatgcccccatcaagcgctgccccaagtgcaaggtgtacatcgagagagatgagggctgtgcccagatgatgtgcaagaactgcaagcacgccttctgctggtactgcctggagagcctggatgatgacttcctgctgatccactatgacaagggcccctgcaggaacaagctgggccacagccgggccagcgtcatctggcacaggacccaggtggtgggcatctttgctggcttcggcctgctgctgctggtggccagccccttcctgctgctggccaccccatttgtgctgtgctgcaagtgcaagtgcagcaaaggagatgatgaccccctgcccacctag

SEQ ID NO: 266999 - DNA, 879 bp, Artificial Sequence
  derived and/or modified sequence
atgaccaccacccggtaccggcccacctgggacctggccctggacccactagtgagctgcaagctgtgtttgggtgagtaccctgtggaacagatgactaccattgctcagtgccagtgtattttttgcactctctgccttaagcagtacgtggaactgttgatcaaggaggggctggaaacagctattagctgtcccgacgcagcatgcccgaagcaggggcacctacaagagaacgagattgagtgcatggttgccgctgaaatcatgcagaggtacaagaagttacagtttgagcgggaggttctttttgatccctgcagaacatggtgtccagccagcacctgtcaggcggtatgccagctacaggatgtcggcctccagactccgcagcccgtgcagtgcaaagcctgtcgtatggaattctgctcaacctgcaaagcctcctggcacccagggcaggggtgccctgagactatgcccattacgttcctccccggtgagacgtcagccgcctttaaaatggaagaggacgatgccccaatcaagcgatgcccaaagtgcaaggtttacatcgagagggacgaaggatgtgctcagatgatgtgtaagaactgcaaacacgctttctgctggtattgccttgaatctttggatgatgatttcctgctaatccattacgataaggggccatgcagaaataaactgggtcattctagggcatcagtcatttggcacagaacgcaagttgtgggcattttcgcagggttcggcttattactcttggtcgcctcgccctttctcctgctggcaacccctttcgtactatgctgcaagtgcaaatgttcaaagggagacgatgaccctcttcccacctag

SEQ ID NO: 267000 - DNA, 879 bp, Artificial Sequence
  derived and/or modified sequence
atgacaaccacccgttacaggcccacatgggatctggctctggacccacttgtttcatgtaaactttgcctcggggagtatcctgtcgaacagatgaccaccatcgctcagtgccagtgcattttttgtacactttgtctgaagcagtatgtggagctcctgataaaagaggggctcgaaaccgctatctcctgcccagatgctgcctgccccaagcaggggcacctgcaggagaacgaaatcgaatgtatggtggcagccgagatcatgcagagatacaaaaaacttcagttcgagagggaagtgctgttcgacccctgtcgaacctggtgccccgctagcacttgccaggctgtgtgtcagctgcaggacgtggggttgcaaactcctcagccagtccaatgcaaggcctgtcggatggagttttgcagcacttgtaaggccagttggcatcccggacagggctgccctgaaactatgcccattacatttctgccaggtgagacctctgccgctttcaagatggaggaggacgacgcacctattaaaaggtgccccaaatgcaaggtgtacatagaaagagatgaagggtgcgctcagatgatgtgcaagaattgcaagcatgcgttttgttggtattgcctcgagagtctggatgacgactttttacttatccactatgacaaaggcccttgcaggaataaactgggccactccagggctagcgtaatctggcaccgtactcaggtggtcgggatattcgcgggatttggcttactgcttctcgtcgctagcccttttttgctcttggctacccccttcgttctttgctgcaagtgtaaatgctccaagggagacgacgacccgttaccgacctag

SEQ ID NO: 267001 - protein, 425 aa, Artificial Sequence
  derived and/or modified sequence
MDKNIGEQLNKAYEAFRQACMDRDSAVKELQQKTENYEQRIREQQEQLSLQQTIIDKLKSQLLLVNSTQDNNYGCVPLLEDSETRKNNLTLDQPQDKVISGIAREKLPKVRRQEVSSPRKETSARSLGSPLLHERGNIEKTFWDLKEEFHKICMLAKAQKDHLSKLNIPDTATETQCSVPIQCTDKTDKQEALFKPQAKDDINRGAPSITSVTPRGLCRDEEDTSFESLSKFNVKFPPMDNDSTFLHSTPERPGILSPATSEAVCQEKFNMEFRDNPGNFVKTEETLFEIQGIDPIASAIQNLKTTDKTKPSNLVNTCIRTTLDRAACLPPGDHNALYVNSFPLLDPSDAPFPSLDSPGKAIRGPQQPIWKPFPNQDSDSVVLSGTDSELHIPRVCEFCQAVFPPSITSRGDFLRHLNSHFNGET

SEQ ID NO: 267002 - protein, 105 aa, Artificial Sequence
  derived and/or modified sequence
MDKNIGEQLNKAYEAFRQACMDRDSAVKELQQKTENYEQRIREQQEQLSLQQTIIDKLKSQLLLVNSTQDNNYGCVPLLEDSETRKNNLTLDQPQDKVISGIARE

SEQ ID NO: 267003 - DNA, 2171 bp, Artificial Sequence
  derived and/or modified sequence
agaagagccctgggctgggtggggcagggcggaagggccctggccttgttgggtggaggtgaagagttaatggctccgcgcgcaggcactgccctctgaactggaacaaaatgcaacttccggttggagtcactcggccaggcgccggcgacctgaggggagagggaacgcagctgaaagcgtgaactgtacctgtcatttactccatcctttatagtgatgctacaggacgaagaggaatggataaaaacattggcgagcaactcaataaagcgtatgaagccttccggcaggcatgcatggatagagattctgcagtaaaagaattacagcaaaagactgagaactatgagcagagaatacgtgaacaacaggaacagctgtcacttcaacagactattattgacaagctaaaatctcagttacttcttgtgaattccactcaagataacaattatggctgtgttcctctgcttgaagacagtgaaacaagaaagaataatttgactcttgatcagccacaagataaagtgatttcaggaatagcaagagaaaaactaccaaaggtaagaagacaagaggtttcttctcctagaaaagaaacttcagcaaggagtcttggcagtcctttgctccatgaaaggggtaatatagagaagactttctgggatctgaaagaagaatttcataaaatatgcatgctagcaaaagcacagaaagaccacttaagcaaacttaatataccagacactgcaactgaaacacagtgctctgtgcctatacagtgtacggataaaacagataaacaagaagcgctgtttaagcctcaggctaaagatgatataaatagaggtgcaccatccatcacatctgtcacaccaagaggactgtgcagagatgaggaagacacctcttttgaatcactttctaaattcaatgtcaagtttccacctatggacaatgactcaactttcttacatagcactccagagagacccggcatccttagtcctgccacgtctgaggcagtgtgccaagagaaatttaatatggagttcagagacaacccagggaactttgttaaaacagaagaaactttatttgaaattcagggaattgaccccatagcttcagctatacaaaaccttaaaacaactgacaaaacaaagccctcaaatctcgtaaacacttgtatcaggacaactctggatagagctgcgtgtttgccacctggagaccataatgcattatatgtaaatagcttcccacttctggacccatctgatgcaccttttccctcactcgattccccgggaaaagcaatccgaggaccacagcagcccatttggaagccctttcctaatcaagacagtgactcggtggtactaagtggcacagactcagaactgcatatacctcgagtatgtgaattctgtcaagcagttttcccaccatccattacatccaggggggatttccttcggcatcttaattcacacttcaatggagagacttaagacacatttgaaaacagacatatcaagttctatgtgatgattttgggtttttaatactataaatacttgattgtaaactaaattcaagatcatttataggaaaatctagtttcacagctatttgaatttttttctggatttactatataactcttattttttaaaagatcattctgttctttcaaggagaaataagcctaaaagaagaaaaacaaaaaaaattctgtataaaactgtaatcctttgtattcatgtttacagtgctattactataattcaaaattatgtatgtgacttagagttatataatcataatttatgtttatttcaaatatctaagtttattgcttggatttctagtgagagctgttgaatttggtgatgtcaaatgtttctagggtttttttagtttgtttttattgaaaaatttaattatttatgctataggtgatattctctttgaataaacctataatagaaaatagcagacaacataaacatctttgtaaatatcaaacctaatacatttcttgtccagtgataaaacaactggtagaattatttaaacactttagatttttaaataatatacatggctttaatttttactgtgtgtatagctacatgatgaaattaattaaatattaagaggta

SEQ ID NO: 267004 - DNA, 555 bp, Artificial Sequence
  derived and/or modified sequence
atttactccatcctttatagtgatgctacaggacgaagaggaatggataaaaacattggcgagcaactcaataaagcgtatgaagccttccggcaggcatgcatggatagagattctgcagtaaaagaattacagcaaaagactgagaactatgagcagagaatacgtgaacaacaggaacagctgtcacttcaacagactattattgacaagctaaaatctcagttacttcttgtgaattccactcaagataacaattatggctgtgttcctctgcttgaagacagtgaaacaagaaagaataatttgactcttgatcagccacaagataaagtgatttcaggaatagcaagagaaaaactaccaaaggtagacattgcttctgcagaaagcagcatttaaatgctgatgcgtgacatagcttcctcattttatttttctgaagtgatctgctggaattccaaacagaagttccatatatacaaatatgtggcttaaatatttctaaatagaagaactattttcaagtaaaataaaggctgaggttttgtattt

SEQ ID NO: 267005 - DNA, 550 bp, Artificial Sequence
  derived and/or modified sequence
aagagccctgggctgggtggggcagggcggaagggccctggccttgttgggtggaggtgaagagttaatggctccgcgcgcaggcactgccctctgaactggaacaaaatgcaacttccggttggagtcactcggccaggcgccggcgacctgaggggagagggaacgcagctgaaagcgtgaactacctgtcatttactccatcctttatagtgatgctacaggacgaagaggaatggataaaaacattggcgagcaactcaataaagcgtatgaagccttccggcaggcatgcatggatagagattctgcagtaaaagaattacagcaaaagactgagaactatgagcagagaatacgtgaacaacaggaacagctgtcacttcaacagactattattgacaagctaaaatctcagttacttcttgtgaattccactcaagataacaattatggctgtgttcctctgcttgaagacagtgaaacaagaaagaataatttgactcttgatcagccacaagataaagtgatttcaggaatagcaagagaa

SEQ ID NO: 267006 - DNA, 2152 bp, Artificial Sequence
  derived and/or modified sequence
tttctcagtggaagttcccacttcaacataagggagagctctggacagtttgagcagcattgttagagcctgtggaaaacactttacaactgtgtaactgtcttcatctttacagaggaatagtctacaaaggaagacttgtaacctggagaagagacctgtcatttactccatcctttatagtgatgctacaggacgaagaggaatggataaaaacattggcgagcaactcaataaagcgtatgaagccttccggcaggcatgcatggatagagattctgcagtaaaagaattacagcaaaagactgagaactatgagcagagaatacgtgaacaacaggaacagctgtcacttcaacagactattattgacaagctaaaatctcagttacttcttgtgaattccactcaagataacaattatggctgtgttcctctgcttgaagacagtgaaacaagaaagaataatttgactcttgatcagccacaagataaagtgatttcaggaatagcaagagaaaaactaccaaaggtaagaagacaagaggtttcttctcctagaaaagaaacttcagcaaggagtcttggcagtcctttgctccatgaaaggggtaatatagagaagactttctgggatctgaaagaagaatttcataaaatatgcatgctagcaaaagcacagaaagaccacttaagcaaacttaatataccagacactgcaactgaaacacagtgctctgtgcctatacagtgtacggataaaacagataaacaagaagcgctgtttaagcctcaggctaaagatgatataaatagaggtgcaccatccatcacatctgtcacaccaagaggactgtgcagagatgaggaagacacctcttttgaatcactttctaaattcaatgtcaagtttccacctatggacaatgactcaactttcttacatagcactccagagagacccggcatccttagtcctgccacgtctgaggcagtgtgccaagagaaatttaatatggagttcagagacaacccagggaactttgttaaaacagaagaaactttatttgaaattcagggaattgaccccatagcttcagctatacaaaaccttaaaacaactgacaaaacaaagccctcaaatctcgtaaacacttgtatcaggacaactctggatagagctgcgtgtttgccacctggagaccataatgcattatatgtaaatagcttcccacttctggacccatctgatgcaccttttccctcactcgattccccgggaaaagcaatccgaggaccacagcagcccatttggaagccctttcctaatcaagacagtgactcggtggtactaagtggcacagactcagaactgcatatacctcgagtatgtgaattctgtcaagcagttttcccaccatccattacatccaggggggatttccttcggcatcttaattcacacttcaatggagagacttaagacacatttgaaaacagacatatcaagttctatgtgatgattttgggtttttaatactataaatacttgattgtaaactaaattcaagatcatttataggaaaatctagtttcacagctatttgaatttttttctggatttactatataactcttattttttaaaagatcattctgttctttcaaggagaaataagcctaaaagaagaaaaacaaaaaaaattctgtataaaactgtaatcctttgtattcatgtttacagtgctattactataattcaaaattatgtatgtgacttagagttatataatcataatttatgtttatttcaaatatctaagtttattgcttggatttctagtgagagctgttgaatttggtgatgtcaaatgtttctagggtttttttagtttgtttttattgaaaaatttaattatttatgctataggtgatattctctttgaataaacctataatagaaaatagcagacaacataaacatctttgtaaatatcaaacctaatacatttcttgtccagtgataaaacaactggtagaattatttaaacactttagatttttaaataatatacatggctttaatttttactgtgtgtatagctacatgatgaaattaattaaatattaagaggtacttatgttgtgatca

SEQ ID NO: 267007 - DNA, 671 bp, Artificial Sequence
  derived and/or modified sequence
gtttgagcagcattgttagagcctgtggaaaacactttacaactgtgtaactgtcttcatctttacagaggaatagtctacaaaggaagacttgtaacctggagaagagacctgtcatttactccatcctttatagtgatgctacaggacgaagaggaatggataaaaacattggcgagcaactcaataaagcgtatgaagccttccggcaggcatgcatggatagagattctgcagtaaaagaattacagcaaaagactgagaactatgagcagagaatacgtgaacaacaggaacagctgtcacttcaacagactattattgacaagctaaaatctcagttacttcttgtgaattccactcaagataacaattatggctgtgttcctctgcttgaagacagtgaaacaagaaagaataatttgactcttgatcagccacaagataaagtgatttcaggaatagcaagagaaaaactaccaaaggtagacattgcttctgcagaaagcagcatttaaatgctgatgcgtgacatagcttcctcattttatttttctgaagtgatctgctggaattccaaacagaagttccatatatacaaatatgtggcttaaatatttctaaatagaagaactattttcaagtaaaataaaggctgaggttttgtattt

SEQ ID NO: 267008 - protein, 299 aa, Artificial Sequence
  derived and/or modified sequence
MKMGGLPRTTPPTQKPPSPPMSGKGTLGSSGSSGGSHPSSRSSSRENSGSGSVGVPIAVPTPSPPSVFPAPAGSAGTPPLPATSASAPAPLVPATVPSSTAPDAAAGGAQTLADGFTSPTPPVVSSTPPTGHPVQFYSMNRPASRHTPPTIGGSLPYRRPPSITSQTSLQNQMNGGPFYSQNPVSDTPPPPPPVEEPVFDESPPPPPPPEDYEEEEAAVVEYSDPYAEEDPPWAPRSYLEKVVAIYDYTKDKEDELSFQEGAIIYVIKKNDDGWYEGVMNGVTGLFPGNYVESIMHYSE

SEQ ID NO: 267009 - protein, 458 aa, Artificial Sequence
  derived and/or modified sequence
MAELQMLLEEEIPGGRRALFDSYTNLERVADYCENNYIQSADKQRALEETKAYTTQSLASVAYLINTLANNVLQMLDIQASQLRRMESSINHISQTVDIHKEKVARREIGILTTNKNTSRTHKIIAPANLERPVRYIRKPIDYTILDDIGHGVKVSTQNMKMGGLPRTTPPTQKPPSPPMSGKGTLGSSGSSGGSHPSSRSSSRENSGSGSVGVPIAVPTPSPPSVFPAPAGSAGTPPLPATSASAPAPLVPATVPSSTAPDAAAGGAQTLADGFTSPTPPVVSSTPPTGHPVQFYSMNRPASRHTPPTIGGSLPYRRPPSITSQTSLQNQMNGGPFYSQNPVSDTPPPPPPVEEPVFDESPPPPPPPEDYEEEEAAVVEYSDPYAEEDPPWAPRSYLEKVVAIYDYTKDKEDELSFQEGAIIYVIKKNDDGWYEGVMNGVTGLFPGNYVESIMHYSE

SEQ ID NO: 267010 - DNA, 1377 bp, Artificial Sequence
  derived and/or modified sequence
atggccgagctgcagatgctgctggaggaggagatccccggcggcagaagagccctgttcgacagctacaccaacctggagagagtggccgactactgcgagaacaactacatccagagcgccgacaagcagagagccctggaggagaccaaggcctacaccacccagagcctggccagcgtggcctacctgatcaacaccctggccaacaacgtgctgcagatgctggacatccaggccagccagctgagaagaatggagagcagcatcaaccacatcagccagaccgtggacatccacaaggagaaggtggccagaagagagatcggcatcctgaccaccaacaagaacaccagcagaacccacaagatcatcgcccccgccaacctggagagacccgtgagatacatcagaaagcccatcgactacaccatcctggacgacatcggccacggcgtgaaggtgagcacccagaacatgaagatgggcggcctgcccagaaccaccccccccacccagaagccccccagcccccccatgagcggcaagggcaccctgggcagcagcggcagcagcggcggcagccaccccagcagcagaagcagcagcagagagaacagcggcagcggcagcgtgggcgtgcccatcgccgtgcccacccccagcccccccagcgtgttccccgcccccgccggcagcgccggcaccccccccctgcccgccaccagcgccagcgcccccgcccccctggtgcccgccaccgtgcccagcagcaccgcccccgacgccgccgccggcggcgcccagaccctggccgacggcttcaccagccccaccccccccgtggtgagcagcaccccccccaccggccaccccgtgcagttctacagcatgaacagacccgccagcagacacaccccccccaccatcggcggcagcctgccctacagaagaccccccagcatcaccagccagaccagcctgcagaaccagatgaacggcggccccttctacagccagaaccccgtgagcgacaccccccccccccccccccccgtggaggagcccgtgttcgacgagagccccccccccccccccccccccgaggactacgaggaggaggaggccgccgtggtggagtacagcgacccctacgccgaggaggaccccccctgggcccccagaagctacctggagaaggtggtggccatctacgactacaccaaggacaaggaggacgagctgagcttccaggagggcgccatcatctacgtgatcaagaagaacgacgacggctggtacgagggcgtgatgaacggcgtgaccggcctgttccccggcaactacgtggagagcatcatgcactacagcgagtag

SEQ ID NO: 267011 - DNA, 900 bp, Artificial Sequence
  derived and/or modified sequence
atgaaaatgggagggctgcccaggacgacacctccgacgcagaagcccccaagcccacccatgtcaggaaagggcaccctcgggagcagtgggtcatcaggcggcagccacccttccagccgctcaagctcaagggagaatagcggaagcggctctgtcggagtgcccattgctgtgccaacacccagtccacccagtgtcttcccagcccccgcagggagcgcggggacacccccactccccgctacaagcgcatctgcaccagccccactggttccggccaccgtgccctccagcaccgcgccagatgccgctgccggaggcgcccagacgctggctgacgggttcacatctcctactcctcccgtggtgtcctcaaccccaccaactgggcacccagtgcaattctattcaatgaatcggcccgcatcgaggcatactccacccacaataggagggtctctgccgtacaggcgacctccttcgataacaagccagacaagtctgcaaaatcagatgaacggcggccctttctactcccagaaccctgtgtccgacactccccccccacctccccctgtggaagaaccagtgttcgatgagagtcctccccctccccccccacctgaggattacgaggaagaagaagctgcagtcgtcgagtattcagatccttatgcggaagaggatcctccatgggccccaaggagttatctggagaaagtggtggccatctatgactataccaaagacaaggaggatgaactgtcattccaggaaggagcaataatttatgtgattaaaaaaaacgacgacggatggtatgagggagtgatgaatggcgtcacaggtctttttcccgggaactacgtagagagtatcatgcactacagtgaatag

SEQ ID NO: 267012 - DNA, 1377 bp, Artificial Sequence
  derived and/or modified sequence
atggctgaactgcagatgctgctggaagaggaaatccctggcggccgcagagccctctttgattcctacacaaacctggagagggtggcagactactgtgagaataattatatacagagcgccgataaacagagggccctcgaggagacgaaggcctacactacccaaagtttagctagcgtggcgtacctaatcaatacgctcgcaaacaatgtcctgcagatgctggacattcaggcttctcagctcagaagaatggagtcctcaatcaaccacatatctcaaactgtggatatccataaggagaaggtcgcccgcagagagatcggtattcttacgacaaacaagaataccagtaggacccacaagatcattgcgcctgctaacttggagaggcccgtgagatacatcaggaagccaattgactatacgatactggacgacatcggacacggcgtgaaagtctccacccagaacatgaaaatgggcggcctcccacgcaccacgcctccgactcagaagcccccgtcacctcccatgagcggcaagggtacactgggctcatcaggatcatctggggggagtcatccgagtagcaggtcatcctcccgagagaactccggatccggctccgttggcgtcccaatcgccgtcccaaccccctcccccccgtcggtgttccctgcgcctgccggttctgcgggaacgccaccattacccgccacaagcgcctctgcaccagcgcccctcgttcccgccactgttccaagctccacagcccccgacgctgccgccggcggcgcccagacacttgctgatggctttacctcacccacacctccggtggtgagttccaccccacccacaggccaccctgttcaattctattctatgaatagaccagccagtcggcatacccctcctacgatcgggggatcgctgccttaccgccgtcccccctctattacgtcgcaaacctcactccagaaccagatgaatggagggcctttttattctcaaaacccggtttctgataccccgccaccccctccacccgtggaggagccagtgtttgacgagtctccccctccacctccccctcccgaggactacgaggaagaggaggctgctgtggtggagtactccgatccgtatgctgaggaagatcccccgtgggctccacggtcatatctcgaaaaagtggtggcgatttatgactatactaaggataaagaggatgagctgtctttccaagagggcgctattatttacgtgataaagaagaatgacgacggatggtacgagggcgttatgaacggcgtaacagggcttttccccggcaactatgttgaaagcattatgcattattccgagtag

SEQ ID NO: 267013 - DNA, 900 bp, Artificial Sequence
  derived and/or modified sequence
atgaagatgggcggcctgcccaggaccaccccacccacccagaagccacccagcccccccatgtctgggaagggcaccctgggcagcagcggcagcagcggcggcagccaccccagcagccgcagcagcagccgggagaacagcggcagcggctctgtgggcgtgcccatcgctgtgcccacccccagcccccccagcgtcttccctgccccagctggcagcgctggcaccccacccctgcctgccaccagcgccagcgccccagcccccctggtgcctgccaccgtgcccagcagcacagccccagatgctgctgctgggggcgcccagaccctggctgatggcttcaccagccccaccccacctgtggtgagcagcaccccacccaccggccaccctgtgcagttctacagcatgaacagacctgccagccgccacaccccacccaccatcggcggcagcctgccctaccgccggccccccagcatcaccagccagaccagcctgcagaaccagatgaatggaggccccttctacagccagaaccctgtgtctgacaccccacctcctcctcctcctgtggaggagcctgtgtttgatgagagccccccacctcctcctcctcctgaggactatgaggaggaggaggccgctgtggtggagtacagcgacccctatgcagaagaagatcctccctgggcccccaggagctacctggagaaggtggtggccatctatgactacaccaaggacaaggaggatgagctgtccttccaggagggcgccatcatctacgtgatcaagaagaatgatgatggctggtatgaaggagtgatgaatggagtgacaggcctcttccctggcaactacgtggagagcatcatgcactacagcgagtag

SEQ ID NO: 267014 - DNA, 1377 bp, Artificial Sequence
  derived and/or modified sequence
atggccgagctgcagatgctgctggaggaggagatccctgggggccggcgggccctgtttgacagctacaccaacctggagcgggtggccgactactgtgagaacaactacatccagagcgctgacaagcagagggccctggaggagaccaaggcctacaccacccagagcctggcctctgtggcctacctgatcaacaccctggccaacaacgtgctgcagatgctggacatccaggccagccagctgcggaggatggagagcagcatcaaccacatcagccagacagtggacatccacaaggagaaggtggcccggcgggagatcggcatcctgaccaccaacaagaacaccagcaggacccacaagatcatcgccccagccaacctggagaggcctgtgcgctacatcaggaagcccatcgactacaccatcctggatgacattggacatggagtgaaggtgtccacccagaacatgaagatgggcggcctgcccaggaccaccccacccacccagaagccacccagcccccccatgtctgggaagggcaccctgggcagcagcggcagcagcggcggcagccaccccagcagccgcagcagcagcagagaaaattctggcagcggctctgtgggcgtgcccatcgctgtgcccacccccagccccccatctgtgtttcctgccccagctggcagcgctggcaccccacccctgcctgccaccagcgccagcgccccagcccccctggtgcctgccaccgtgcccagcagcacagccccagatgctgctgctggaggagcccagaccctggctgatggcttcaccagccccaccccacctgtggtgagcagcaccccacccaccggccaccctgtgcagttctacagcatgaacagacctgccagccgccacaccccacccaccatcggcggcagcctgccctacagaagacctccttccatcaccagccagaccagcctgcagaaccagatgaatggaggccccttctacagccagaaccctgtgtctgacaccccacctcctcctcctcctgtggaggagcctgtgtttgatgagagccccccacctcctcctcctccagaagattatgaggaggaggaggccgctgtggtggagtacagcgacccctatgcagaggaggaccccccctgggcccccaggagctacctggagaaggtggtggccatctatgactacaccaaggacaaggaggatgagctgtccttccaggagggcgccatcatctacgtgatcaagaagaatgatgatggctggtatgagggcgtgatgaatggagtgacaggcctcttccctggcaactacgtggagagcatcatgcactacagcgagtag

SEQ ID NO: 267015 - DNA, 900 bp, Artificial Sequence
  derived and/or modified sequence
atgaagatgggcggcctgccccggaccaccccccccacccagaagccccccagtccacccatgagtggcaaaggtacactaggcagcagcggaagctcaggcggatcgcatccctcctcaaggagctcatctagggaaaattctggctctggatccgtgggcgtgcccatcgcagttccaaccccatcacctccctcggttttccccgcacccgcaggatccgccggtacgccaccactgccagcaaccagtgcgtcggctcctgccccgctcgtgccagccacggttccttcctccacagcacctgacgcggctgctggcggagcccaaacgctggccgatggcttcactagccccacacccccggtagtgagctcaaccccccctaccggccaccctgtgcagttctactctatgaaccgcccagcctccaggcatacacctcccactattggcgggtcccttccctacagaagaccaccctcgataacgtcccagacatcgcttcaaaatcagatgaatggcggccccttctacagccaaaatcccgtttcagacactccaccccctccaccacccgttgaagaacctgtctttgatgaatctccgccccctccccctccccccgaggattacgaagaagaagaagccgctgtggtggagtactcagatccctacgctgaggaggatcctccttgggccccccgatcatacctggagaaagttgtggccatctatgactatactaaggacaaggaagacgagctctccttccaggaaggggccattatctacgtcataaagaagaacgatgatggatggtacgagggagtgatgaacggtgttactggactctttccagggaactatgttgaatctatcatgcattatagtgaatag

SEQ ID NO: 267016 - DNA, 1377 bp, Artificial Sequence
  derived and/or modified sequence
atggccgagctgcagatgctgctggaggaggagatccccggcggccgcagggccctgttcgacagttataccaatctggagagggtcgcggactactgcgaaaacaattatatccagtctgcggataagcagcgagcactggaggagactaaagcctacactacccagtctctggcttccgtggcttacttaataaacacgcttgccaataacgtgcttcaaatgcttgacattcaggccagtcagctcaggagaatggagtcaagcataaaccacatttctcagaccgtcgatattcataaggagaaagtagctagaagggaaatcggaatactgacaaccaacaagaataccagccggacacataagatcatcgctccagcaaatctggaaaggccagtgcgatacatccgaaaacccattgactacacaatcttggatgatataggtcacggagttaaagtaagcacacagaatatgaagatgggcggtctcccacgtacaacccccccgacccagaaacctccatcgccccctatgtccggtaagggcacactgggctcgtctggaagcagcggagggtcacacccctccagcaggagttcttctcgagagaattctggcagtggatcggttggggtgccaatagcggtacctacacccagccctccttctgtgtttcccgccccagcagggagcgccggaactccgcccctccccgccacctccgctagtgcccccgcgcctcttgtcccagctactgtaccatcctccacagctcctgacgctgccgcggggggggcacagacgttagccgatggatttacttcccccactcccccagtcgtctcgtcgactcctccgacggggcatcctgtgcagttttactcgatgaataggccggcctcaagacacacacctcctacaattggcggctccctgccatatagaagaccaccttccataacaagtcagacatccctccagaaccagatgaatggaggaccattttattcccagaaccccgtgtccgacactccacccccccctccgcctgttgaagaaccagtttttgacgagagcccgccgcccccccctccacccgaggactacgaggaagaggaggctgcagtggtggagtatagcgacccttacgccgaagaagatccgccttgggcgcctcgctcctacctggagaaagttgttgctatttacgactacaccaaagacaaggaggatgagctgtcatttcaggaaggcgcgatcatctacgtcatcaagaagaacgacgacggctggtacgagggcgtaatgaacggggtcacaggtctgtttcctgggaactatgttgagagtatcatgcattatagcgagtag

SEQ ID NO: 267017 - DNA, 900 bp, Artificial Sequence
  derived and/or modified sequence
atgaaaatgggaggtctgccacgaactaccccaccaacccagaagcccccttcgcctcccatgtccggaaagggtacacttggatcaagcggctccagcggaggatctcacccttctagtcgatcctcctctcgagaaaacagcggtagtggctctgtgggtgtgcccatcgccgtccctacaccatccccaccttctgtcttccccgcacctgcgggaagtgccggtacacctccactgccagcaacatccgcctccgcccctgctccactcgtgcccgcaactgttccatcatccaccgccccagacgcagcagccggaggagctcaaacgttagccgatggcttcacctctccaaccccaccagttgtcagctcaactcctcctaccggacatcctgtgcaattttattcgatgaataggcccgcttccaggcatacgccgcctacaatcggtggcagcttgccatatagacgtccaccctctatcacgtctcagacatcactgcagaatcaaatgaatgggggtcccttctatagccaaaatcctgtgtcagatactcctcccccaccccctccagttgaggagccagtgttcgatgagtctccaccaccaccacccccaccggaagactatgaggaggaggaagctgctgtggtggagtactccgatccttacgctgaggaggacccaccctgggcgccacgctcataccttgagaaggtcgtcgccatctacgactacacgaaggacaaggaggacgagctgtcattccaggaaggcgcaataatctatgtaattaaaaaaaacgatgacggctggtacgaaggagtaatgaacggggtgaccggcttgttccccggtaactatgtggaatccatcatgcactatagcgaatag

SEQ ID NO: 267018 - DNA, 1377 bp, Artificial Sequence
  derived and/or modified sequence
atggccgagctgcaaatgctccttgaggaagagatcccaggcggacggcgagctctgtttgatagctacacaaatctggaacgggtcgcagactattgtgaaaataactatatccagtctgcagataagcagagggccctagaagagactaaggcctataccactcagagccttgccagtgttgcctacctcattaacaccctggctaataacgtgctgcagatgcttgatattcaggcatctcagctgaggaggatggaaagtagcattaaccatatatctcagacggtggatatccacaaagaaaaggttgcacggcgagagatcggaattttgacaaccaacaagaacacgtcccgtactcataagatcatcgccccagcaaatctggaacgaccggtgaggtacattcgcaaaccgatcgattacacaatcctcgacgacatcggacatggggtgaaggtctcaactcagaacatgaagatgggcggtttgccaaggaccactcccccaacccaaaagcctccgagcccaccaatgtcaggaaaaggcaccctgggctcttcaggcagtagcggaggatcgcacccctctagccgaagcagctctcgggaaaattctggatccggctcagtgggggtcccaatcgctgtcccgaccccctctcctccctctgtgtttccagcacctgccggaagtgcagggactcccccattgcccgctacttctgcctccgccccagccccactcgtgccagctacggttcctagctccacagcgccagacgcggctgcgggaggggctcagaccctcgcagacggatttacttctcccacccccccagtggtctccagcacccctccaactggtcatccggtgcagttctattctatgaatcggcctgcctcaaggcatacacccccaacgattgggggaagtctcccttatcggaggccacctagcatcacctcccaaacttccttacagaaccagatgaatggagggcctttctattcccagaatcccgtatctgataccccccctcccccacctcctgtcgaggaacctgtgttcgatgaatcccccccaccaccaccccctcctgaggattacgaggaagaggaggcggctgtggtcgagtactctgacccatacgctgaagaggaccctccctgggcccctcggtcctacctagaaaaagtcgttgccatctacgactacactaaggacaaagaagacgagctttcatttcaggagggggctattatatatgtcatcaaaaaaaatgacgacgggtggtatgagggcgtgatgaatggggtaacagggctgttccccggtaattatgtggagtctatcatgcactattcggagtag

SEQ ID NO: 267019 - DNA, 1676 bp, Artificial Sequence
  derived and/or modified sequence
ctccttccgagttaccgccgccgtcgccgccgctcctcctctcccggtcctgggtttccttggcgctgcggccgccgctccctctgcgacctgtatgaggaggaggaggaggaggatgtgaagatggcggagctgcagatgctgctggaagaggaaatcccggggggccgccgggccctcttcgacagctacacaaatctggaacgggtggccgattactgcgagaacaactacatacagtcagcagataagcagagagccctagaagaaaccaaagcctacaccacccaatccttagcaagtgttgcctatctgataaacaccttggccaacaatgtcctgcagatgctggatatccaggcatcccagctacgaaggatggaatcttcaatcaatcatatttcacaaacagttgatattcataaagagaaagttgcaagaagagaaattggtattttgactaccaataaaaacacttcaaggacacataagattattgctccagccaaccttgaacgaccagttcgttatattagaaaacctattgactatacaattctagatgatattggacatggagtaaaggtgagtacccagaacatgaagatgggtgggctgccgcgtacaacacctccaactcagaagccccctagtccccctatgtcagggaaagggacacttggcagcagtgggagtagtggagggagccacccaagtagtcggagcagcagtcgagagaacagtggaagtggtagtgtgggggttcctattgctgttcctactccatctcctcccagtgtctttccagcccctgctggctctgctggcactcctccccttcctgctacttctgcatctgcccctgctcctcttgttcctgctactgtcccttcctccactgccccagacgctgctgctgggggtgcccagacccttgctgatggcttcacttctccaactccccctgttgtttcttccactccccctacaggtcatcctgtacagttctacagcatgaataggcctgcctctcgccatactcccccaacaatagggggctcgttgccctatagacgccctccttccattacttcacaaacaagccttcagaatcagatgaatggaggacctttttatagccagaatccagtttcagatacaccacctccaccgccacctgtggaagaaccagtctttgatgagtctcccccacctcctcctcctccagaagattacgaagaggaggaagctgctgtggttgagtatagtgatccttatgctgaagaggacccaccgtgggctccacgttcttacttggaaaaggttgtggcaatttatgactatacaaaagacaaggaagatgagctgtcctttcaggaaggagccattatttatgtcatcaagaagaatgacgatggttggtatgagggagttatgaatggagtgactgggctttttcctgggaattacgttgagtctatcatgcattattctgagtaaagctcagcagggctgtgcttgcctcacaggaatagtcaggtcttcccagattatctgaaggccctggggattccactccagtaaagtagaatgaaggatacaaatgataaaaattacacttttttttttggtttattccccagtattaaaaacaaagcaagctgagtctgaacaaa

SEQ ID NO: 267020 - DNA, 2237 bp, Artificial Sequence
  derived and/or modified sequence
atttatgcattaagtggttgcttagatttaaggtgagtacccagaacatgaagatgggtgggctgccgcgtacaacacctccaactcagaagccccctagtccccctatgtcagggaaagggacacttggcagcagtgggagtagtggagggagccacccaagtagtcggagcagcagtcgagagaacagtggaagtggtagtgtgggggttcctattgctgttcctactccatctcctcccagtgtctttccagcccctgctggctctgctggcactcctccccttcctgctacttctgcatctgcccctgctcctcttgttcctgctactgtcccttcctccactgccccagacgctgctgctgggggtgcccagacccttgctgatggcttcacttctccaactccccctgttgtttcttccactccccctacaggtcatcctgtacagttctacagcatgaataggcctgcctctcgccatactcccccaacaatagggggctcgttgccctatagacgccctccttccattacttcacaaacaagccttcagaatcagatgaatggaggacctttttatagccagaatccagtttcagatacaccacctccaccgccacctgtggaagaaccagtctttgatgagtctcccccacctcctcctcctccagaagattacgaagaggaggaagctgctgtggttgagtatagtgatccttatgctgaagaggacccaccgtgggctccacgttcttacttggaaaaggttgtggcaatttatgactatacaaaagacaaggaagatgagctgtcctttcaggaaggagccattatttatgtcatcaagaagaatgacgatggttggtatgagggagttatgaatggagtgactgggctttttcctgggaattacgttgagtctatcatgcattattctgagtaaagctcagcagggctgtgcttgcctcacaggaatagtcaggtcttcccagattatctgaaggccctggggattccactccagtaaagtagaatgaaggatacaaatgataaaaattacacttttttttttggtttattccccagtattaaaaacaaagcaagctgagtctgaacaaatggatctttctgccatcatttgtacaatgctgagctgtctggattgaaataaaatgaccatttttatgtatgtcaaaggtataacagcataactgtgtagccaaaacaaaatcagattaagactgattcagaaaaatctgggatctttctcaggaatactgtatacccttgggatttctcctcctgcagaatctgtggcattggatgttcttcattgcctgtgctaaggggttaacctcatggcccagtgggtaccctagccccttcttttcttccacttgtatgaagaggagggaaccaacatttaaataccacacttaaccatttttacaattatttcagatggcttttttcctctgtgacactgtaaattctgcattctctcagcacttgagtgcaccaaacgagtgaatgctgaactcacttgcatcccttcatgtttctgtttgtggattataaggatgatgaaatgtgaaagtctcccaacactctgagggtggtgaacgattgccacccgtttgattttaatgtgctgctgcatgagactgcattgttgctaatggccagtgtacccagatgtgaagtgtggtaggctggttcatatgtggaggtgggtgtgtgaagctagacacgaaggtccctaaggttctgaagagacttgaactgtggaaatgctcttagcaggcatcccgaacccctgcttcggtgctgttttgaggagtaggatcttggagttcagaccaactatgactatcatttccttcactatctagaaaaacgctattctactttggaagagaatagtagttattttcaagtctcctgacagtcactgggagtacaaggtttgctaatgtgctctctggacgttattaatggccagtattagttgctgctgtattactgactcgcttagctgtagaaagggtaatactctcctgattttgtatgattggactcttaagtagctgctgttagtcagaattaaaacccatctcagactaagaatataatgaataagattaataggccaaaatatgtatctaatcacattgataaaaattaatataactgacacaataaaacacatttcccccatctgtacaataaatac

SEQ ID NO: 267021 - DNA, 900 bp, Artificial Sequence
  derived and/or modified sequence
atgaagatgggcggcctgcccagaaccaccccccccacccagaagccccccagcccccccatgagcggcaagggcaccctgggcagcagcggcagcagcggcggcagccaccccagcagcagaagcagcagcagagagaacagcggcagcggcagcgtgggcgtgcccatcgccgtgcccacccccagcccccccagcgtgttccccgcccccgccggcagcgccggcaccccccccctgcccgccaccagcgccagcgcccccgcccccctggtgcccgccaccgtgcccagcagcaccgcccccgacgccgccgccggcggcgcccagaccctggccgacggcttcaccagccccaccccccccgtggtgagcagcaccccccccaccggccaccccgtgcagttctacagcatgaacagacccgccagcagacacaccccccccaccatcggcggcagcctgccctacagaagaccccccagcatcaccagccagaccagcctgcagaaccagatgaacggcggccccttctacagccagaaccccgtgagcgacaccccccccccccccccccccgtggaggagcccgtgttcgacgagagccccccccccccccccccccccgaggactacgaggaggaggaggccgccgtggtggagtacagcgacccctacgccgaggaggaccccccctgggcccccagaagctacctggagaaggtggtggccatctacgactacaccaaggacaaggaggacgagctgagcttccaggagggcgccatcatctacgtgatcaagaagaacgacgacggctggtacgagggcgtgatgaacggcgtgaccggcctgttccccggcaactacgtggagagcatcatgcactacagcgagtag

SEQ ID NO: 267022 - protein, 78 aa, Artificial Sequence
  derived and/or modified sequence
MEKKCTLNFLVLLPFFMILVTAELEESPEDSIQLGVTRNKIMTAQYECYQKIMQDPIQQAEGVYCNRTWDGWLCWNDV

SEQ ID NO: 267023 - DNA, 5155 bp, Artificial Sequence
  derived and/or modified sequence
acacagcctatgatctctctctgttcaggctgcttcttgctcttgtctcacaataagaaaggagtgctgctttcctggggtatgctatttgagaaagaaagtaacctaacactaactgcaggcggggtcagagtgatgtaacaggaagctctgatgtttcccttctgctgctgatcacttacaatctgacaacacttacaatctactcagaacaacctctctctctccagcagagagtgtcacctcctgctttaggaccatcaagctctgctaactgaatctcatcctaattgcaggatcacattgcaaagctttcactctttcccaccttgcttgtgggtaaatctcttctgcggaatctcagaaagtaaagttccatcctgagaatatttcacaaagaatttccttaagagctggactgggtcttgacccctgaatttaagaaattcttaaagacaatgtcaaatatgatccaagagaaaatgtgatttgagactggagacaattgtgcatatcgtctaataataaaaacccatactagcctatagaaaacaatatttgaaagattgctaccactaaaaagaaaactactacaacttgacaagactgctgcaaacttcaatttgtcaaccacaacttgacaaggttgctataaaacaagattgctacaacttctagtttatgttatacagcatatttcattttggcttaatgatggagaaaaagtgtaccctgaattttctggttctcttgcctttttttatgattcttgttacagcagaattagaagagagtcctgaggactcaattcagttgggagttactagaaataaaatcatgacagctcaatatgaatgttaccaaaagattatgcaagaccccattcaacaagcagaaggcgtttactgcaacagaacctgggatggatggctctgctggaacgatgttgcagcaggaactgaatcaatgcagctctgccctgattactttcaggactttgatccatcagaaaaagttacaaagatctgtgaccaagatggaaactggtttagacatccagcaagcaacagaacatggacaaattatacccagtgtaatgttaacacccacgagaaagtgaagactgcactaaatttgttttacctgaccataattggacacggattgtctattgcatcactgcttatctcgcttggcatattcttttatttcaagagcctaagttgccaaaggattaccttacacaaaaatctgttcttctcatttgtttgtaactctgttgtaacaatcattcacctcactgcagtggccaacaaccaggccttagtagccacaaatcctgttagttgcaaagtgtcccagttcattcatctttacctgatgggctgtaattacttttggatgctctgtgaaggcatttacctacacacactcattgtggtggccgtgtttgcagagaagcaacatttaatgtggtattattttcttggctggggatttccactgattcctgcttgtatacatgccattgctagaagcttatattacaatgacaattgctggatcagttctgatacccatctcctctacattatccatggcccaatttgtgctgctttactggtgaatctttttttcttgttaaatattgtacgcgttctcatcaccaagttaaaagttacacaccaagcggaatccaatctgtacatgaaagctgtgagagctactcttatcttggtgccattgcttggcattgaatttgtgctgattccatggcgacctgaaggaaagattgcagaggaggtatatgactacatcatgcacatccttatgcacttccagggtcttttggtctctaccattttctgcttctttaatggagaggttcaagcaattctgagaagaaactggaatcaatacaaaatccaatttggaaacagcttttccaactcagaagctcttcgtagtgcgtcttacacagtgtcaacaatcagtgatggtccaggttatagtcatgactgtcctagtgaacacttaaatggaaaaagcatccatgatattgaaaatgttctcttaaaaccagaaaatttatataattgaaaatagaaggatggttgtctcactgttttgtgcttctcctaactcaaggacttggacccatgactctgtagccagaagacttcaatattaaatgactttttgaatgtcataaagaagagccttcacatgaaattagtagtgtgttgataagagtgtaacatccagctctatgtgggaaaaaagaaatcctggtttgtaatgtttgtcagtaaatactcccactatgcctgatgtgacgctactaacctgacatcaccaagtgtggaattggagaaaagcacaatcaacttttctgagctggtgtaagccagttccagcacaccattgcatgaattcacaaacaaatggctgtaaaactaaacatacatgttgggcatgattctacccttattgccccaagagacctagctaaggtctataaacatgaagggaaaattagcttttagttttaaaactctttatcccatcttgattggggcagttgactttttttttgcccagagtgccgtagtcctttttgtaactaccctctcaaatggacaataccagaagtgaattatccctgctggctttcttttctctatgaaaagcaactgagtacaattgttatgatctactcatttgctgacacatcagttatatcttgtggcatatccattgtggaaactggatgaacaggatgtataatatgcaatcctacttctatatcattaggaaaacatcttagttgatgctacaaaacaccttgtcaacctcttcctgtcttaccaaacagtgggagggaattcctagctgtaaatataaattttgtcccttccatttctactgtataaacaaattagcaatcattttatataaagaaaatcaatgaaggatttcttattttcttggaattttgtaaaaagaaattgtgaaaaatgagcttgtaaatactccattattttattttatagtctcaaatcaaatacatacaacctatgtaatttttaaagcaaatatataatgcaacaatgtgtgtatgttaatatctgatactgtatctgggctgattttttaaataaaatagagtctggaatgctatatttggtaaatattttaaagacaaccagatgccagcatcagaagtctgtttgagaactaagagaacagaaacatctatcataagatatatttattttaaaaacacaaggtcactattttattgaatatatttgttttgataactcataccttaataataggtgtgtttgacatatttcttttttcattttgacaatgaactcacattctaatccagaaattttaaacaactactgtgataaataccaatctgctacttttatagattttaccccattaaaatattactttactgacttttactatgtgaagatatatagctttggaaatgtcccaggctattcaagaaatataaaaaactagaaggatactatatataccatatacaatgctttaatattttaatagagctactgtatataatacaaattagggaaatacttgaatatatcattgagaaaaaattattgtcagatcttactgaattattgtcagactttattaaataaagatagaagaaaaccttgctaatgaattaaagtgaaatttgcatgggattcagtttctctaatgttattttccgctgaaatctctaaagaacaagaatgacttcaattagtaaaagtcaattttgggaaaagtcatgggtatctgttttttaagtgtgtcaatctgattaaaatggatgaaacaaattactcatcataagttgtttcttaagctgtcaatatgtcaatagatggtgagttcagaacttatttcaaattgctaagacaaattatctaaattcgtaagaattaacatatagaatggtctggtcagtacatttataatttatctatgcatgaaaaagtattgttttgtttgaaacatgaatttcatagcaagctgccatagaaaggaacgcaggctgttctagaccttcaactgcctaaattatacaaaaattcattttaataaactcaattattagctatttattattcaaagacccatatttaaatcctttgctgaccatgttgacatatatcagccttcttctagacaaactgtcaactctcaaccatcttgacagtagaagtgacagtaaaaaatgttgaatgatcagagattatattaaaataaacatgtaattttcaagtatttttgttgtgcttttataatattaattctagatcagatttattttatagccagggtttgtctgttgtagagtcttgaggcgtagcagtcattcatgattaatcactgttagttttgtacccatatatttttagaatagttttaaatgttagatttctcaaaagctaaatgctacttaatatctttgtatcatactcataaagcaaagtaaatctgacactttttttaaagcaaacttctttgctgtcaaaaaaataaatttggggaaatttctagcttttaaaatgtagatctgcattttactgtgattacttgtgaaagtcatattttaattttctaaattctaatttgtcattttatttcctaaagttaatttccaatgcatttattcataaaatattcattctggaatgcagtgtttgtttaaatgtaatccaatgtatatagaattagtggtggctgtagtgctgtatttattgcttataattttttttaaatgtgaacttacttttaattttctcttggttttaatctgctagtagaaaccactagttatctgtaaaaatatattcaagatattctgatcaattataacaatttatgttatgcctagagtatatctctattttttgattgtatgaaaatattaaagttatgagttaaagtttattttcactgatatttactacagtgccaaataatctaatttataaacataattcttacagtaatcaatgggatacttctcaaaattaacaaatctcttaacaaaatatatcttttgccctctttaaagtcttcagtaaaccagtaaatgaattcaataaaccaa

SEQ ID NO: 267024 - DNA, 5223 bp, Artificial Sequence
  derived and/or modified sequence
acacagcctatgatctctctctgttcaggctgcttcttgctcttgtctcacaataagaaaggagtgctgctttcctggggtatgctatttgagaaagaaagtaacctaacactaactgcaggcggggtcagagtgatgtaacaggaagctctgatgtttcccttctgctgctgatcacttacaatctgacaacacttacaatctactcagaacaacctctctctctccagcagagagtgtcacctcctgctttaggaccatcaagctctgctaactgaatctcatcctaattgcaggatcacattgcaaagctttcactctttcccaccttgcttgtgggtaaatctcttctgcggaatctcagaaagtaaagttccatcctgagaatatttcacaaagaatttccttaagagctggactggggtcctacgatgatacaccaaccacttgtgctaccatctgtcaaaactttggatggccctactttcaggtcttgacccctgaatttaagaaattcttaaagacaatgtcaaatatgatccaagagaaaatgtgatttgagactggagacaattgtgcatatcgtctaataataaaaacccatactagcctatagaaaacaatatttgaaagattgctaccactaaaaagaaaactactacaacttgacaagactgctgcaaacttcaatttgtcaaccacaacttgacaaggttgctataaaacaagattgctacaacttctagtttatgttatacagcatatttcattttggcttaatgatggagaaaaagtgtaccctgaattttctggttctcttgcctttttttatgattcttgttacagcagaattagaagagagtcctgaggactcaattcagttgggagttactagaaataaaatcatgacagctcaatatgaatgttaccaaaagattatgcaagaccccattcaacaagcagaaggcgtttactgcaacagaacctgggatggatggctctgctggaacgatgttgcagcaggaactgaatcaatgcagctctgccctgattactttcaggactttgatccatcagaaaaagttacaaagatctgtgaccaagatggaaactggtttagacatccagcaagcaacagaacatggacaaattatacccagtgtaatgttaacacccacgagaaagtgaagactgcactaaatttgttttacctgaccataattggacacggattgtctattgcatcactgcttatctcgcttggcatattcttttatttcaagagcctaagttgccaaaggattaccttacacaaaaatctgttcttctcatttgtttgtaactctgttgtaacaatcattcacctcactgcagtggccaacaaccaggccttagtagccacaaatcctgttagttgcaaagtgtcccagttcattcatctttacctgatgggctgtaattacttttggatgctctgtgaaggcatttacctacacacactcattgtggtggccgtgtttgcagagaagcaacatttaatgtggtattattttcttggctggggatttccactgattcctgcttgtatacatgccattgctagaagcttatattacaatgacaattgctggatcagttctgatacccatctcctctacattatccatggcccaatttgtgctgctttactggtgaatctttttttcttgttaaatattgtacgcgttctcatcaccaagttaaaagttacacaccaagcggaatccaatctgtacatgaaagctgtgagagctactcttatcttggtgccattgcttggcattgaatttgtgctgattccatggcgacctgaaggaaagattgcagaggaggtatatgactacatcatgcacatccttatgcacttccagggtcttttggtctctaccattttctgcttctttaatggagaggttcaagcaattctgagaagaaactggaatcaatacaaaatccaatttggaaacagcttttccaactcagaagctcttcgtagtgcgtcttacacagtgtcaacaatcagtgatggtccaggttatagtcatgactgtcctagtgaacacttaaatggaaaaagcatccatgatattgaaaatgttctcttaaaaccagaaaatttatataattgaaaatagaaggatggttgtctcactgttttgtgcttctcctaactcaaggacttggacccatgactctgtagccagaagacttcaatattaaatgactttttgaatgtcataaagaagagccttcacatgaaattagtagtgtgttgataagagtgtaacatccagctctatgtgggaaaaaagaaatcctggtttgtaatgtttgtcagtaaatactcccactatgcctgatgtgacgctactaacctgacatcaccaagtgtggaattggagaaaagcacaatcaacttttctgagctggtgtaagccagttccagcacaccattgcatgaattcacaaacaaatggctgtaaaactaaacatacatgttgggcatgattctacccttattgccccaagagacctagctaaggtctataaacatgaagggaaaattagcttttagttttaaaactctttatcccatcttgattggggcagttgactttttttttgcccagagtgccgtagtcctttttgtaactaccctctcaaatggacaataccagaagtgaattatccctgctggctttcttttctctatgaaaagcaactgagtacaattgttatgatctactcatttgctgacacatcagttatatcttgtggcatatccattgtggaaactggatgaacaggatgtataatatgcaatcctacttctatatcattaggaaaacatcttagttgatgctacaaaacaccttgtcaacctcttcctgtcttaccaaacagtgggagggaattcctagctgtaaatataaattttgtcccttccatttctactgtataaacaaattagcaatcattttatataaagaaaatcaatgaaggatttcttattttcttggaattttgtaaaaagaaattgtgaaaaatgagcttgtaaatactccattattttattttatagtctcaaatcaaatacatacaacctatgtaatttttaaagcaaatatataatgcaacaatgtgtgtatgttaatatctgatactgtatctgggctgattttttaaataaaatagagtctggaatgctatatttggtaaatattttaaagacaaccagatgccagcatcagaagtctgtttgagaactaagagaacagaaacatctatcataagatatatttattttaaaaacacaaggtcactattttattgaatatatttgttttgataactcataccttaataataggtgtgtttgacatatttcttttttcattttgacaatgaactcacattctaatccagaaattttaaacaactactgtgataaataccaatctgctacttttatagattttaccccattaaaatattactttactgacttttactatgtgaagatatatagctttggaaatgtcccaggctattcaagaaatataaaaaactagaaggatactatatataccatatacaatgctttaatattttaatagagctactgtatataatacaaattagggaaatacttgaatatatcattgagaaaaaattattgtcagatcttactgaattattgtcagactttattaaataaagatagaagaaaaccttgctaatgaattaaagtgaaatttgcatgggattcagtttctctaatgttattttccgctgaaatctctaaagaacaagaatgacttcaattagtaaaagtcaattttgggaaaagtcatgggtatctgttttttaagtgtgtcaatctgattaaaatggatgaaacaaattactcatcataagttgtttcttaagctgtcaatatgtcaatagatggtgagttcagaacttatttcaaattgctaagacaaattatctaaattcgtaagaattaacatatagaatggtctggtcagtacatttataatttatctatgcatgaaaaagtattgttttgtttgaaacatgaatttcatagcaagctgccatagaaaggaacgcaggctgttctagaccttcaactgcctaaattatacaaaaattcattttaataaactcaattattagctatttattattcaaagacccatatttaaatcctttgctgaccatgttgacatatatcagccttcttctagacaaactgtcaactctcaaccatcttgacagtagaagtgacagtaaaaaatgttgaatgatcagagattatattaaaataaacatgtaattttcaagtatttttgttgtgcttttataatattaattctagatcagatttattttatagccagggtttgtctgttgtagagtcttgaggcgtagcagtcattcatgattaatcactgttagttttgtacccatatatttttagaatagttttaaatgttagatttctcaaaagctaaatgctacttaatatctttgtatcatactcataaagcaaagtaaatctgacactttttttaaagcaaacttctttgctgtcaaaaaaataaatttggggaaatttctagcttttaaaatgtagatctgcattttactgtgattacttgtgaaagtcatattttaattttctaaattctaatttgtcattttatttcctaaagttaatttccaatgcatttattcataaaatattcattctggaatgcagtgtttgtttaaatgtaatccaatgtatatagaattagtggtggctgtagtgctgtatttattgcttataattttttttaaatgtgaacttacttttaattttctcttggttttaatctgctagtagaaaccactagttatctgtaaaaatatattcaagatattctgatcaattataacaatttatgttatgcctagagtatatctctattttttgattgtatgaaaatattaaagttatgagttaaagtttattttcactgatatttactacagtgccaaataatctaatttataaacataattcttacagtaatcaatgggatacttctcaaaattaacaaatctcttaacaaaatatatcttttgccctctttaaagtcttcagtaaaccagtaaatgaattcaataaaccaa

SEQ ID NO: 267025 - DNA, 1984 bp, Artificial Sequence
  derived and/or modified sequence
agaacaacctctctctctccagcagagagtgtcacctcctgctttaggaccatcaagctctgctaactgaatctcatcctaattgcaggatcacattgcaaagctttcactctttcccaccttgcttgtgggtaaatctcttctgcggaatctcagaaagtaaagttccatcctgagaatatttcacaaagaatttccttaagagctggactgggtcttgacccctgaatttaagaaattcttaaagacaatgtcaaatatgatccaagagaaaatgtgatttgagactggagacaattgtgcattttatgttatacagcatatttcattttggcttaatgatggagaaaaagtgtaccctgaattttctggttctcttgcctttttttatgattcttgttacagcagaattagaagagagtcctgaggactcaattcagttgggagttactagaaataaaatcatgacagctcaatatgaatgttaccaaaagattatgcaagaccccattcaacaagcagaaggcgtttactgcaacagaacctgggatggatggctctgctggaacgatgttgcagcaggaactgaatcaatgcagctctgccctgattactttcaggactttgatccatcagaaaaagttacaaagatctgtgaccaagatggaaactggtttagacatccagcaagcaacagaacatggacaaattatacccagtgtaatgttaacacccacgagaaagtgaagactgcactaaatttgttttacctgaccataattggacacggattgtctattgcatcactgcttatctcgcttggcatattcttttatttcaagagcctaagttgccaaaggattaccttacacaaaaatctgttcttctcatttgtttgtaactctgttgtaacaatcattcacctcactgcagtggccaacaaccaggccttagtagccacaaatcctgttagttgcaaagtgtcccagttcattcatctttacctgatgggctgtaattacttttggatgctctgtgaaggcatttacctacacacactcattgtggtggccgtgtttgcagagaagcaacatttaatgtggtattattttcttggctggggatttccactgattcctgcttgtatacatgccattgctagaagcttatattacaatgacaattgctggatcagttctgatacccatctcctctacattatccatggcccaatttgtgctgctttactggtgaatctttttttcttgttaaatattgtacgcgttctcatcaccaagttaaaagttacacaccaagcggaatccaatctgtacatgaaagctgtgagagctactcttatcttggtgccattgcttggcattgaatttgtgctgattccatggcgacctgaaggaaagattgcagaggaggtatatgactacatcatgcacatccttatgcacttccagggtcttttggtctctaccattttctgcttctttaatggagaggttcaagcaattctgagaagaaactggaatcaatacaaaatccaatttggaaacagcttttccaactcagaagctcttcgtagtgcgtcttacacagtgtcaacaatcagtgatggtccaggttatagtcatgactgtcctagtgaacacttaaatggaaaaagcatccatgatattgaaaatgttctcttaaaaccagaaaatttatataattgaaaatagaaggatggttgtctcactgttttgtgcttctcctaactcaaggacttggacccatgactctgtagccagaagacttcaatattaaatgactttttgaatgtcataaagaagagccttcacatgaaattagtagtgtgttgataagagtgtaacatccagctctatgtgggaaaaaagaaatcctggtttgtaatgtttgtcagtaaatactcccactatgcctgatgtgacgctactaacctgacatcacc

SEQ ID NO: 267026 - DNA, 591 bp, Artificial Sequence
  derived and/or modified sequence
agaacaacctctctctctccagcagagagtgtcacctcctgctttaggaccatcaagctctgctaactgaatctcatcctaattgcaggatcacattgcaaagctttcactctttcccaccttgcttgtgggtaaatctcttctgcggaatctcagaaagtaaagttccatcctgagaatatttcacaaagaatttccttaagagctggactgggtcttgacccctgaatttaagaaattcttaaagacaatgtcaaatatgatccaagagaaaatgtgatttgagactggagacaattgtgcatcctatagaaaacaatatttgaaagattgctaccactaaaaagaaaactactacaacttgacaagactgctgcaaacttcaatttgtcaaccacaacttgacaaggttgctataaaacaagattgctacaacttctagtttatgttatacagcatatttcattttggcttaatgatggagaaaaagtgtaccctgaattttctggttctcttgcctttttttatgattcttgttacagcagaattagaagagagtcctgaggactcaattcagttgggagttactag

SEQ ID NO: 267027 - DNA, 642 bp, Artificial Sequence
  derived and/or modified sequence
agaacaacctctctctctccagcagagagtgtcacctcctgctttaggaccatcaagctctgctaactgaatctcatcctaattgcaggatcacattgcaaagctttcactctttcccaccttgcttgtgggtaaatctcttctgcggaatctcagaaagtaaagttccatcctgagaatatttcacaaagaatttccttaagagctggactggggtcctacgatgatacaccaaccacttgtgctaccatctgtcaaaactttggatggccctactttcaggtcttgacccctgaatttaagaaattcttaaagacaatgtcaaatatgatccaagagaaaatgtgatttgagactggagacaattgtgcattttatgttatacagcatatttcattttggcttaatgatggagaaaaagtgtaccctgaattttctggttctcttgcctttttttatgattcttgttacagcagaattagaagagagtcctgaggactcaattcagttgggagttactagaaataaaatcatgacagctcaatatgaatgttaccaaaagattatgcaagaccccattcaacaagcagaaggcgtttactgcaacagaacctgggatggatggctctgctggaacgatgt

SEQ ID NO: 267028 - protein, 170 aa, Artificial Sequence
  derived and/or modified sequence
MATATNELGQATCAASLTVRPGGSTSPFSSPITSDEEYLSPPEEFPEPGETWPRTPTMKPSPSQNRRSSDTGSKAPPTFKVSLMDQSVREGQDVIMSIRVQGEPKPVVSWLRNRQPVRPDQRRFAEEAEGGLCRLRILAAERGDAGFYTCKAVNEYGARQCEARLEVRGE

SEQ ID NO: 267029 - protein, 399 aa, Artificial Sequence
  derived and/or modified sequence
MAQRAFPNPYADYNKSLAEGYFDAAGRLTPEFSQRLTNKIRELLQQMERGLKSADPRDGTGYTGWAGIAVLYLHLYDVFGDPAYLQLAHGYVKQSLNCLTKRSITFLCGDAGPLAVAAVLYHKMNNEKQAEDCITRLIHLNKIDPHAPNEMLYGRIGYIYALLFVNKNFGVEKIPQSHIQQICETILTSGENLARKRNFTAKSPLMYEWYQEYYVGAAHGLAGIYYYLMQPSLQVSQGKLHSLVKPSVDYVCQLKFPSGNYPPCIGDNRDLLVHWCHGAPGVIYMLIQAYKVFREEKYLCDAYQCADVIWQYGLLKKGYGLCHGSAGNAYAFLTLYNLTQDMKYLYRACKFAEWCLEYGEHGCRTPDTPFSLFEGMAGTIYFLADLLVPTKARFPAFEL

SEQ ID NO: 267030 - DNA, 1647 bp, Artificial Sequence
  derived and/or modified sequence
gagaagggcttcaggacgcgggaggcgcacttgcttcaagtcgcgggcgtgggaacggggcttgcttccggcgtcatggctcaaagggccttcccgaatccttatgctgattataacaaatccctggccgaaggctactttgatgctgccgggaggctgactcctgagttctcacaacgcttgaccaataagattcgggagcttcttcagcaaatggagagaggcctgaaatcagcagaccctcgggatggcaccggttacactggctgggcaggtattgctgtgctttacttacatctttatgatgtatttggggaccctgcctacctacagttagcacatggctatgtaaagcaaagtctgaactgcttaaccaagcgctccatcaccttcctttgtggggatgcaggccccctggcagtggccgctgtgctatatcacaagatgaacaatgagaagcaggcagaagattgcatcacacggctaattcacctaaataagattgatcctcatgctccaaatgaaatgctctatgggcgaataggctacatctatgctcttctttttgtcaataagaactttggagtggaaaagattcctcaaagccatattcagcagatttgtgaaacaattttaacctctggagaaaacctagctaggaagagaaacttcacggcaaagtctccactgatgtatgaatggtaccaggaatattatgtaggggctgctcatggcctggctggaatttattactacctgatgcagcccagccttcaagtgagccaagggaagttacatagtttggtcaagcccagtgtagactacgtctgccagctgaaattcccttctggcaattaccctccatgtataggtgataatcgagatctgcttgtccattggtgccatggcgcccctggggtaatctacatgctcatccaggcctataaggtattcagagaggaaaagtatctctgtgatgcctatcagtgtgctgatgtgatctggcaatatgggttgctgaagaagggatatgggctgtgccacggttctgcagggaatgcctatgccttcctgacactctacaacctcacacaggacatgaagtacctgtatagggcctgtaagtttgctgaatggtgcttagagtatggagaacatggatgcagaacaccagacacccctttctctctctttgaaggaatggctggaacaatatatttcctggctgacctgctagtccccacaaaagccaggttccctgcatttgaactctgaaaggatagcatgccacctgcaactcactgcatgaccctttctgtatattcaaacccaagctaagtgcttccgttgctttccaaggaaacaaagagtcaaactgtggacttgattttgttagcttttttcagaatttatctttcattcagttcccttccattatcatttacttttacttagaagtatccaaggaagtcttttaactttaatttccatttcttcctaaagggagagtgagtgatatgtacagtgttttgagattgtatacatatattccagaacttggaggaaatcttatttaagtttatgaatataaccatctgttactgttctaaaaatgtttaaaagaaactcaatacagataaagataaa

SEQ ID NO: 267031 - DNA, 1270 bp, Artificial Sequence
  derived and/or modified sequence
ctggcaggaactgggcggtaaaatagcccttctgttactgtccggggctgcggggcttgcttccggcgtcatggctcaaagggccttcccgaatccttatgctgattataacaaatccctggccgaaggctactttgatgctgccgggaggctgactcctgagttctcacaacgcttgaccaataagattcgggagcttcttcagcaaatggagagaggcctgaaatcagcagaccctcgggatggcaccggttacactggctgggcaggtattgctgtgctttacttacatctttatgatgtatttggggaccctgcctacctacagttagcacatggctatgtaaagcaaagtctgaactgcttaaccaagcgctccatcaccttcctttgtggggatgcaggccccctggcagtggccgctgtgctatatcacaagatgaacaatgagaagcaggcagaagattgcatcacacggctaattcacctaaataagattgatcctcatgctccaaatgaaatgctctatgggcgaataggctacatctatgctcttctttttgtcaataagaactttggagtggaaaagattcctcaaagccatattcagcagatttgtgaaacaattttaacctctggagaaaacctagctaggaagagaaacttcacggcaaagtctccactgatgtatgaatggtaccaggaatattatgtaggggctgctcatggcctggctggaatttattactacctgatgcagcccagccttcaagtgagccaagggaagttacatagtttggtcaagcccagtgtagactacgtctgccagctgaaattcccttctggcaattaccctccatgtataggtgataatcgagatctgcttgtccattggtgccatggcgcccctggggtaatctacatgctcatccaggcctataaggtattcagagaggaaaagtatctctgtgatgcctatcagtgtgctgatgtgatctggcaatatgggttgctgaagaagggatatgggctgtgccacggttctgcagggaatgcctatgccttcctgacactctacaacctcacacaggacatgaagtacctgtatagggcctgtaagtttgctgaatggtgcttagagtatggagaacatggatgcagaacaccagacacccctttctctctctttgaaggaatggctggaacaatatatttcctggctgacctgctagtccccacaaaagccaggttccctgcatttgaactctga

SEQ ID NO: 267032 - DNA, 4503 bp, Artificial Sequence
  derived and/or modified sequence
taaaatagcccttctgttactgtccggggctgcggggtgagaggccagggcttgcttccggcgtcatggctcaaagggccttcccgaatccttatgctgattataacaaatccctggccgaaggctactttgatgctgccgggaggctgactcctgagttctcacaacgcttgaccaataagattcgggagcttcttcagcaaatggagagaggcctgaaatcagcagaccctcgggatggcaccggttacactggctgggcaggtattgctgtgctttacttacatctttatgatgtatttggggaccctgcctacctacagttagcacatggctatgtaaagcaaagtctgaactgcttaaccaagcgctccatcaccttcctttgtggggatgcaggccccctggcagtggccgctgtgctatatcacaagatgaacaatgagaagcaggcagaagattgcatcacacggctaattcacctaaataagattgatcctcatgctccaaatgaaatgctctatgggcgaataggctacatctatgctcttctttttgtcaataagaactttggagtggaaaagattcctcaaagccatattcagcagatttgtgaaacaattttaacctctggagaaaacctagctaggaagagaaacttcacggcaaagtctccactgatgtatgaatggtaccaggaatattatgtaggggctgctcatggcctggctggaatttattactacctgatgcagcccagccttcaagtgagccaagggaagttacatagtttggtcaagcccagtgtagactacgtctgccagctgaaattcccttctggcaattaccctccatgtataggtgataatcgagatctgcttgtccattggtgccatggcgcccctggggtaatctacatgctcatccaggcctataaggtattcagagaggaaaagtatctctgtgatgcctatcagtgtgctgatgtgatctggcaatatgggttgctgaagaagggatatgggctgtgccacggttctgcagggaatgcctatgccttcctgacactctacaacctcacacaggacatgaagtacctgtatagggcctgtaagtttgctgaatggtgcttagagtatggagaacatggatgcagaacaccagacacccctttctctctctttgaaggaatggctggaacaatatatttcctggctgacctgctagtccccacaaaagccaggttccctgcatttgaactctgaaaggatagcatgccacctgcaactcactgcatgaccctttctgtatattcaaacccaagctaagtgcttccgttgctttccaaggaaacaaagagtcaaactgtggacttgattttgttagcttttttcagaatttatctttcattcagttcccttccattatcatttacttttacttagaagtatccaaggaagtcttttaactttaatttccatttcttcctaaagggagagtgagtgatatgtacagtgttttgagattgtatacatatattccagaacttggaggaaatcttatttaagtttatgaatataaccatctgttactgttctaaaaatgtttaaaagaaactcaatacagataaagataaatatgtgactattattgggtattacacttcacttctctttaatatttttcctccaactggagggcagacaattttctgacttgcttttctctaggtggttcattttgaaaggggacagaaatataactaaatgcttccaggagaaaaattccaagagttacaatctggacttggtacctaaatatcattttttaaattcttgatgcctatttggactagaggtaaacatactttcagattggcctgtttttgtcggtaaggcatacagccttcagaagccaacatttttaatcaaaaacttataaaacatgatgatcattgtgaaaattctgagttgaaggttagtttaagataagctaacaataacagtctgtgttttctctaaaataatctgagttttttggaactctttatttaaatatgtgtgtttttcagtattcaaataagatcaggaagccaattttctatgtatgaatatgctttaacctaggatttcagtccactctgactgactttctaaactttaacttgggtttttacagtgactatgcattagtgctgactctttggtataagccataaaatattttccttcctatcaatttatctgaactttggtcttttcactaaattgtacagtattctacttctgtttaaaaaggggagatgagaaagggaatactatctaaccaataacttgaacaaaaacactaaactaagcatttaatagaaatgctttttattgaggaggtattatccagagttcatgcttagaacaaatgcatctttgcgtatcctagacttaacaattcatcagtttctgagaccacagaatcaggttttccgtagtagataaagactctctggtgcttcaaattctgttcaagtgttttgactcatcagcttctactctttctattactgcctttgcctggcttgttttgtctctttgcaactgattttgcaaaaaaaaattgtagctttaaaataacagggtctaagtattttaaatgtgcctatttcacagctctcttggtcacaaaaacatgctatttttattggaacttcaaaccaaatccccactgagtgtgtactggttcctgcaggtagcagtctcctattatctcctgtttagcaccaaaagagctaatattattggaaactgaccttttaaaggccactggcagtaggatttaaaaagcagcccactgctcagtttccaggatcagcttcctccttctgtcacttgtgtaagttggcactaccttgtgcctctcagattgctgaagtgctgctggtaagcatgtgcatgctctgcctttcttgtgaaagttttcaatcagcgatatcagcacttacagtaagaagtaaaagtagtgcacagcaaagctaatttgcctttgcctggggtgttcagcttgaaagaataaagctcatttggtttagttaaatgtcttactctactgtgcctatgcttttagctgcgttactaagcaagggaaaaataacagtttctctgagccagagaagacttgatcacagttctccaagcatcgtgatagcaatgcttaaccccaggaagatttcaaggcagggagaagaacatttcaaataagattcttgttaacccatttatgcctagtgttccattattggaatgctaagcttgtgggagtcatttacatcctactgctcaaagtcattgccaaggtctgatttttcacacaaaaaattgcaacccccagcataaatgggttagctactgtcatcagttagcaaattcatccacacaaacacaattagagtttggtttttttttaagcttttcaaaacttactaaactggcacaattttatatgtatgctatttgttgtatttatgcttaagagcaaaaaagttttgatgggattttaaattcaggcaaagcctacaacgctgagacaatcccctaacaacatggtagtaactaaagaaacttttatactaggcttcttagttttaaaaggaagtggcatcattgtttcagttctagtttgtatttttctctcagatatttttcttctttaaaaatctttcccagaagttggttcctagaaaactcaataccatcatctcttatctctatacagggactaggtaataaaaccttcaaaggttgtcaaaggtcatcaagcagtgttcatttatcctgtcacatgtttctgtttctatagtaatttagaaattgcaaatagttaacttttcatcatgtaaaaagttaacattatcctatttccatagataccatggacggcggtgtggcctgagttgtcagtctttaatcctgagtcatgtggctctcttttcatctttgatgtcagttccaattatttggcatcaaaaaccttcatggtaggtagagttttaggtaaaagtggatctagggttactttctttattaacatttcctaaataactgaattgagagacatactctgctactatgtcctcaggttaatttttgtctgatcttacgatgccctgccttttactagctactttagaaatagaaaatgtgaagagtgactatttacatgtatactcctttggctgctagaactcatctgtagtcctttattatttacactgaattccaatttcatttctgcttccgctaagtaagagcacctcattcctgtgttttctctactattgagctgtagacgaactgtttctctaattataaagcaaactgtttgggatattcagggaaactaccccaatgttatgttgtcatttaatgggaaaggctgggatcatatgtatttctatgttctgtaaagtatttgacttactagttctcaataaaattttattaggactatata

SEQ ID NO: 267033 - DNA, 4781 bp, Artificial Sequence
  derived and/or modified sequence
actgtccggggctgcggggtgagaggccagggccgagaagggcttcaggacgcgggaggcgcacttgcttcaagtcgcgggcgtgggaacggggttgcaaaacggggcctctttgtccgggtgggttaagggccctggcagctttttcgcgaaggcgccatgtcctagcagttgggccgcagtgggcccgaggtccactcggaccgccgagacggctcgatggccctggagctggaggaagggggatacctgggcgccgccgccgccctcgcaactcggccgaggcccctatctcaacctagtttctgtttttcccctgttctgcaggcttgcttccggcgtcatggctcaaagggccttcccgaatccttatgctgattataacaaatccctggccgaaggctactttgatgctgccgggaggctgactcctgagttctcacaacgcttgaccaataagattcgggagcttcttcagcaaatggagagaggcctgaaatcagcagaccctcgggatggcaccggttacactggctgggcaggtattgctgtgctttacttacatctttatgatgtatttggggaccctgcctacctacagttagcacatggctatgtaaagcaaagtctgaactgcttaaccaagcgctccatcaccttcctttgtggggatgcaggccccctggcagtggccgctgtgctatatcacaagatgaacaatgagaagcaggcagaagattgcatcacacggctaattcacctaaataagattgatcctcatgctccaaatgaaatgctctatgggcgaataggctacatctatgctcttctttttgtcaataagaactttggagtggaaaagattcctcaaagccatattcagcagatttgtgaaacaattttaacctctggagaaaacctagctaggaagagaaacttcacggcaaagtctccactgatgtatgaatggtaccaggaatattatgtaggggctgctcatggcctggctggaatttattactacctgatgcagcccagccttcaagtgagccaagggaagttacatagtttggtcaagcccagtgtagactacgtctgccagctgaaattcccttctggcaattaccctccatgtataggtgataatcgagatctgcttgtccattggtgccatggcgcccctggggtaatctacatgctcatccaggcctataaggtattcagagaggaaaagtatctctgtgatgcctatcagtgtgctgatgtgatctggcaatatgggttgctgaagaagggatatgggctgtgccacggttctgcagggaatgcctatgccttcctgacactctacaacctcacacaggacatgaagtacctgtatagggcctgtaagtttgctgaatggtgcttagagtatggagaacatggatgcagaacaccagacacccctttctctctctttgaaggaatggctggaacaatatatttcctggctgacctgctagtccccacaaaagccaggttccctgcatttgaactctgaaaggatagcatgccacctgcaactcactgcatgaccctttctgtatattcaaacccaagctaagtgcttccgttgctttccaaggaaacaaagagtcaaactgtggacttgattttgttagcttttttcagaatttatctttcattcagttcccttccattatcatttacttttacttagaagtatccaaggaagtcttttaactttaatttccatttcttcctaaagggagagtgagtgatatgtacagtgttttgagattgtatacatatattccagaacttggaggaaatcttatttaagtttatgaatataaccatctgttactgttctaaaaatgtttaaaagaaactcaatacagataaagataaatatgtgactattattgggtattacacttcacttctctttaatatttttcctccaactggagggcagacaattttctgacttgcttttctctaggtggttcattttgaaaggggacagaaatataactaaatgcttccaggagaaaaattccaagagttacaatctggacttggtacctaaatatcattttttaaattcttgatgcctatttggactagaggtaaacatactttcagattggcctgtttttgtcggtaaggcatacagccttcagaagccaacatttttaatcaaaaacttataaaacatgatgatcattgtgaaaattctgagttgaaggttagtttaagataagctaacaataacagtctgtgttttctctaaaataatctgagttttttggaactctttatttaaatatgtgtgtttttcagtattcaaataagatcaggaagccaattttctatgtatgaatatgctttaacctaggatttcagtccactctgactgactttctaaactttaacttgggtttttacagtgactatgcattagtgctgactctttggtataagccataaaatattttccttcctatcaatttatctgaactttggtcttttcactaaattgtacagtattctacttctgtttaaaaaggggagatgagaaagggaatactatctaaccaataacttgaacaaaaacactaaactaagcatttaatagaaatgctttttattgaggaggtattatccagagttcatgcttagaacaaatgcatctttgcgtatcctagacttaacaattcatcagtttctgagaccacagaatcaggttttccgtagtagataaagactctctggtgcttcaaattctgttcaagtgttttgactcatcagcttctactctttctattactgcctttgcctggcttgttttgtctctttgcaactgattttgcaaaaaaaaattgtagctttaaaataacagggtctaagtattttaaatgtgcctatttcacagctctcttggtcacaaaaacatgctatttttattggaacttcaaaccaaatccccactgagtgtgtactggttcctgcaggtagcagtctcctattatctcctgtttagcaccaaaagagctaatattattggaaactgaccttttaaaggccactggcagtaggatttaaaaagcagcccactgctcagtttccaggatcagcttcctccttctgtcacttgtgtaagttggcactaccttgtgcctctcagattgctgaagtgctgctggtaagcatgtgcatgctctgcctttcttgtgaaagttttcaatcagcgatatcagcacttacagtaagaagtaaaagtagtgcacagcaaagctaatttgcctttgcctggggtgttcagcttgaaagaataaagctcatttggtttagttaaatgtcttactctactgtgcctatgcttttagctgcgttactaagcaagggaaaaataacagtttctctgagccagagaagacttgatcacagttctccaagcatcgtgatagcaatgcttaaccccaggaagatttcaaggcagggagaagaacatttcaaataagattcttgttaacccatttatgcctagtgttccattattggaatgctaagcttgtgggagtcatttacatcctactgctcaaagtcattgccaaggtctgatttttcacacaaaaaattgcaacccccagcataaatgggttagctactgtcatcagttagcaaattcatccacacaaacacaattagagtttggtttttttttaagcttttcaaaacttactaaactggcacaattttatatgtatgctatttgttgtatttatgcttaagagcaaaaaagttttgatgggattttaaattcaggcaaagcctacaacgctgagacaatcccctaacaacatggtagtaactaaagaaacttttatactaggcttcttagttttaaaaggaagtggcatcattgtttcagttctagtttgtatttttctctcagatatttttcttctttaaaaatctttcccagaagttggttcctagaaaactcaataccatcatctcttatctctatacagggactaggtaataaaaccttcaaaggttgtcaaaggtcatcaagcagtgttcatttatcctgtcacatgtttctgtttctatagtaatttagaaattgcaaatagttaacttttcatcatgtaaaaagttaacattatcctatttccatagataccatggacggcggtgtggcctgagttgtcagtctttaatcctgagtcatgtggctctcttttcatctttgatgtcagttccaattatttggcatcaaaaaccttcatggtaggtagagttttaggtaaaagtggatctagggttactttctttattaacatttcctaaataactgaattgagagacatactctgctactatgtcctcaggttaatttttgtctgatcttacgatgccctgccttttactagctactttagaaatagaaaatgtgaagagtgactatttacatgtatactcctttggctgctagaactcatctgtagtcctttattatttacactgaattccaatttcatttctgcttccgctaagtaagagcacctcattcctgtgttttctctactattgagctgtagacgaactgtttctctaattataaagcaaactgtttgggatattcagggaaactaccccaatgttatgttgtcatttaatgggaaaggctgggatcatatgtatttctatgttctgtaaagtatttgacttactagttctcaataaaattttattaggactatata

SEQ ID NO: 267034 - DNA, 808 bp, Artificial Sequence
  derived and/or modified sequence
agagtttgggatggcagcctcagaaggacaaacttaggccaaggagggagggagttggggtggagactgagcttctccagttggaggtctggagctaggactcttcattgaaaccggagagaaggaaaaggagagagtgaggctgactttttaactgaactccaaaattctctgagcaatagaatgggcctaatatgtaccaggcttgcttccggcgtcatggctcaaagggccttcccgaatccttatgctgattataacaaatccctggccgaaggctactttgatgctgccgggaggctgactcctgagttctcacaacgcttgaccaataagattcgggagcttcttcagcaaatggagagaggcctgaaatcagcagaccctcgggatggcaccggttacactggctgggcaggtattgctgtgctttacttacatctttatgatgtatttggggaccctgcctacctacagttagcacatggctatgtaaagcaaagtctgaactgcttaaccaagcgctccatcaccttcctttgtggggatgcaggccccctggcagtggccgctgtgctatatcacaagatgaacaatgagaagcaggcagaagattgcatcacacggctaattcacctaaataagattgatcctcatgctccaaatgaaatgctctatgggcgaataggctacatctatgctcttctttttgtcaataagaactttggagtggaaaagattcctcaaagccatattcagcagatttgtgaaacaattttaacctctggagaaaacctagctaggaaga
